United States Patent Application Publication US 2012/0070457 A1 - sequence listing, part 3

SEQ ID NO: 17120 - protein, 165 aa, Neisseria meningitidis; identical to SEQ ID NO: 7484

SEQ ID NO: 17121 - protein, 61 aa, Neisseria meningitidis; identical to SEQ ID NO: 6755

SEQ ID NO: 17122 - protein, 206 aa, Neisseria meningitidis; identical to SEQ ID NO: 7486

SEQ ID NO: 17123 - protein, 143 aa, Neisseria meningitidis; identical to SEQ ID NO: 6708

SEQ ID NO: 17124 - protein, 356 aa, Neisseria meningitidis; identical to SEQ ID NO: 6692

SEQ ID NO: 17125 - protein, 468 aa, Neisseria meningitidis; identical to SEQ ID NO: 29

SEQ ID NO: 17126 - protein, 358 aa, Neisseria meningitidis; identical to SEQ ID NO: 6683

SEQ ID NO: 17127 - protein, 74 aa, Neisseria meningitidis; identical to SEQ ID NO: 7186

SEQ ID NO: 17128 - protein, 324 aa, Neisseria meningitidis
MPSEKNIGFMAGSSRPLWVAFALLLVSCVLFMTLNVKGDWDFVLQLRLTKLAALLMVAYAVGVSTQLFQTLTNNPILTPSILGFDSLYVFLQTLLVFTFGGVGYASLPLTGKFGFELAVMMGGSLLLFYTLIRQGGRDLPRMILIGVIFGILFRSLSSLLSRMIDPEEFTAAQANMFAGFNTVHSELLGIGALILLVSAAVVWRERYRLDVHLLGRDQAVNLGISYTRNTLWILLWIAALVATATAVVGPVSFFGLLAASLANHFSPSVRHSVRLPMTVCVGGILLVGGQTVFEHFLGMKAVLSVVVEFAGGLVFLYLVLKHKK

SEQ ID NO: 17129 - protein, 420 aa, Neisseria meningitidis
MSNTQKQLALAKAAKKSVNTADTEEKNRALLAMADSLEAATADILAANRQDLEAAAGNIPESMTDRLLLDGKRICAMADGIRAVAALPNPVGEILETSTLPNGLEIVKKRVAMGVIGIIYESRPNVTSDAAALALKSGSAVVLRSGKDAFQSARAIVAALKTGLAQTRIDPDALQLIEDTGRESSYEMMRAKDYLDLLIPRGGAGLIRAVVENAVVPVIETGTGIVHIYIDKDADWDKALRIVYNAKTSRPSVCNSMEVLLVHEDIAADFLPKLERLLVRDRIEAGLPPIRFRLDPQAARHIGGEAAGADDFDTEFLDYILAVKTVASVEEAVWHIETHSTHHSDGIVTENRHAADYFTTHIDSAAVYVNASTRFTDGGEFGLGCEMGISTQKLHARGPMGLKELTSYKYIVQGTGQVRE

SEQ ID NO: 17130 - protein, 218 aa, Neisseria meningitidis
VASVFLEGEAVEVGNIFCIGRNYAAHIEELKNEIPSEPVVFMKPSGSILNSGGTILLPEFSRDVQFECELVLLVGKDSDGTGEGKDILGCVAGYGVGLDLTARDIQCRLKEKGLPWLKAKGFRHSACVSDFAAAGRIGNPEKVLFSLKQNGVLKQRGDTGLMIYPIREILHKLAADYGLGKGDLVFTGTPSGVGAIGAGDNLALELDGLVRASFTVGC

SEQ ID NO: 17131 - protein, 283 aa, Neisseria meningitidis
MITHPQFDPVLISIGPLAVRWYALSYILGFILFTFLGRRRIAQGLSVFTKESLDDFLTWGILGVILGGRLGYVLFYKFSDYLAHPLDIFKVWEGGMSFHGGFLGVVIAIRLFGRKHGIGFLKLMDTVAPLVPLGLASGRIGNFINGELWGRVTDINAFWAMGFPQARYEDAEAAAHNPLWAEWLQQYGMLPRHPSQLYQFALEGICLFTVIWLFSKKQRSTGQVASLFLGGYGIFRFIAEFARQPDDYLGLLTLGLSMGQWLSVPMIVLGIVGFVRFGMKKQH

SEQ ID NO: 17132 - protein, 60 aa, Neisseria meningitidis; identical to SEQ ID NO: 2815

SEQ ID NO: 17133 - protein, 66 aa, Neisseria meningitidis; identical to SEQ ID NO: 2062

SEQ ID NO: 17134 - protein, 287 aa, Neisseria meningitidis
MSEIGLVKIYFGKVRDLYEIDDKRMLMVASDRLSAFDVILDDPIPSKGEILTQISNFWFKKLVHIMPNHFTGQTVYDVLPENEAKALEKRAVVAKKLTPVKVEAIVRGYLAGSGWKDYQKTGSVCGIQLPEGMQEAQQLPEVIFTPSTKAAVGDHDENISFEECERIIGKELAAEVRAKAIQLYTEAAEYAKSRGIIICDTKFEFGLDTNGTLTLMDEVLTPDSSRFWPADQYKVGTNPPSFDKQFVRDWLEQSGWNKKAPAPKVPADVIQKTVEKYREALTLLTQD

SEQ ID NO: 17135 - protein, 59 aa, Neisseria meningitidis; identical to SEQ ID NO: 642

SEQ ID NO: 17136 - protein, 351 aa, Neisseria meningitidis; identical to SEQ ID NO: 6435

SEQ ID NO: 17137 - protein, 484 aa, Neisseria meningitidis; identical to SEQ ID NO: 7365

SEQ ID NO: 17138 - protein, 190 aa, Neisseria meningitidis; identical to SEQ ID NO: 8959

SEQ ID NO: 17139 - protein, 107 aa, Neisseria meningitidis; identical to SEQ ID NO: 2524

SEQ ID NO: 17140 - protein, 642 aa, Neisseria meningitidis
LGIGLMAAFNALDGKKEDNGQIEYSQFIQQVNNGEVSGVNIEGSVVSGYLIKGERTDKSTFFTNAPLDDNLIKTLLDKNVRVKVTPEEKPSALAALFYSLLPVLLLIGAWFYFMRMQTGGGGKGGAFSFGKSRARLLDKDANKVTFADVAGCDEAKEEVQEIVDYLKAPNRYQSLGGRVPRGILLAGSPGTGKTLLAKAIAGEAGVPFFSISGSDFVEMFVGVGASRVRDMFEQAKKNAPCIIFIDEIDAVGRQRGAGLGGGNDEREQTLNQLLVEMDGFESNQTVIVIAATNRPDVLDPALQRPGRFDRQVVVPLPDIRGREQILNVHSKKVPLDESVDLLSLARGTPGFSGADLANLVNEAALFAGRRNKVKVDQSDFEDAKDKIYMGPERRSMVMHEDEKRATAYHESGHAIVAESLPFTDPVHKVTIMPRGRALGLTWQLPERDRISMYKDQMLSQLSILFGGRIAEDIFVGRISTGASNDFERATQMAREMVTRYGMSDKMGVMVYAENEGEVFLGRSVTRSQNISEKTQQDIDAEIRRILDEQYQVAYKILDENRDKMETMCKALMEWETIDRDQVLEIMAGKQPSPPKDYSHNLRENADAAEDNAPHAPTREETEAPAPADTASTESEQQPENKA

SEQ ID NO: 17141 - protein, 222 aa, Neisseria meningitidis; identical to SEQ ID NO: 4018

SEQ ID NO: 17142 - protein, 236 aa, Neisseria meningitidis; identical to SEQ ID NO: 8610

SEQ ID NO: 17143 - protein, 942 aa, Neisseria meningitidis; identical to SEQ ID NO: 7300

SEQ ID NO: 17144 - protein, 259 aa, Neisseria meningitidis; identical to SEQ ID NO: 6274

SEQ ID NO: 17145 - protein, 299 aa, Neisseria meningitidis; identical to SEQ ID NO: 167

SEQ ID NO: 17146 - protein, 96 aa, Neisseria meningitidis
MTIRPLHDRVVVKRLEAEEKTASGIVLPGAAAEKPDMGEVIAVGAGKIGKDGSRRPLDVKVGDKIIFGKYSGQTVKADGEELLVMREEDIFGIVEK

SEQ ID NO: 17147 - protein, 380 aa, Neisseria meningitidis; identical to SEQ ID NO: 5946

SEQ ID NO: 17148 - protein, 394 aa, Neisseria meningitidis; identical to SEQ ID NO: 6041

SEQ ID NO: 17149 - protein, 513 aa, Neisseria meningitidis; identical to SEQ ID NO: 6526

SEQ ID NO: 17150 - protein, 81 aa, Neisseria meningitidis; identical to SEQ ID NO: 7714

SEQ ID NO: 17151 - protein, 261 aa, Neisseria meningitidis; identical to SEQ ID NO: 5916

SEQ ID NO: 17152 - protein, 187 aa, Neisseria meningitidis; identical to SEQ ID NO: 6499

SEQ ID NO: 17153 - protein, 566 aa, Neisseria meningitidis; identical to SEQ ID NO: 6531

SEQ ID NO: 17154 - protein, 470 aa, Neisseria meningitidis
LKVEGTETLPHRLELTGIPSEWRIATTLPETGRFVFQAASYAELIDRPVEMGLIEFLDFEAAGIPHTIALSGIYPDFDRNRLVSDIKKICETELAVFSSPAPFQKYLFLLHVGDHIYGGLEHTDSTALLADRHSLPPYGMTDADDTYTTLLGLFSHEYFHAWNVKSIKPAAFVPYDLDKENYTEQLWAFEGITSYYDDLFLARSRTISPESYLNLLAQGITRVQQTRGRLRQTLAESSFTAWNKFYKPDENSPNAIVSYYQKGALAALCLDLIIRNRSNGRHSLDTLMDKLYREWRDTHSGIPEKHWQIRCQEITGLDLEDFFQKALYSTEDLPLAECLATAGVGLTFLPLPRQHGGGYAEHICPVPSAGDFGARFKQNTDHIVLTHVFNGGSAESAALCPQDKIIALDGYACTDFTAQWARYHVNAKINIHFFRAGILRQTVLTVQAAAADTAILHITDRNLLDNWLFG

SEQ ID NO: 17155 - protein, 181 aa, Neisseria meningitidis; identical to SEQ ID NO: 6767

SEQ ID NO: 17156 - protein, 112 aa, Neisseria meningitidis
MKKIEAVIKPFKLDDVREALTEIGITGMTVSEVKGFGRQKGHTEIYRGAEYAVDFLPKVKIELVLADDAVERAIDVIVEVARSGKIGDGKIFVLPVEEAIRIRTGERADAAV

SEQ ID NO: 17157 - protein, 436 aa, Neisseria meningitidis; identical to SEQ ID NO: 6841

SEQ ID NO: 17158 - protein, 240 aa, Neisseria meningitidis; identical to SEQ ID NO: 1969

SEQ ID NO: 17159 - protein, 343 aa, Neisseria meningitidis
MLQTDNLTAAQPQRIVAAQTASAQEELLERALRPKTLDDYIGQHKAKEQLAIFIQAAKKRGEALDHVLLFGPPGLGKTTLAHIIAKELGVNLRQTSGPVLERAGDLAALLTNLDPHDVLFIDEIHRLSPVVEEILYPALEDYRLDIMIGEGPAARSVKIDLPPFTLVGATTRAGMLTNPLRDRFGIVSRLEFYENRDLATIVSRSAQLLQLDMSEEGAEEIAKRSRGTPRIANRLLRRVRDFADVKNNGTIDGGIADAALSMLDVDVQGLDVMDRKFLEAVLHKFGGGPVGLDNVAAAIGESTDTIEDVIEPYLIQQGFLQRTPRGRMATERAYLHFGLPVEK

SEQ ID NO: 17160 - protein, 95 aa, Neisseria meningitidis; identical to SEQ ID NO: 6871

SEQ ID NO: 17161 - protein, 94 aa, Neisseria meningitidis; identical to SEQ ID NO: 6698

SEQ ID NO: 17162 - protein, 210 aa, Neisseria meningitidis
MDKMDQFELCQKEHVNPFALSKQYLLVVTFVKSSSKNFQAALLWARSAKLFENLEIGKETIYCCAFDKTAEQAGMAGVFLNYIENWNGKQIYINGRIHSGSIYDLLGVLDCYQKSQSCPNPKSHCCFVSDDIFLWHGSRPTFEISLDLTGKKKETSSAKKFVMPCINFRHHRIEKETYLGNWNEQIAALAVKQNIDWCPSFDIENFRQYE

SEQ ID NO: 17163 - protein, 196 aa, Neisseria meningitidis
MNWLNRGIQEKILRVLSDNYPNCLKATKVYNSLFPSNSLPITSNIPVDKQGLGLALTLGCEIQSQHLATLQSDEFQYFLKNIYYLEESGLIEITSIDSLHKNFDCKINHKGIDFLTDDGGLSAILGVVTVKLHSDTIQALIAAKIDQAEISDSEKSWLKKELGKIKDTALSTLTENAINAIPAATLITLLKKFVGL

SEQ ID NO: 17164 - protein, 123 aa, Neisseria meningitidis; identical to SEQ ID NO: 2701

SEQ ID NO: 17165 - protein, 106 aa, Neisseria meningitidis; identical to SEQ ID NO: 2449

SEQ ID NO: 17166 - protein, 945 aa, Neisseria meningitidis; identical to SEQ ID NO: 6701

SEQ ID NO: 17167 - protein, 185 aa, Neisseria meningitidis; identical to SEQ ID NO: 7373

SEQ ID NO: 17168 - protein, 242 aa, Neisseria meningitidis; identical to SEQ ID NO: 6039

SEQ ID NO: 17169 - protein, 657 aa, Neisseria meningitidis; identical to SEQ ID NO: 5941

SEQ ID NO: 17170 - protein, 160 aa, Neisseria meningitidis; identical to SEQ ID NO: 7217

SEQ ID NO: 17171 - protein, 594 aa, Neisseria meningitidis; identical to SEQ ID NO: 7023

SEQ ID NO: 17172 - protein, 102 aa, Neisseria meningitidis; identical to SEQ ID NO: 6833

SEQ ID NO: 17173 - protein, 355 aa, Neisseria meningitidis; identical to SEQ ID NO: 6188

SEQ ID NO: 17174 - protein, 310 aa, Neisseria meningitidis; identical to SEQ ID NO: 6017

SEQ ID NO: 17175 - protein, 200 aa, Neisseria meningitidis; identical to SEQ ID NO: 4060

SEQ ID NO: 17176 - protein, 254 aa, Neisseria meningitidis
MCSCLVVKNTVIGSGRTKIAVPLVARDAAELSAVLEQIKNMPFDIAEFRADFLECAGSIGEILHHTQTVRDALPDKPLLFTFRRHGEGGSFPCSDDYYFELLDALIESRLPDIIDIELFSGETAVRCAVANAQKNGIAALLCNHEFHRTPPQEEIVCRLKQMEDCGADICKIAVMPQSAEDVLTLLSATLKAKELAAKPIVTMSMGQTGAVSRLAGQVFGSSITFGSGTQNSAPGQIGVSALRATLDCLENGAD

SEQ ID NO: 17177 - protein, 77 aa, Neisseria meningitidis; identical to SEQ ID NO: 707

SEQ ID NO: 17178 - protein, 1083 aa, Neisseria meningitidis
MRTTPTFPTKTFKPTAMALAVATTLSACLGGGGGGTSAPDFNAGGTGIGSNSRATTAKSAAVSYAGIKNEMCKDRSMLCAGRDDVAVTDRDAKINAPPPPNLHTGDFPNPNDAYKNLINLKPAIEAGYTGRGVEVGIVDTGESVGSISFPELYGRKEHGYNENYKNYTAYMRKEAPEDGGGKDIEASFDDEAVIETEAKPTDIRHVKEIGHIDLVSHIIGGRSVDGRPAGGIAPDATLHIMNTNDGTKNEMMVAAIRNAWVKLGERGVRIVNNSFGTTSRAGTADLFQIANSEEQYRQALLDYSGGDKTDEGIRLMQQSDYGNLSYHIRNKNMLFIFSTGNDAQAQPNTYALLPFYEKDAQKGIITVAGVDRSGEKFKREMYGEPGTEPLEYGSNHCGITAMWCLSAPYEASVRFTRTNPIQIAGTSFSAPIVTGTAALLLQKYPWMSNDNLRTTLLTTAQDIGAVGVDSKFGWGLLDAGKAMNGPASFPFGDFTADTKGTSDIAYSFRNDISGTGGLIKKGGSQLQLHGNNTYTGKTIIEGGSLVLYGNNKSDMRVETKGALIYNGAASGGSLNSDGIVYLADTDQSGANETVHIKGSLQLDGKGTLYTRLGKLLKVDGTAIIGGKLYMSARGKGAGYLNSTGRRVPFLSAAKIGQDYSFFTNIETDGGLLASLDSVEKTAGSEGDTLSYYVRRGNAARTASAAAHSAPAGLKHAVEQGGSNLENLMVELDASESSATPETVETAAADRTDMPGIRPYGATFRAAAAVQHANAADGVRIFNSLAATVYADSTAAHADMQGRRLKAVSDGLDHNGTGLRVIAQTQQDGGTWEQGGVEGKMRGSTQTVGIAAKTGENTTAAATLGMGRSTWSENSANAKTDSISLFAGIRHDAGDIGYLKGLFSYGRYKNSISRSTGADEHAEGSVNGTLMQLGALGGVNVPFAATGDLTVEGGLRYDLLKQDAFAEKGSALGWSGNSLTEGTLVGLAGLKLSQPLSDKAVLFATAGVERDLNGRDYTVTGGFTGATAATGKTGARNMPHTRLVAGLGADVEFGNGWNGLARYSYAGSKQYGNHSGRVGVGYRF

SEQ ID NO: 17179 - protein, 275 aa, Neisseria meningitidis; identical to SEQ ID NO: 6090

SEQ ID NO: 17180 - protein, 67 aa, Neisseria meningitidis; identical to SEQ ID NO: 7480

SEQ ID NO: 17181 - protein, 259 aa, Neisseria meningitidis; identical to SEQ ID NO: 7199

SEQ ID NO: 17182 - protein, 284 aa, Neisseria meningitidis; identical to SEQ ID NO: 6849

SEQ ID NO: 17183 - protein, 134 aa, Neisseria meningitidis; identical to SEQ ID NO: 7503

SEQ ID NO: 17184 - protein, 1201 aa, Neisseria meningitidis; identical to SEQ ID NO: 6972

SEQ ID NO: 17185 - protein, 348 aa, Neisseria meningitidis
MEARPPRANEAQAPRADEMKKESRPAFDAAAVFDAAAVPVSDSGFAANANVRRFVDDEVGKGDFSRAEWQDFFDKAAYKADIVKIMHRPSTSRPWYVFRTGNSGKAKFRGARRFYAENRALIDDVAQKYGVPAELIVAVIGIETNYGKNTGSFRVADALATLGFDYPRRAGFFQKELVELLKLAKEEGGDVFAFKGSYAGAMGMPQFMPSSYRKWAVDYDGDGHRDIWGNVGDVAASIANYMKQHGWRTGGKILVSATLAPGADVQAIIGEKTALTRTVADLKAYGIIPGEELADDEKAVLFKLETAPGVFEYYLGLNNFYTVWQYNHSRMYVTAVRDIANSLGGPGL

SEQ ID NO: 17186 - protein, 220 aa, Neisseria meningitidis
MIQAVLFDLDGTLADTALDLGGALNTLLARHGLPAKSMDEIRTQASHGAAGLIKLGAGITPDHPDYARWRTEYLDEYDSRYAQDTTLFDGVNELIAELGKRGIKWGIITNKPMRFTDKLVPKLGFIIPPAVVVSGDTCGEPKPSVKPMLYACGQIHADPQHTLYVGDAERDIQAGRNAGMTTVLAEWGYIAPEDDTGSWQADFHIRTPLDLLECLDKIQP

SEQ ID NO: 17187 - protein, 322 aa, Neisseria meningitidis; identical to SEQ ID NO: 1760

SEQ ID NO: 17188 - protein, 241 aa, Neisseria meningitidis; identical to SEQ ID NO: 3559

SEQ ID NO: 17189 - protein, 188 aa, Neisseria meningitidis; identical to SEQ ID NO: 7348

SEQ ID NO: 17190 - protein, 244 aa, Neisseria meningitidis
MSANVSRLVVQNLQKSFKKRQVVKSFSLEIESGEVIGLLGPNGAGKTTSFYMIVGLIAADAGSVTLDGQELRHLPIHERARLGVGYLPQEASIFRKMTVEQNIRAILEIRTKDKNQIDREIEKLLADLNIGHLRRSPAPSLSGGERRRVEIARVLAMKPHFILLDEPFAGVDPIAVIDIQKIIGFLKSRGIGVLITDHNVRETLSICDRAYIISDGTVLASGKPDDLVGNEQVRSVYLGKNFKY

SEQ ID NO: 17191 - protein, 47 aa, Neisseria meningitidis; identical to SEQ ID NO: 7564

SEQ ID NO: 17192 - protein, 252 aa, Neisseria meningitidis; identical to SEQ ID NO: 7405

SEQ ID NO: 17193 - protein, 363 aa, Neisseria meningitidis; identical to SEQ ID NO: 6588

SEQ ID NO: 17194 - protein, 157 aa, Neisseria meningitidis; identical to SEQ ID NO: 6530

SEQ ID NO: 17195 - protein, 500 aa, Neisseria meningitidis; identical to SEQ ID NO: 6991

SEQ ID NO: 17196 - protein, 691 aa, Neisseria meningitidis
MNNPLVNQAAMVLPVFLLSACLGGGGSFDLDSVDTEAPRPAPKYQDVSSEKPQAQKDQGGYGFAMRFKRRNWYQRANPKEDEIKLSEDDWEQTDDGDIKNPSKQKNIINALPGNNEGALLQDSSQENQGISKVKDYHNFQYVWSGFFYKQIKNTIEKNGSSITAARNGPDGYIFYKGKDPSRKLPVSGEVMYKGTWDFLTDVKANQKFTDLGNASTKPGDRYSAFSGELDYIVKQENDKKDGHVGLGLTTEITVDFEKKTLSGKLIKNNSVITTNNDKHTTQYYSLEATLKGNRFNGKATATDKPKENETKQHPFVSDSSSLSGGFFGPQGEELGFRFLSDDKKVAVVGSAKTKDKPGNGAAAPGGTDAAASNGAAGTSSENSKLTTVLDAVELKSGGKEVKNLDNFSNAAQLVVDGIMIPLLPKDSESGNTQADKGKNGGTEFTRKFEHTPESDKKDAQAGTAENGNPAASNTAGDTNGKTKTYAVEVCCSNLNYLKYGLLTRKTAGNTGEGGNGAAQTDAQSMFLQGERTDEKEIPNDQNIVYRGSWYGHIANGTSWSGNASDKEGGNRAEFTVNFADKKLNGTLTAGERTSPTFTITATIQGNGFEGTAKTGDDGFALDTKNTVDTHKAHITDANVQGGFYGPKAEELGGWFAYPGDRQAQPSASGSGTSAANSATVVFGAKRQQLVQ

SEQ ID NO: 17197 - protein, 280 aa, Neisseria meningitidis; identical to SEQ ID NO: 7544

SEQ ID NO: 17198 - protein, 122 aa, Neisseria meningitidis; identical to SEQ ID NO: 6911

SEQ ID NO: 17199 - protein, 1302 aa, Neisseria meningitidis
MNEGEVVLTPEQIQTLRGYAFRGDTYGGWRYLANLGDRYADDAAAIVGKDANLNGLNLWMKKGVENLWDDTVGKKTRLEKFDRVALQHFSQYVDLINENNGRLPNTSEIERSYYKAVTENGVSSSAAIDLVINRSLPDMADGYWALGLGIEAERIHNEQAVNNPNGSERDNRKQLISALDKGFDGSFKEKHFTFLQSVIMDVTKLGVEYTIDGWQKIGGWGNGIINDLYKSVVKREWTGIFEIVNNNIKQFRDLFPNPEGWIDDGHQCFAPWVKETKKRNGKYHVYDPLALDLDGDGIETVAAKGFSGSLFDHTNNGIRTATGWVSADDGLLVRDLNGNGIIDNGAELFGDNTKLADGSFAKHGYAALAELDSNGDNIINAADAAFQSLRVWQDLNQDGISQANELRTLEELGIQSLDLAYKDVNKNLGNGNTLAQQGSYTKTDGTTAKMGDLLLAADNLHSRFKDKVELTAEQAKAANLAGIGRLRDLREAAALSGDLANMLKAYSAAETKEAQLALLDNLIHKWAETDSNWGKKSPMRLSTDWTQTANEGIALTPSQVAQLKKNALVSLSDKAKAAIDAARDRIAVLDAYTGQDSNTLYYMSEEDALNIVKVTNDTYDHLAKNIYQNLLFQTRLQPYLNQISFKMENDTFTLDFSGLVQAFNHVKETNPQKAFVDLAEMLAYGELRSWYEGRRLMTDYVEEAKKAGKFEDYQKVLGQETVALLAKTSGTQADDILQNVGFGHNKNVSLYGNDGNDTLIGGAGNDYLEGGSGSDTYVFGEGFGQDTVYNYDYATGRKDIIRFTDGITADMLTFTREGNHLLIKAKDGSGQVTVQSYFQNDGSGAYRIDEIHFDNGKVLDVATVKELVQQSTDGSDRLYAYQSGNTLNGGLGDDYLYGADGDDLLNGDAGNDSIYSGNGNDTLDGGEGNDALYGYNGNDALNGGEGNDHLNGEDGNDTLIGGAGNDYLEGGSGSDTYVFGKGFGQDAVYNYDYATGRKDIIRFTDGITADMLTFTREGNHLLIKAKDGSGQVTVQSYFQNDGSGAYRIDEIHFDNGKVLDVATVKELVQQSTDGSDRLYAYQSGNTLNGGLGDDYLYGADGDDLLNGDAGNDSIYSGNGNDTLDGGEGNDALYGYNGNDALNGGEGNDHLNGEDGNDTLIGGAGNDYLEGGSGSDTYVFGEGFGQDTVYNYHVDKNSDTMHFKGFKAADVHFIRSGSDLVLSASEQDNVRISGFFYGENHRVDTFVFDDAAISNPDFAKYINAGNNLVQSMSVFGSNTAATGGNVDANIQSVQQPLLVTPSA

SEQ ID NO: 17200 - protein, 96 aa, Neisseria meningitidis; identical to SEQ ID NO: 6081

SEQ ID NO: 17201 - protein, 313 aa, Neisseria meningitidis; identical to SEQ ID NO: 5981

SEQ ID NO: 17202 - protein, 125 aa, Neisseria meningitidis; identical to SEQ ID NO: 1050

SEQ ID NO: 17203 - protein, 351 aa, Neisseria meningitidis; identical to SEQ ID NO: 6589

SEQ ID NO: 17204 - protein, 100 aa, Neisseria meningitidis; identical to SEQ ID NO: 7488

SEQ ID NO: 17205 - protein, 75 aa, Neisseria meningitidis; identical to SEQ ID NO: 1799

SEQ ID NO: 17206 - protein, 144 aa, Neisseria meningitidis; identical to SEQ ID NO: 1499

SEQ ID NO: 17207 - protein, 238 aa, Neisseria meningitidis; identical to SEQ ID NO: 3469

SEQ ID NO: 17208 - protein, 915 aa, Neisseria meningitidis
MQQQHLFRLNILCLSLMTALPVYAENVQAGQAQEKQLDTIQVKAKKQKTRRDNEVTGLGKLVKTADTLSKEQVLDIRDLTRYDPGIAVVEQGRGASSGYSIRGMDKNRVSLTVDGLAQIQSYTAQAALGGTRTAGSSGAINEIEYENVKAVEISKGSNSVEQGSGALAGSVAFQTKTADDVIGEGRQWGIQSKTAYSGKNRGLTQSIALAGRIGGAEALLIHTGRRAGEIRAHEAAGRGVQSFNRLVPVEDTNQYANFIVEEECESGNYETCKANPKKDVVGKDERQTVSTRDYTGPNRFLSDPLSYESRSWLFRPGFRFENKRHYIGGILERTQQTFDTRDMTVPAFLTKAVFDENKKQAGSLSGNGKYAGNHKYGGLFTNGENGALVGAEYGTGVFYDETHTKSRYGLEYVYTNADKDTWADYARLSYDRQGIGLDNHFQQTHCSADGSDKYCRPSADKPFSYYKSDRVIYGESHRLLQAAFKKSFDTAKIRHNLSVNLGFDRFGSNLRHQDYYYQNANRAYSSNLPTQNGNQNISPNGSQDKPYWVSIGGGNVVTGQICRLGNNTYTDCTPRSINGKSYYAAVRDNVRLGRWADVGAGLRYDYRSTHSDDGSVSTGTHRTLSWNAGVVLKPFTWMDLTYRTSTGFRLPSFSEMYGWRSGDKIKAVKIDPEKSFNKEAGIVFKGDFGNLEASWFNNAYRDLIVRGYEAQIKNGKEEAKGDPAYLNAQSARITGINILGKIDWNGVWDKLPEGWYSTFAYNRVRVRDIKKRADRTDIQSHLFDAIQPSRYVVGLGYDQPEGKWGVNGMLTYSKAKEITELLGSRALLNGNSRNTKATARRTRPWYIVDVSGYYTIKKHFTLRAGVYNLLNHRYVTWENVRQTAGGAVNQHKNVGVYNRYAAPGRNYTFSLEMKF

SEQ ID NO: 17209 - protein, 41 aa, Neisseria meningitidis; identical to SEQ ID NO: 6068

SEQ ID NO: 17210 - protein, 753 aa, Neisseria meningitidis
LKVTKRDGRLEAIDLDKIHRVVTWAADGLENVSVSQVELKSHIQFYNGIRTDDIHETIIKAAADLISEDTPDYQYLAARLAIFHLRKIAYGEYEPPHLYDHVKKLTDAGKYDRHILEDYSREEFDELNAYIDHERDMSFSYAAVKQLEGKYLVQNRVTRQIYETPQFLYVLVAMCLFSKYPKEARLGYVKRFYDAVSTFKVSLPTPIMSGVRTPTRQFSSCVLIECDDSLDSINATTSAIVKYVSQRAGIGINAGRIRGLDSEIRGGEARHTGCIPFFKMFQAAVKSCSQGGVRGGAATLFYPLWHIEAESLLVLKNNRGVEDNRIRQLDYGVQINRLLYTRLIKGGNITLFSPNEVPGLYEAFFADQDEFERLYTKYEQDPDIRKRIIPAADLFSTLMQERAGTGRIYIQNVDHCNTHSPFDPRVAPVHQSNLCMEIALPTKPLDNINDPNGEIALCTLSAFNLGALNSLDELEGLADLTVRALDALLDYQGYPVEAARTSTMGRRSLGIGVINYAYYLAKNGVRYSDGSALGLTHRTFEAIQYYLLKASANLAKEYGACTLFNQTVYSQGKLPIDTYKKDLDAVCGEPLHYDWESLRAEIVKYGLRNSTLTALMPSETSSQIANATNGIEPPRGLVTVKASKDGILKQVVPEFETLKNAYETLWQLPGNEGYLKLVGVMQKFVDQSISANTAYDPGKFEGGKVSMKQMLKDLLTAYKYGVKTLYYHNTRDGADDTQTDIQDDGCAGGACKI

SEQ ID NO: 17211 - protein, 388 aa, Neisseria meningitidis
MKWAAVAAVAAAAVWGGWSYLKPEPQAAYITETVRRGDISRTVSATGEISPSNLVSVGAQASGQIKKLYVKLGQQVKKGDLIAEINSTSQTNTLNTEKSKLETYQAKLVSAQIALGSAEKKYKRQAALWKENATSKEDLESAQDAFAAAKANVAELKALIRQSKISINTAESELGYTRITATMDGTVVAILVEEGQTVNAAQSTPTIVQLANLDMMLNKMQIAEGDITKVKAGQDISFTILSEPDTPIKAKLDSVDPGLTTMSSGGYNSSTDTASNAVYYYARSFVPNPDGKLSTGMTTQNTVEIDGVKNVLIIPSLTVKNRGGKAFVRVLGADGKAAEREIRTGMRDSMNTEVKSGLKEGDKVVISEITAAEQQESGERALGGPPRR

SEQ ID NO: 17212 - protein, 370 aa, Neisseria meningitidis
MTAKEELFAWLRHMNQNKGSDLFVTTHFPPAMKLDGKITRITDEPLTAEKCMEIAFSIMSAKQAEEFSSTNECNFAISLPDTSRFRVNAMIQRGATALVFRTITSKIPKFESLNLPPVLKDVALKKRGLVIFVGGTGSGKSTSLASLIDYRNENSFGHIITIEDPIEFVHEHKNCIITQREVGVDTENWMAALKNTLRQAPDVILIGEIRDRETMDYAIAFAETGHLCMATLHANSTNQALDRIINFFPEERREQLLTDLSLNLQAFISQRLVPRDGGKGRVAAVEVLLNSPLISELIHNGNIHEIKEVMKKSTTLGMQTFDQHLYQLYEKGDISLQEALKNADSAHDLRLAVQLRSRRAQSSSPDLELL

SEQ ID NO: 17213 - protein, 57 aa, Neisseria meningitidis; identical to SEQ ID NO: 14761

SEQ ID NO: 17214 - protein, 347 aa, Neisseria meningitidis; identical to SEQ ID NO: 2159

SEQ ID NO: 17215 - protein, 473 aa, Neisseria meningitidis; identical to SEQ ID NO: 5974

SEQ ID NO: 17216 - protein, 437 aa, Neisseria meningitidis; identical to SEQ ID NO: 1149

SEQ ID NO: 17217 - protein, 449 aa, Neisseria meningitidis; identical to SEQ ID NO: 5514

SEQ ID NO: 17218 - protein, 333 aa, Neisseria meningitidis
MQFPYRNVPASRMRRMRRDDFSRRLMREHTLTADDLIYPVFVLEGSAREEDVPSMPGVKRQSLDRLLFTAEEAVKLGIPMLALFPVVTANKTERAQEAYNPEGLVPSTVRALRERFPELGIMTDVALDPYTVHGQDGLTDENGYVMNDETVEVLVKQALCHAEAGAQVVAPSDMMDGRIGAIREALEDAGHIHTRIMAYSAKYASAFYGPFRDAVGSSGNLGKADKKTYQMDPANTDEALNEVALDIREGADMVMVKPGLPYLDVVRRVKDEFGVPTYAYQVSGEYAMLQAAIANGWLDGGKVVLESLLAFKRAGADGILTYYAIEAAKMLKR

SEQ ID NO: 17219 - protein, 97 aa, Neisseria meningitidis; identical to SEQ ID NO: 6454

SEQ ID NO: 17220 - protein, 461 aa, Neisseria meningitidis; identical to SEQ ID NO: 7704

SEQ ID NO: 17221 - protein, 321 aa, Neisseria meningitidis; identical to SEQ ID NO: 6649

SEQ ID NO: 17222 - protein, 284 aa, Neisseria meningitidis
MAEITAKMVADLRAATGLGMMECKKALVEAEGNFDKAEEILRIKSGAKAGKLAGRTAAEGVLAYAINGNVGALVEVNCETDFVAKDAGFVEFANFVAKTAAEKKPASVEELSELVEAERKAIIAKLGENMSVRRFQVIDTANQLVAYIHGALATEGVLVEYKGSEDVARKIGMHIVAAKPQCVSEAEVDAETVEKERHIYTEQAIASGKPADIAAKMVEGRIRKFLAEITLNGQAFVMNPDQTVAQFSKENGTEVISFVRYKVGDGIEKKAVDYAAEVAAAAKV

SEQ ID NO: 17223 - protein, 164 aa, Neisseria meningitidis; identical to SEQ ID NO: 8223

SEQ ID NO: 17224 - protein, 407 aa, Neisseria meningitidis; identical to SEQ ID NO: 6539

SEQ ID NO: 17225 - protein, 230 aa, Neisseria meningitidis; identical to SEQ ID NO: 675

SEQ ID NO: 17226 - protein, 394 aa, Neisseria meningitidis
MTPQVLTILGSTGSIGESTLDVVSRHPEKFRVFALAGHKQVEKLAAQCQTFHPEYAVVADAEHAARLEALLKRDGTATQVLHGAQALVDVASADEVSGVMCAIVGAVGLPSALAAAQKGKTIYLANKETLVVSGALFMETARANGAAVLPVDSEHNAVFQVLPRDYAGRLNEHGIASIILTASGGPFLTADLNTFDRITPAQAVKHPNWRMGRKISVDSATMMNKGLELIEAHWLFNCPPDKLEVVIHPQSVIHSMVRYRDGSVLAQLGNPDMRTPIAYCLGLPERIDSGVGDLDFDALSALTFQKPDFDRFPCLRLAYEAMNAGGAAPCVLNAANEAAVAAFLDGQIKFTDIAKTVAHCLAQDFSDGIGDIGGLLAQDARTRAQARAFIGTLR

SEQ ID NO: 17227 - protein, 255 aa, Neisseria meningitidis; identical to SEQ ID NO: 4081

SEQ ID NO: 17228 - protein, 134 aa, Neisseria meningitidis; identical to SEQ ID NO: 4298

SEQ ID NO: 17229 - protein, 276 aa, Neisseria meningitidis; identical to SEQ ID NO: 3411

SEQ ID NO: 17230 - protein, 287 aa, Neisseria meningitidis
MFEPLWNNKYIESVQLTIAEQLGVEERGEFYDITGALRDMVQNHLMQMLCMTAMEAPASLDADAVRDEKVKVIKSLKPLTVESVNENVVRGQYTAAKGMNGYLEEINVPQDSFTETYVAIKAEIENERWKGVPFYLRTGKRMAGKVAEIVLNFKDLNSHIFEGSRTAPNRLVIELQPYESVRLYTQMKTPGAGNKVETVPLATDLGKALESRRAEAYERLLLDVINGKLALFNRRDELEAAWEYVMPILENWTNNTTPPHGYGAHSWGPEAARELLARDGHKWHEEQ

SEQ ID NO: 17231 - protein, 187 aa, Neisseria meningitidis; identical to SEQ ID NO: 508

SEQ ID NO: 17232 - protein, 135 aa, Neisseria meningitidis
LAEGQKSAVTEYYLNHGEWPGNNTSAGVASSSTIKGKYVKEVTVANGVITATMLSSGVNKEIQGKKLSLWAKRQDGSVKWFCGQPVTRTDAKADTVAAAAKTADNINTKHLPSTCRDASSVVCIETPPTAFYKNT

SEQ ID NO: 17233 - protein, 109 aa, Neisseria meningitidis; identical to SEQ ID NO: 7275

SEQ ID NO: 17234 - protein, 103 aa, Neisseria meningitidis; identical to SEQ ID NO: 6921

SEQ ID NO: 17235 - protein, 154 aa, Neisseria meningitidis; identical to SEQ ID NO: 2266

SEQ ID NO: 17236 - protein, 379 aa, Neisseria meningitidis; identical to SEQ ID NO: 6892

SEQ ID NO: 17237 - protein, 181 aa, Neisseria meningitidis; identical to SEQ ID NO: 7039

SEQ ID NO: 17238 - protein, 201 aa, Neisseria meningitidis; identical to SEQ ID NO: 2273

SEQ ID NO: 17239 - protein, 446 aa, Neisseria meningitidis; identical to SEQ ID NO: 7495

SEQ ID NO: 17240 - protein, 239 aa, Neisseria meningitidis; identical to SEQ ID NO: 6323

SEQ ID NO: 17241 - protein, 431 aa, Neisseria meningitidis; identical to SEQ ID NO: 6297

SEQ ID NO: 17242 - protein, 374 aa, Neisseria meningitidis
MQNTSFDNESDYSDDSDFASASETENRIGLTVPLELAGGRLDAVLAKLLPDYSRSRLTSWIKEGAVIVNDKPSQPKDKMIGGEQICVTVRPSEENLAFVPEPMALDIVYEDDTVIVVNKPAGLVVHPAAGNWTGTLLNGLLAHCPELSQVPRAGIVHRLDKETSGLMVVAKTLPAQNSLVRQLQERTVKRIYRAVANGIVPFDGKIETQIGRDPHNRLKMAVVKFGGKPAVTHVKVLERYLTHSYIECSLETGRTHQIRVHMREANHPLAADPVYGNPRHPCGDTVKEAVKSLGARQALHAYRLSFTHPESGETVSFEAPIPNDIYHLLSVLRLEAGLDSSLSNEEEWQDKFGADDDDDWNEDDYDVEVVYVRE

SEQ ID NO: 17243 - protein, 179 aa, Neisseria meningitidis; identical to SEQ ID NO: 4252

SEQ ID NO: 17244 - protein, 160 aa, Neisseria meningitidis; identical to SEQ ID NO: 6404

SEQ ID NO: 17245 - protein, 446 aa, Neisseria meningitidis
LHTLLAFIFAILILVSLHEFGHYIVARLCGVKVVRFSVGFGKPFFTRKRGDTEWCLAPIPLGGYVKMVDTREGEVSEADLPYAFDKQHPAKRIAIVAAGPLTNLALAVLLYGLSFSFGVTELRPYVGTVEPDTIAARAGFQSGDKIQSVNGTPVADWGSAQTEIVLNLEAGKVAVGVQTASGAQTVRTIDAAGTPEAGKIAKNQGYIGLMPFKITTVAGGVEKGSPAEKAGLKPGDRLTAADGKPIASWQEWANLTRQSPGKKITLNYERAGQTHTADIRPDTVEQSDHTLIGRVGLRPQPDRAWDAQIRRSYRPSVVRAFGMGWEKTVSHSWTTLKFFGKLISGNASVSHISGPLTIADIAGQSAELGLQSYLEFLALVSISLGVLNLLPVPVLDGGHLVFYTAEWIRGKPLGERVQNIGLRFGLALMMLMMAVAFFNDVTRLLG

SEQ ID NO: 17246 - protein, 463 aa, Neisseria meningitidis; identical to SEQ ID NO: 7825

SEQ ID NO: 17247 - protein, 447 aa, Neisseria meningitidis
MSQNHTILQSLPVGQKVGIAFSGGLDTSAALLWMKLKGALPYAYTANLGQPDEDDYNAIPKKAMEYGAENARLIDCRAQLAHEGIAAIQCGAFHVSTGGIAYFNTTPLGRAVTGTMLVSAMKEDDVNIWGDGSTYKGNDIERFYRYGLLTNPALKIYKPWLDQQFIDELGGRHEMSEFLIANGFNYKMSVEKAYSTDSNMLGATHEAKDLEFLNSGIKIVKPIMGVAFWDENVEVSPEEVSVRFEEGVPVALNGKEYADPVELFLEANRIGGRHGLGMSDQIENRIIEAKSRGIYEAPGMALFHIAYERLVTGIHNEDTIEQYRINGLRLGRLLYQGRWFDSQALMLRETAQRWVAKAVTGEVTLELRRGNDYSILNTESPNLTYQPERLSMEKVEDAAFTPLDRIGQLTMRNLDITDTRVKLGIYSQSGLLSLGEGSVLPQLGNKQ

SEQ ID NO: 17248 - protein, 145 aa, Neisseria meningitidis; identical to SEQ ID NO: 7420

SEQ ID NO: 17249 - protein, 403 aa, Neisseria meningitidis; identical to SEQ ID NO: 200

SEQ ID NO: 17250 - protein, 221 aa, Neisseria meningitidis; identical to SEQ ID NO: 7450

SEQ ID NO: 17251 - protein, 476 aa, Neisseria meningitidis; identical to SEQ ID NO: 6743

SEQ ID NO: 17252 - protein, 591 aa, Neisseria meningitidis; identical to SEQ ID NO: 7697

SEQ ID NO: 17253 - protein, 63 aa, Neisseria meningitidis; identical to SEQ ID NO: 1437

SEQ ID NO: 17254 - protein, 498 aa, Neisseria meningitidis; identical to SEQ ID NO: 7481

SEQ ID NO: 17255 - protein, 380 aa, Neisseria meningitidis; identical to SEQ ID NO: 7623

SEQ ID NO: 17256 - protein, 210 aa, Neisseria meningitidis; identical to SEQ ID NO: 5679

SEQ ID NO: 17257 - protein, 718 aa, Neisseria meningitidis; identical to SEQ ID NO: 6011

SEQ ID NO: 17258 - protein, 949 aa, Neisseria meningitidis
MCNHHPQHSHDNDTIRIRGARTHNLKNIDLDIPRHKLVVVTGLSGSGKSSLAFDTLYAEGQRRYVESLSAYARQFLQMMDKPDVDLIEGLSPAISIEQKSTSHNPRSTVGTVTEIHDYLRLLYARVGTPYCPEHKLPLSSQTVSQMVDAVLKLPEDTRVMILAPTVRERKGEFVDFFADLQAQGFARVRVDGEVYQLDEVPKLEKNIKHNIDVVIDRVKVKADIKQRLAESFETALRHGNERALAMEMDSGEEHWFSARFACPVCSYSLPELEPRLFSFNNPMGSCPTCDGLGNTNFFDPEKVVAHPELSLATGAIDGWDKRNQFYFQMIQSLARHYGFDVQAAWETLPEKVKKVVLHGSGKEVIDFTYLSERGTTFNRSHAFEGIIPNLERRYRETDSETVREKLREYQNHRACPSCGGARLRKEARYVYVSGEPLHEVSAWPLTKTHQFFETLDLDGNKKQIAEKILKEITERLGFLINVGLDYLNLSRSAETLSGGEAQRIRLASQIGSGLTGVMYVLDEPSIGLHQRDNDRLLATLKRLRDLGNSVIVVEHDEDAIREADFVVDMGPGAGEHGGNVLIADTPENVAQCENSVTGQYLSGKKSIAVPSERTPVNPDRMLVLKGARGNNLKNVTLELPLGLITCITGVSGSGKSTLINDTLAKITARELNRAQEEPAPFDDIHGLEHLDKVINVDQSPIGRTPRSNPATYTGLFTPIRELFAGVPLSRERGYNVGRFSFNVKGGRCEACQGDGVIKVEMHFLPDVYVPCEVCHGKRYNRETLEIQYKGKNISQVLDMTVEEAREFFDAVPTVSRKLQTLMDVGLGYIRLGQSATTLSGGEAQRVKLALELSKRDTGRTLYILDEPTTGLHFADIALLLEVIGRLKGKGNSIVIIEHNLDVIKTADWIVDLGPEGGDGGGRIIAKGSPEQVAKVKGSYTGKYLKVVLR

SEQ ID NO: 17259 - protein, 52 aa, Neisseria meningitidis; identical to SEQ ID NO: 7178

SEQ ID NO: 17260 - protein, 124 aa, Neisseria meningitidis; identical to SEQ ID NO: 6523

SEQ ID NO: 17261 - protein, 83 aa, Neisseria meningitidis; identical to SEQ ID NO: 3011

SEQ ID NO: 17262 - protein, 522 aa, Neisseria meningitidis
MAKKNNKTKIQKPEAALQTDVAQITATGRVIAEHPSNFITPQKMRALFEDAESGDIRAQHELFADIEERDSDIAANMGTRKRALLTLNWRVAPPRNATPEEEKLSDQAYEMMDSLPTLEDLIMDLMDAVGHGFSALEVEWVFSDGLYLPRNFIHRPQSWFKWDKDNGLLLRTRENPEGEALWPLGWVVHTQKSRSVQQARNGLFRTLSWLYMFKHYAVHDFAEFLELYGMPIRIGKYGAGATKEEKNTLLRAVAEIGHNAAGIMPEGMEIELHNAANGTTATSNPFLQMADWCEKSAARLILGQTLTSGADGKSSTNALGNIHNEVRRDLLVSDAKQVAQTITSQIIGPFLQINYPHADPNRVPKFEFDTREPKDIAVFADAIPKLVDVGVQIPESWVRDKLVIPDVQEGEAVLVRQVPDNPVNRTALAALSAHTVPSKATGRHQEILDGALDDALVEPDFNSQLNPMVRQAVAALNACNSYEEADAALNALYPNLDNAKLRTYMQQALFISDILGQDHARA

SEQ ID NO: 17263 - protein, 685 aa, Neisseria meningitidis; identical to SEQ ID NO: 7084

SEQ ID NO: 17264 - protein, 283 aa, Neisseria meningitidis; identical to SEQ ID NO: 6433

SEQ ID NO: 17265 - protein, 408 aa, Neisseria meningitidis; identical to SEQ ID NO: 2386

SEQ ID NO: 17266 - protein, 283 aa, Neisseria meningitidis
MNTLKFTKMHGLGNDFMVIDAVSQDFTPEDAPIAAWADRFRGVGFDQLLVVGRSETEGVDFRYRIFNADGSEVGQCGNGARCFARFVADKGLTDKKEICVETANGVIFPKLSDNGMVTVNMGKPKFMPSEIPFVPESGEGDDACIYGVHLESGIQPVSCVNMGNPHAVIVVDDVECAPVRETGSLIEPHRQFPERVNVGFMQIVSRTAIRLRVFERGVGETQACGTGACAAVVAGIRLGLLDEGKTVEVILPGGTLYIEWACGGDVMMTGPAETVFEGELAYS

SEQ ID NO: 17267 - protein, 321 aa, Neisseria meningitidis; identical to SEQ ID NO: 7025

SEQ ID NO: 17268 - protein, 38 aa, Neisseria meningitidis; identical to SEQ ID NO: 7004

SEQ ID NO: 17269 - protein, 415 aa, Neisseria meningitidis; identical to SEQ ID NO: 6710

SEQ ID NO: 17270 - protein, 376 aa, Neisseria meningitidis; identical to SEQ ID NO: 6637

SEQ ID NO: 17271 - protein, 58 aa, Neisseria meningitidis; identical to SEQ ID NO: 2174

SEQ ID NO: 17272 - protein, 346 aa, Neisseria meningitidis; identical to SEQ ID NO: 7123

SEQ ID NO: 17273 - protein, 229 aa, Neisseria meningitidis; identical to SEQ ID NO: 6596

SEQ ID NO: 17274 - protein, 105 aa, Neisseria meningitidis; identical to SEQ ID NO: 895

SEQ ID NO: 17275 - protein, 686 aa, Neisseria meningitidis; identical to SEQ ID NO: 7277

SEQ ID NO: 17276 - protein, 807 aa, Neisseria meningitidis
LATLPLRDVVVYPHMVLPLFVGRPKSIAALENAITREEPVFLLAQTDAAVEEPIAADLYQTGTVAQVLQVLKLPDGTVKVLVEGLYRGRVLTIEDTGGLFVSHIETVVEEDTGGNTDLEAVRRTLLAQFEQYAKLNKKIPAEIIGSINGIAENSRLTDTVAAHLQLKLAQRQQILEIPEIGKRMEFLLAQLESELDIMQAEKRIRGRVKRQMEKSQREYYLNEQIKAIHKELGEEDENGELDALEADIKKAGMTKEAEEKCLSELKKLKMMPPMSAESTVVRNYIDTLLELPWKKKSRVSKDIAKAGLVLDADHYGLEKVKERILEYLAVQKRMDKLKGPILCLVGPPGVGKTSLGESIAKATGRKYVRMALGGVRDESEIRGHRRTYIGSMPGKILQNMAKAGVKNPLFLLDEIDKLGNDFRGDPASALLEVLDPEQNNKFADHYAEVDYDLSDVMFIATSNSLNIPTPLLDRMEIIRLSGYTEDEKINIAMQYLVPKQMKRNGVKEGELAIEESAVRDIIRYYTREAGVRSLDREIAKICRKVVMQITLDEDKKRLSETKKTSKAKPKAVKVNEKNLHDYLGVRRFDYGVAESENRIGQVTGLAWTEVGGELLTVEAAALPGKGVIQCTGQLGDVMKESVSAAWSVVRSRAESVGLAPDFYEKKDIHIHVPEGATPKDGPSAGIAMTLAAVSAFTKIPVRADVAMTGEITLRGEVLPIGGLKEKLLAALRGGIKHVLIPKDNVKDLEEIPENVKTGLTIHPVKWIDEVLALGLESQPEPWAEPSGAEAAAESASKPKPRSRATKH

SEQ ID NO: 17277 - protein, 180 aa, Neisseria meningitidis; identical to SEQ ID NO: 2298

SEQ ID NO: 17278 - protein, 110 aa, Neisseria meningitidis; identical to SEQ ID NO: 7667

SEQ ID NO: 17279 - protein, 66 aa, Neisseria meningitidis; identical to SEQ ID NO: 3365

SEQ ID NO: 17280 - protein, 1379 aa, Neisseria meningitidis
MTYPIPKPREKSRWPNLSQGSLPLALARYLPHKQLKVVLTQDAEQALRLQTAWLFFRPHDTAVFLPDWETLPYERFSPHQDLVSERLSALWQIKSGAADVLFVPVATAMQKLPPVPFLAGRTFWLKTGQTLDIGRLKSDLVDAGYNHVSHVVAAGEFAVRGGIVDLFPMGSEMPYRIDLFDDEIDSIKTFDTDTQRTISPVSEIRLLPAHEFPTDSEAQKIFRSRFREEVDGNPNDAAVYKAVSNGHFGAGVEYYLPLFFENELETLFDYIGEDALFVSLDDVHAEANRFWSDVKSRYAMAQGDETYPPLLPQYLYLSADVFAGRLKNYGQVLPDVSGKEYTLPDLAVNRQADEPLQALKDFQTAFDGRILLCAESLGRRETMLGFLQQNGLKAKPVSDWQGFLSAHEPLMITVAPLAYGFKLGGLQSPNQQQPTPSPVGEGWGEGKAVAAQTEFSAAAINPLPSPLPQEREQSAAAVSDSLKAAAVSTESSLPLGTSNLHGQIRQQPAPSPVGEGWGEGKAVAAQTEFPASATNPLPSPLPQEREQSAAAVSDDLKTKSSLHPVANNLHGQIRQQPTPSPVGEGWGEGKAVAAQTEFSAAATNPLPSPLPQEREQSAAVVSDSLKAAAVSTESSLPPGKSNLHGQIQQQPAPSPVGEGWGEGKAVAAQSAIAVITESDLYQYVARSRIHNRRKKHAAVSDGLLRDLAEINIGDPVVHEEHGIGRYMGLVTMDLGGETNEMMLLEYAGEAQLYVPVSQLHLISRYSGQAHENIALHKLGSGAWNKAKRKAAEKARDTAAELLNLYAQRAAQSGHKFEINELDYQAFADGFGYEETEDQAAAIAAVIKDLTQAKPMDRLVCGDVGFGKTEVALRAAFVAVMGGKQVAVLAPTTLLVEQHAQNFADRFADFPVKVASLSRFNNSKATKAALEGMADGTVDIVIGTHKLVQDDIKFKNLGLVIIDEEHRFGVRQKEQLKRLRANVDILTMTATPIPRTLSMALEGLRDFSLITTAPSRRLSVKTFVKPFSEGSVREAVLRELKRGGQVFFLHNEVDTIENMRERLETLLPEARIGVAHGQLRERELEQVMRDFLQQRFNVLLCSTIIETGIDIPNANTIIINRADKFGLAQLHQLRGRVGRSHHQAYAYLLTPEYITKDAEKRLDAIAAADELGAGFTLAMQDLEIRGAGEILGEGQSGEMIQVGFTLYTEMLKQAVRDLKKGRQPDLDAPLGITTEIKLHSPALLPESYCPDIHERLVLYKRLAVCETVQQINAIHEELVDRFGLPEQPVKTLIESHHLRLMAKELGIDAIDAAGEAVTVTFGKNNNVDPTEIILLIQNDKKYRLAGADKLRFTAEMENIEVRINTVKNVLKTLQNRCLPK

SEQ ID NO: 17281 - protein, 266 aa, Neisseria meningitidis; identical to SEQ ID NO: 8298

SEQ ID NO: 17282 - protein, 151 aa, Neisseria meningitidis; identical to SEQ ID NO: 7215

SEQ ID NO: 17283 - protein, 154 aa, Neisseria meningitidis; identical to SEQ ID NO: 4442

SEQ ID NO: 17284 - protein, 419 aa, Neisseria meningitidis; identical to SEQ ID NO: 6779

SEQ ID NO: 17285 - protein, 197 aa, Neisseria meningitidis; identical to SEQ ID NO: 7657

SEQ ID NO: 17286 - protein, 188 aa, Neisseria meningitidis; identical to SEQ ID NO: 7225

SEQ ID NO: 17287 - protein, 621 aa, Neisseria meningitidis
MIEKLTFGLFKKEDARSFMRLMAYVRPYKIRIVAALIAIFGVAATESYLAAFIAPLINHGFSAPAAPPELSAAAGIISTLQNWREQFTYMVWGTENKIWTVPLFLIILVVIRGICRFTSTYLMTWVSVMTISKIRKDMFAKMLTLSSRYHQETPSGTVLMNMLNLTEQSVSNASDIFTVLTRDTMIVTGLTIVLLYLNWQLSLIVVLMFPLLSLLSRYYRDRLKHVISDSQKSIGTMNNVIAETHQGHRVVKLFNGQAQAANRFDAVNRTIVRLSKKITQATAAHSPFSELIASIALAVVIFIALWQSQNGYTTIGEFMAFIVAMLQMYAPIKSLANISIPMQTMFLAADGVCAFLDTPPEQDKGTLAPQRVEGRISFRNVDVEYRSDGIKALDNFNLDIRQGERVALVGRSGSGKSTVVNLLPRFVEPSAGNICIDGIDIADIKLDCLRAQFALVSQDVFLFDDTLFENVRYSRPDAGEAEVLFALQTANLQSLIDSSPLGLHQPIGSNGSNLSGGQRQRVAIARAILKDAPILLLDEATSALDNESERLVQQALERLMENRTGIIVAHRLTTIEGADRIIVMDDGKIIEQGTHEQLMSQNGYYTMLRNISNKDAAVRTA

SEQ ID NO: 17288 - protein, 524 aa, Neisseria meningitidis; identical to SEQ ID NO: 2756

SEQ ID NO: 17289 - protein, 351 aa, Neisseria meningitidis; identical to SEQ ID NO: 6464

SEQ ID NO: 17290 - protein, 604 aa, Neisseria meningitidis; identical to SEQ ID NO: 7653

SEQ ID NO: 17291 - protein, 288 aa, Neisseria meningitidis; identical to SEQ ID NO: 7631

SEQ ID NO: 17292 - protein, 279 aa, Neisseria meningitidis
MTATAAAIDRLLPQTQCRECGYDGCLPYAQAVATGEAYNLCAPGGETVIRDISALLGKPFVAPAKTQAKALARIDETACIGCTACIRACPADAIMGAGKLMHTVIADECTGCGLCVAPCPVDCIHMQPVADTVLPRARRFSLSADSRFAAAEHARTRYLKRNERKQREADERKAMLAEREAAVRNARPQTPDTPKKPTFNPADLIAKAMAKAQTQQDRLAAADNRKDYQAKQIAEARERAELRRAQRDMKYGSDSEKAAALEYLKQYKAKQEAAQNTAS

SEQ ID NO: 17293 - protein, 222 aa, Neisseria meningitidis; identical to SEQ ID NO: 197

SEQ ID NO: 17294 - protein, 58 aa, Neisseria meningitidis; identical to SEQ ID NO: 6347

SEQ ID NO: 17295 - protein, 558 aa, Neisseria meningitidis
MSQQYVYSMLRVSKVVPPQKTIIKDISLSFFPGAKIGLLGLNGAGKSTVLRIMAGVDKEFEGEAVPMGGIKIGYLPQEPELDPEKTVREEVESGLGEVAAAQKRLEEVYAEYANPDADFDALAEEQGRLEAIIAAGSSTGGGAEHELEIAADALRLPEWDAKIDNLSGGEKRRVALCKLLLSKPDMLLLDEPTNHLDAESVEWLEQFLVRFPGTVVAVTHDRYFLDNAAEWILELDRGHGIPWKGNYSSWLEQKEKRLENEAKSEAARVKAMKQELEWVRQNAKGRQAKSKARLARFEEMSNYEYQKRNETQEIFIPVAERLGNEVIEFVNVSKSFGDKVLIDDLSFKVPAGAIVGIIGPNGAGKSTLFKMISGKEQPDSGEVKIGQTVKMSLIDQSREGLQNDKTVFDNIAEGRDILQVGQFEIPARQYLGRFNFKGSDQSKIAGQLSGGERGRLHLAKTLLSGGNVLLLDEPSNDLDVETLRALEDALLEFAGSVMVISHDRWFLDRIATHILACEGDSKWVFFDGNYQEYEADKKRRLGEEGAKPKRIKYKPVTR

SEQ ID NO: 17296 - protein, 380 aa, Neisseria meningitidis; identical to SEQ ID NO: 6087

SEQ ID NO: 17297 - protein, 125 aa, Neisseria meningitidis
VNKTLILALSALLGLAACSAERVSLFPSYKLKIIQGNELEPRAVAALRPGMTKDQVLLLLGSPILRDAFHTDRWDYTFNTSRNGIIKERSNLTVYFENGVLVRTEGDVLQNAAEALKDRQNTDKP

SEQ ID NO: 17298 - protein, 130 aa, Neisseria meningitidis; identical to SEQ ID NO: 4345

SEQ ID NO: 17299 - protein, 468 aa, Neisseria meningitidis; identical to SEQ ID NO: 2240

SEQ ID NO: 17300 - protein, 204 aa, Neisseria meningitidis; identical to SEQ ID NO: 6872

SEQ ID NO: 17301 - protein, 118 aa, Neisseria meningitidis; identical to SEQ ID NO: 680

SEQ ID NO: 17302 - protein, 321 aa, Neisseria meningitidis
MSYTQLTQGERYHIQYLSRHCTVTEIAKQLNRHKSTISREIRRHRTQGQQYSAEKAQRQSRTIKQRKRQPYKLDSQLIQHIDPLIRRKLSPEQVCAYLCKHHQITLHHSTIYRYLRQDKSNGSTLWQHLRICSKPYRKRYGSTWTRGKVPNRVGIENRPAIVDQKSRIGDWEADTIVGKGQKSALLTLVERVTRYTIICKLDSLKAEDTARAAVRTLKAHKDRVHTITMDNGKEFYQHTKITKALKAETYFCRPYHSWEKGLNENTNGLIRQYFPKQTDFRNISDREIRRVQDELNHRPRKTLGYETPSVLFLNLFQPLIH

SEQ ID NO: 17303 - protein, 321 aa, Neisseria meningitidis; identical to SEQ ID NO: 6649

SEQ ID NO: 17304 - protein, 153 aa, Neisseria meningitidis; identical to SEQ ID NO: 7513

SEQ ID NO: 17305 - protein, 188 aa, Neisseria meningitidis; identical to SEQ ID NO: 7019

SEQ ID NO: 17306 - protein, 335 aa, Neisseria meningitidis
MSTFFQQTAQAMIAKHIDRFPLLKLDRVIDWQLIEQYLNRQKTRYLRDHRGRPAYPLLSMFKAVLLGQWHSLSDPELEHSLITRIDFNLFCRFDELSIPDYSTLCRYRNRLAQDNTLSELLELINRQLTEKGLKIEKASAAVVDATIIQTAGSKQRQAIEVDEEGQISGQTTPSKDSDARWIKKNGLYKLGYKQHTRTDAEGYIEKLHITPANAHECKHLSPLLEGLPKGTTVYADKGYDSAENRQHLEEHQLQDGIMRKACRNRPLSEVQTKRNRYLSKTRYVVEQSFGTLHRKFRYARAAYFGLIKVSAQSHLKAMCLNLLKAANRLSAPAAA

SEQ ID NO: 17307 - protein, 139 aa, Neisseria meningitidis; identical to SEQ ID NO: 921

SEQ ID NO: 17308 - protein, 279 aa, Neisseria meningitidis; identical to SEQ ID NO: 7574

SEQ ID NO: 17309 - protein, 499 aa, Neisseria meningitidis; identical to SEQ ID NO: 6163

SEQ ID NO: 17310 - protein, 85 aa, Neisseria meningitidis; identical to SEQ ID NO: 7713

SEQ ID NO: 17311 - protein, 78 aa, Neisseria meningitidis; identical to SEQ ID NO: 1011

SEQ ID NO: 17312 - protein, 123 aa, Neisseria meningitidis; identical to SEQ ID NO: 7208

SEQ ID NO: 17313 - protein, 313 aa, Neisseria meningitidis; identical to SEQ ID NO: 7029

SEQ ID NO: 17314 - protein, 312 aa, Neisseria meningitidis; identical to SEQ ID NO: 6086

SEQ ID NO: 17315 - protein, 365 aa, Neisseria meningitidis; identical to SEQ ID NO: 6646

SEQ ID NO: 17316 - protein, 47 aa, Neisseria meningitidis
LDDAANIIHTVTPPIFIGVSLIIYFKKVIYYHIIREQVVKKNPLKFH

SEQ ID NO: 17317 - protein, 217 aa, Neisseria meningitidis
MKITHCKLKKKVQKELLRFFVLEVTARSAADILGIHPNSAVLFYRKIRTVINHHLALAADEVFEGPVEPDESDFGGRRKGRRGRGAAGKVVVFGILKRNGRVYTVVVDNAKSETLLPVIKKKIMPDSIVYTDSLSSCDKLDVSGFIHYRINHSKEFADRQNHINGIENFWNQAKRVLRKYNGIDRKSFPLFLKECEFRFNFGTPSQQLKILRDWCGI

SEQ ID NO: 17318 - protein, 72 aa, Neisseria meningitidis; identical to SEQ ID NO: 1579

SEQ ID NO: 17319 - protein, 521 aa, Neisseria meningitidis; identical to SEQ ID NO: 6486

SEQ ID NO: 17320 - protein, 90 aa, Neisseria meningitidis; identical to SEQ ID NO: 5418

SEQ ID NO: 17321 - protein, 234 aa, Neisseria meningitidis; identical to SEQ ID NO: 6533

SEQ ID NO: 17322 - protein, 423 aa, Neisseria meningitidis; identical to SEQ ID NO: 6393

SEQ ID NO: 17323 - protein, 140 aa, Neisseria meningitidis; identical to SEQ ID NO: 6008

SEQ ID NO: 17324 - protein, 394 aa, Neisseria meningitidis
MSLHSDILVVGAGPAGLSFAAELAGSGLKVTLIERSPLTVLQNPPYDGREIALTHFSREIMQRLGMWDKIPENEIYPLRDAKVLNGRSDYQLHFPQPTEARGEPADCLGYLISNHNIRRAAYEVVSQLDNVSILTDTVVKEVKTSDNEAQVILENGKILTARLLLAADSRFSQTRRQLGISSDMHDYSRTMFVCRMKHTLSNQHTAYECFHYGRTIALLPLEEHLTNTVITVDTDKINSVQNLSPEELAASVKEQLKGRLGDMELVSSIHHYPLVGMIAKRFYGKRSALIGDAAVGMHPVTAHGFNLGLSSADILAKLILEAEQRGQDIGASSLLEKYSSKHMLHAHPLYHGTNMMLKLFTNETAPAKLLRGLVLRASNNFPPLKKLITKQLTG

SEQ ID NO: 17325 - protein, 123 aa, Neisseria meningitidis; identical to SEQ ID NO: 6642

SEQ ID NO: 17326 - protein, 527 aa, Neisseria meningitidis; identical to SEQ ID NO: 7496

SEQ ID NO: 17327 - protein, 483 aa, Neisseria meningitidis; identical to SEQ ID NO: 6534

SEQ ID NO: 17328 - protein, 125 aa, Neisseria meningitidis; identical to SEQ ID NO: 7788

SEQ ID NO: 17329 - protein, 215 aa, Neisseria meningitidis; identical to SEQ ID NO: 1509

SEQ ID NO: 17330 - protein, 391 aa, Neisseria meningitidis; identical to SEQ ID NO: 7218

SEQ ID NO: 17331 - protein, 44 aa, Neisseria meningitidis; identical to SEQ ID NO: 6328

SEQ ID NO: 17332 - protein, 595 aa, Neisseria meningitidis; identical to SEQ ID NO: 6503

SEQ ID NO: 17333 - protein, 166 aa, Neisseria meningitidis
MADLQKNFQTSFRDAMASCAAGVHVITTDGAAGRYGITMTAVAPVTDEPPTVMLCINRSARIIPILSENGSLCINTLADEHQDVAEHFAGLTGLSPEERFAYHIWHRGKTGQLEIEGALAHLHGHIVGKHEIGTHFVFYVRLDEIKNCGCKRPALLYFRRQFRFLD

SEQ ID NO: 17334 - protein, 275 aa, Neisseria meningitidis
MKPDIYALLERALLSGDPDEKGRLTDEAFAAVQNADGAETNAPPADFPRAGRPDKPVLVAPSQLTPRKMNTTEGYAAMLHAIAHIEFNAINLALDAAYRFRTLPFQFVRDWVKVAKEEVYHFRLMRERLRAFGFDYGDFEAHNHLWDMAYKTAYDPLLRMALVPRVLEARGLDVTPGIRAKVAQRGDSETCGVLDIIYRDEVGHVAIGNRWYQHLCRERGLEPVALFRSLIARYDMFIFRGYVNIEAREKAGFSRFELDMLEDFEQGLKQNKHAV

SEQ ID NO: 17335 - protein, 332 aa, Neisseria meningitidis
VAAHIGRIDTDAPLKPLYVIHGEEELLRIEALDALRAAAKKQGYLNREVYTADNAFDWNELLQTAGSAGLFADLKLLELHIPNGKPGKTGGEALQDFAARLPEDTVTLVLLPKLEKTQLQSKWFAALAAKGEVWEAKPVGAAALPQWIRGRLDKIGLGIEADALALFAERVEGNLLAARQEIDKLGLLYPKGHTVNIDEAQTAVANVARFDAFQLAGAWMKGDVLRVCRLLDGLREEGEEPVLLLWAVAEDVRTLIRLAAALKQGQSIQSVRNSLRLWGDKQTLAPLAVKRISVVRLLDALKTCAQIDRIIKGAEDGDAWTVFKRLVVSLAE

SEQ ID NO: 17336 - protein, 468 aa, Neisseria meningitidis; identical to SEQ ID NO: 7676

SEQ ID NO: 17337 - protein, 472 aa, Neisseria meningitidis; identical to SEQ ID NO: 6423

SEQ ID NO: 17338 - protein, 83 aa, Neisseria meningitidis; identical to SEQ ID NO: 5347

SEQ ID NO: 17339 - protein, 444 aa, Neisseria meningitidis; identical to SEQ ID NO: 7264

SEQ ID NO: 17340 - protein, 547 aa, Neisseria meningitidis; identical to SEQ ID NO: 7844

SEQ ID NO: 17341 - protein, 133 aa, Neisseria meningitidis; identical to SEQ ID NO: 1383

SEQ ID NO: 17342 - protein, 357 aa, Neisseria meningitidis; identical to SEQ ID NO: 6567

SEQ ID NO: 17343 - protein, 402 aa, Neisseria meningitidis; identical to SEQ ID NO: 2438

SEQ ID NO: 17344 - protein, 188 aa, Neisseria meningitidis
MLLQNILPFAHCLLRKALPEGGNALDGTAGNGHDTLFLAQTAGIRGKVWAFDIQPQALSRTRCRLKEARYENVQLILDGHENLKQYVSEPLNAAIFNFGWLPGGDKSLTTHTETSIPALCATLSLLKEGGMLIAVLYPGHENGKQEAEAIEQWAKNLPQEQFAVLRYGFTNRKNSPPYLLAFEKLRQK

SEQ ID NO: 17345 - protein, 399 aa, Neisseria meningitidis
MLPNTPRRAVYAGSFDPPTLGHLWMIRQAQSMFDELIVAIGINPDKRSTYTVAERQDMLCDITKMFPNVRTDVFENRFLVHYAREVDAGFIVRGIRSASDYEYERSMRHINSDLAPEISTYSSCRRAKSPKCRPLWSKDWSGRKAGRKRSTATCRKLCTKKSLPNINTKIEPFYFCKAYMDMLEILFRHQDFVAINKPGGISVHQDSGETGLARTLAIQLGVERVWLLHRLDKQTSGILLFALNKESASALSGQFAGKSIKKTYLALSDRKPSKKQGWIKGGMEKSRCGMWKLTRNTENIAVTRFHSISIAEKLRLFILEPHTGKTHQLRVAMKSLGSPILGDSLYGGTESETMFLYAWKIQFDYQNRQIEIVAPLKNEWQTENIHRALEEFCMENKID

SEQ ID NO: 17346 - protein, 117 aa, Neisseria meningitidis; identical to SEQ ID NO: 6607

SEQ ID NO: 17347 - protein, 336 aa, Neisseria meningitidis; identical to SEQ ID NO: 7506

SEQ ID NO: 17348 - protein, 381 aa, Neisseria meningitidis; identical to SEQ ID NO: 6614

SEQ ID NO: 17349 - protein, 262 aa, Neisseria meningitidis; identical to SEQ ID NO: 6514

SEQ ID NO: 17350 - protein, 46 aa, Neisseria meningitidis; identical to SEQ ID NO: 6727

SEQ ID NO: 17351 - protein, 622 aa, Neisseria meningitidis
MSQALPYRPDIDTLRAAAVLSVIVFHIEKDWLPGGFLGVDIFFVISGFLMTTILHREMSGGGRFSLKAFYIRRIKRILPAFFAVLAATLAGGFFLFTKDDFFLLWKSALTALGFASNLYFARGKDYFDPAQEEKPLLHIWSLSVEEQFYFVFPILLLLVARKSLRVQFGFLAALCALSLAASFIPSALDKYYLPHLRACELLIGSLTAVWMRCRQPAVGRRCAAVGALFAVCILSTCLFSYSEQTAYFPGPAALIPCLAVAALIYFNHYEHPLKKFFQSKITVAAGLISYSLYLWHWPILAFMRYIGPDNLPPYSPAAAVVLILLLSLFSYHCIEKPFKKWQGSFAQSVLWIYALPMLILGAGSFFAMRLPFMAQYDRLGLTRSNTSCHNNTGKQCLWGDTEKQPELLVLGDSHADHYKTFFDAVGKKEKWSATMVSADACAYVEGYASRVFQNWAACRAVYRYAEEHLPRYSKVVLAMRWGSQMPENSRSLAYDAGFFQKFDRMLHKLSSEKQAVYLMADNLASSYNVQRAYILSSRIPGYRQALRPDDESTLKANARIRELAAKYPNVYIIDAAAYIPADFQIGGLPVYSDKDHINPYGGTELAKRFSEKQRFLDTRHNH

SEQ ID NO: 17352 - protein, 104 aa, Neisseria meningitidis; identical to SEQ ID NO: 7344

SEQ ID NO: 17353 - protein, 257 aa, Neisseria meningitidis; identical to SEQ ID NO: 6428

SEQ ID NO: 17354 - protein, 87 aa, Neisseria meningitidis; identical to SEQ ID NO: 932

SEQ ID NO: 17355 - protein, 213 aa, Neisseria meningitidis; identical to SEQ ID NO: 7504

SEQ ID NO: 17356 - protein, 100 aa, Neisseria meningitidis; identical to SEQ ID NO: 1023

SEQ ID NO: 17357 - protein, 159 aa, Neisseria meningitidis
MPESIFKQISLDILKLHRDSVYSLLATSGCNCQVHEAAYVNIDGKYYIALSCEPEVGEVKTGILLIEDESRNLRLSWVGSARELDRKDSVYKRALSALSRKLGRCKDRLHMAVQPFLLELVPEKGRFSVGDEEVWISRNDLVRALYPVGYSMRQAVFQI

SEQ ID NO: 17358 - protein, 172 aa, Neisseria meningitidis
MRLFPIAAALTLAACGTVQSTQYFVLPDSRYIRPATQGGETAVEVRLAEPLKRGGLVYQTDPYRLNTAQNHVWADTLDDMLEAALSNAFNRLDSTRIFVPASRSGSTEKWTVYIDAFQGSYTGKTLISGYAVLPDGTNRPFHIETEQQGDGYAAMTAALEQGLKQAAQQMVE

SEQ ID NO: 17359 - protein, 269 aa, Neisseria meningitidis
MRPYATTIYQLFILFIGSVFTMTSCEPVNEKTDQKAVSAQQAKEQTSFNNPEPMTGFEHTVTFDFQGTKMVIPYGYLARYTQDNATKWLSDTPGQDAYSINLIEISVYYKKTDQGWVLEPYNQQNKAHFIQFLRDGLDSVDDIVIRKDACSLSTTMGERLLTYGVKKMPSAYPEYEAYEDKRHIPENPYFHEFYYIKKGENPAIITHRNYHRYGENDYSTSVGSCINGFTVRYYPFIREKQQLTQQELVGYHQQVEQLVQSFVNNPSKK

SEQ ID NO: 17360 - protein, 266 aa, Neisseria meningitidis; identical to SEQ ID NO: 8747

SEQ ID NO: 17361 - protein, 417 aa, Neisseria meningitidis
MQTYLVGGAVRDYLLGLPVKDRDWVVVGADAQTMLAQGFQPVGKDFPVFLHPETHEEYALARTERKTAKGYVGFSFHADKDVTLEQDLMRRDLTINAMAQDADGKIIDPFGGQRDLAAGILRHVSPAFAEDPVRILRTARFAARYKFEIAEETIKLMRQMVENGEADALVAERVWQEFAKGLMEKNPRKMIEVLRECGALKVLLPEVNALFGVPQRADYHPEIDSGIHTLMTLQRAADMGLSLPERYAALLHDLGKAKTPSDILPRHHGHDLAGVEPVREVNQRLRAPKHCAELAELVCRWHIIFHQVGQLKSQTILNVLKKTDAFRRPERFQTALNVCIADTQGRLNREHTPYPQRAHWLALLEAANQADSGKIAAECRSQGKAHLIAEQIDRARLAQIAPLQKAFRAAQDKTEKH

SEQ ID NO: 17362 - protein, 539 aa, Neisseria meningitidis
MDNLVWDGIPDIRTLDQAIRKHAPPLNLIICLPDNQIPDFQTAQDASDAECRLKHRLDQAMQCLQFDSINLIEHILPDVRFWLVPPSRTHHLHEHFHHISWQTEAIPQTESKPDKPWFALPQTSERQKPEHILVIGAGISGAATAHALASHGISVTVLEARKAAQAASGNRQGLLYAKISPHDTEQTELLLAGYGYTKRLLGHILPESETWGGNGIIHLNYSRTEQQRNHELGLQKHHNHLYRSITQAEAEKIAGIPLSVPYDHPSCGLYWQHGVWLNPPAFVRTLLNHPLIGLHEDTPLTDISHDGEKWIASTPNGTFTATHIIYCTGANSPYLPETNLATLPLRQIRGQTGLTPSTPFSEQLRCAVSGESYISPSWHGLHCYGASFIPNSSHTGWNEAEEASNRQALAHLNPALSESLFAANPNPQKHQGHAAIRCDSPDHLPLVGALGDIAAMQQTYAKLALDKNYRIDAPCPYLPNAYANTAHGTRGLATAPICAAAVAAEILGLPHPLSKRLRHALHPNRAIIRAIVRRKDLTP

SEQ ID NO: 17363 - protein, 89 aa, Neisseria meningitidis; identical to SEQ ID NO: 4489

SEQ ID NO: 17364 - protein, 517 aa, Neisseria meningitidis
MTQTNRVIIFDTTLRDGEQSPGAAMTKEEKIRVARQLEKLGVDIIEAGFAAASPGDFEAVNAIAKTITKSTVCSLSRAIERDIRQAGEAVAPAPKKRIHTFIATSPIHMEYKLKMKPKQVIEAAVKAVKIAREYTDDVEFSCEDALRSEIDFLAEICGAVIEAGATTINIPDTVGYSIPYKTEEFFRELIAKTPNGGKVVWSAHCHNDLGLAVANSLAALKGGARQVECTVNGLGERAGNASVEEIVMALKVRHDLFGLETGIDTTQIVPSSKLVSTITGYPVQPNKAIVGANAFSHESGIHQDGVLKHRETYEIMSAESVGWATNRLSLGKLSGRNAFKTKLADLGIELESEEALNAAFARFKELADKKREIFDEDLHALVSDEMGSMNAESYKFISQKISTETGEEPRADIVFSIKGEEKRASATGSGPVDAIFKAIESVAQSGAALQIYSVNAVTQGTESQGETSVRLARGNRVVNGQGADTDVLVATAKAYLSALSKLEFSAAKPKAQGSGTI

SEQ ID NO: 17365 - protein, 125 aa, Neisseria meningitidis; identical to SEQ ID NO: 348

SEQ ID NO: 17366 - protein, 592 aa, Neisseria meningitidis; identical to SEQ ID NO: 7350

SEQ ID NO: 17367 - protein, 601 aa, Neisseria meningitidis
MKKLICLFAVFLMLCGRAFALDANDLLPPEKAFVPELAVADDGVNVRFRIADGYYMYQAKIVGKTDPADLLGQPSFSKGEEKEDEFFGRQTVYHHEAQVAFPYAKAVGEPYKLVLTYQGCAEAGVCYPPVDTEFDIFGNGTYHPQTDEPASAKDRFLQPSSQNGSGALPPPKGDEGGDSRFKLSWDTLNANLLAFFLAGLGLSFTACMYPLLPIVSSIVVGDKKAGKARAFVLSVVYVQGLALTYTLVGIVAGLTGALLTVWLQQAWVVLAASALMVVLALSMFGLFNIQLPNAVQSYFQNQSSRLSGGKIVSVFIMGILSALIVGPCVAPPLAFALGYIGQTGDAVLGGLALYTLALGTGVPLIAIGTFGGHILPKAGDWMNAVKYAFGFILLAVAVYLATPHLPYYLVVALYTLLMLVPAFMLLVNGRRQKRRPKAVAFALGGILLIGGAWFGWQGANGKTTALHHFLTLNPPAEAGKSSEHGKMFADTAALKAAMDTALKEHPDKPVVLDFYADWCISCKEMAAYTLNQPEVHQAVDMERFFQIDVTANTPEHQALLKEYGLFGPPGVFVVRSDGSRSEPLLGFVKADKFIEWYEQNR

SEQ ID NO: 17368 - protein, 287 aa, Neisseria meningitidis; identical to SEQ ID NO: 1286

SEQ ID NO: 17369 - protein, 94 aa, Neisseria meningitidis; identical to SEQ ID NO: 7715

SEQ ID NO: 17370 - protein, 391 aa, Neisseria meningitidis; identical to SEQ ID NO: 6209

SEQ ID NO: 17371 - protein, 325 aa, Neisseria meningitidis; identical to SEQ ID NO: 5588

SEQ ID NO: 17372 - protein, 125 aa, Neisseria meningitidis
LRQDMSEQTALAVCADGVETALAEAASLLEEGCGSVLVLAADDPLPEGYAVSATRAPFAYALAMVLTKGTRYSLTLSASDDMPSEAGMLPEAYWSGLEWVRFLLNGSRECRRVYRNREWLWQRNG

SEQ ID NO: 17373 - protein, 230 aa, Neisseria meningitidis; identical to SEQ ID NO: 6021

SEQ ID NO: 17374 - protein, 286 aa, Neisseria meningitidis; identical to SEQ ID NO: 7322

SEQ ID NO: 17375 - protein, 1457 aa, Neisseria meningitidis; identical to SEQ ID NO: 6987

SEQ ID NO: 17376 - protein, 147 aa, Neisseria meningitidis; identical to SEQ ID NO: 5915

SEQ ID NO: 17377 - protein, 206 aa, Neisseria meningitidis; identical to SEQ ID NO: 6659

SEQ ID NO: 17378 - protein, 481 aa, Neisseria meningitidis; identical to SEQ ID NO: 6942

SEQ ID NO: 17379 - protein, 417 aa, Neisseria meningitidis
MRKPRITYLDVWANDERIGTLEKGAMYRFAYDNPNSSLLGLHYQDRSKVYISNNMPHIFAQYFPEGFLDAHITSKYAFHDAPFEDNEMLRLAILCRETLGRIHVRCNDPLFNEWIDGLEMKNPRILTERDLLGINARQVFQQYMAEIFHHGRFVSVSGIQQKMSLDAIRRNTKQTASYIAKGFDASEYPCLAANEFLCMQTIKQAGIAVAQTSLSEDSSVLLVRRFDVSEQGYFLGMEDFTSLRQYSVEDKYKGSYAAIAQIIRQISGRPDEDLIHFFNQLAASCILKNGDAHLKNFSVLYHDEYDVRLAPVYDVLDTSIYRVGTQGIFDAYDDTLALNLTNHGKKTYPSKNTLLDFAEKYCDLGREDASFMIDTIVQAKEQVLVKYSDVLRENEWLAQKWHFIPDENEEGLPFTFR

SEQ ID NO: 17380 - protein, 251 aa, Neisseria meningitidis; identical to SEQ ID NO: 7457

SEQ ID NO: 17381 - protein, 106 aa, Neisseria meningitidis; identical to SEQ ID NO: 2510

SEQ ID NO: 17382 - protein, 96 aa, Neisseria meningitidis; identical to SEQ ID NO: 6139

SEQ ID NO: 17383 - protein, 177 aa, Neisseria meningitidis; identical to SEQ ID NO: 7595

SEQ ID NO: 17384 - protein, 301 aa, Neisseria meningitidis; identical to SEQ ID NO: 7688

SEQ ID NO: 17385 - protein, 485 aa, Neisseria meningitidis; identical to SEQ ID NO: 2552

SEQ ID NO: 17386 - protein, 505 aa, Neisseria meningitidis
MLYFRYGFLVVWCAAGVSAAYGADAPAILDDKALLQVQRSVSDKWAESDWKVENDAPRVVDGDFLLAHPKMLEHSLRDALNGNQADLIASLADLYAKLPDYDAVLYGRARALLAKLAGRPAEAVARYRELHGENAADERILLDLAAAEFDDFRLKSAERHFAEAAKLDLPAPVLENVGRFRKKTEGLTGWRFSGGISPAVNRNANNAAPQYCRQNGGRQICSVSRAERAAGLNYEIEAEKLTPLADNHYLLFRSNIGGTSYYFSKKSAYDDGFGRAYLGWQYKNARQTAGILPFYQVQLSGSDGFDAKTKRVNNRRLPPYMLAHGVGVQLSHTYRPNPGWQFSVALEHYRQRYREQDRAEYNNGRQDGFYVSSAKRLGESATVFGGWQFVRFVPKRETVGGAVNNAAYRRNGVYAGWAQEWRQLGGLNSRVSASYARRNYKGIAAFSTEAQRNREWNVSLALSHDKLSYKGIVPALNYRFGRTESNVPYAKRRNSEVFVSADWRF

SEQ ID NO: 17387 - protein, 362 aa, Neisseria meningitidis; identical to SEQ ID NO: 6713

SEQ ID NO: 17388 - protein, 340 aa, Neisseria meningitidis
LAADRTIPEPSKTRYLRDYRGRPAYPLLSMFKAVLLGQWHSLSDPELEHSLITRIDFNLFCRFDELSIPDYSTLCRYRNWLAQDNTLSELLELINRQLTEKGLKVEKASAAVIDATIIQTAGSTQRQVIEVDEEGQINGQTTPSKDSDARWIKKNGLYKLGYKQHTRTDAEGYIEKLHITPANAHECKHLPPLLEGLPKGTTVYADKGYDSAENRQHLEEHQLLDGIMRKACRNRPLTETQTKRNRYLSKTRYSGLNLNQDKATKPQTVQIVRQGEATPYWFKFNPLYVVEQSFGTLHRKFRYARAAYFGLIKVSAQSHLKAICLNLLKAANRLSAPAAA

SEQ ID NO: 17389 - protein, 176 aa, Neisseria meningitidis; identical to SEQ ID NO: 6264

SEQ ID NO: 17390 - protein, 149 aa, Neisseria meningitidis; identical to SEQ ID NO: 2323

SEQ ID NO: 17391 - protein, 77 aa, Neisseria meningitidis; identical to SEQ ID NO: 5942

SEQ ID NO: 17392 - protein, 187 aa, Neisseria meningitidis
VQDKNNLCWLDMEMTGLNPETDRIIEVAMIITDSDLNVLAQSEVYAVHQSDDVLNKMDEWNTATHGRTGLTQRVRESSHTEAEVEQKLLDFMSEWVPGRATPMCGNSIHQDRRFMVKYMPKLENYFHYRNLDVSTLKELAKRWNPPVAKSVVKRGSHKALDDILESIEEMRHYREHFLISAPRAEAQ

SEQ ID NO: 17393 - protein, 252 aa, Neisseria meningitidis
MKITPVKALTDNYIWMIQHGNHAVCVDPSEPSPVLEFLVRNRLMLAQTWVTHPHPDHEGGAAALWRGYMESPVYGESDIEAATHTVTAGTQFTFGDGQVTVWATPGHTDRHTSYLLETSDGIHVFCGDTLFSAGCGRVFTGTIEQLYDSFQRFNRLPENTLFYPAHEYTAANLRFAAHIEPDNADIQTALKAAERTPTLPVTLAHERRVNPFLRVDLPHVRDRAEALSGKTLNSSLDTFVALRELKNQYRTK

SEQ ID NO: 17394 - protein, 341 aa, Neisseria meningitidis
MDYQGKKDRLEEVIGLSEDPELWNDPKRAQEIGKERKILEGIVLTLDNIASGIEDNRMLIEMTVEENDEEGFAAVQEDVAGLEKQMADLEFKRMFNQPADPNNCFIDITAGAGGTEAEDWAGMLFRMYSRYAERKGFRIEILEEDDGEIAGINRATIRVEGEYAYGLLRTETGVHRLVRYSPFDSNNKRHTSFASVFVYPEIDDSIEIEINPADLRIDTYRASGAGGQHINKTDSAVRITHEPTGIVVQCQNDRSQHANKAAAMEMLKSKLYELEMRKRNEEKQALEEGKSDVGWGSQIRSYVLDSSRIKDLRTGYEVGNTKAVLDGDLDGFIEASLKQGV

SEQ ID NO: 17395 - protein, 373 aa, Neisseria meningitidis; identical to SEQ ID NO: 306

SEQ ID NO: 17396 - protein, 199 aa, Neisseria meningitidis; identical to SEQ ID NO: 360

SEQ ID NO: 17397 - protein, 469 aa, Neisseria meningitidis; identical to SEQ ID NO: 7836

SEQ ID NO: 17398 - protein, 139 aa, Neisseria meningitidis
MNLVKLLANNWQPIAIIALVGTGLAVSHHQGYKSAFAKQQAVIDKMERDKAQALLLSAQNYARELELARAEAKKYEVKAHAVGMALAKKQAEVSRLKTENKKEIENVLTQDRKNASGGCIDGFGSHGLQLYNRALGYGN

SEQ ID NO: 17399 - protein, 184 aa, Neisseria meningitidis; identical to SEQ ID NO: 3342

SEQ ID NO: 17400 - protein, 127 aa, Neisseria meningitidis; identical to SEQ ID NO: 6745

SEQ ID NO: 17401 - protein, 531 aa, Neisseria meningitidis; identical to SEQ ID NO: 6319

SEQ ID NO: 17402 - protein, 109 aa, Neisseria meningitidis; identical to SEQ ID NO: 6317

SEQ ID NO: 17403 - protein, 223 aa, Neisseria meningitidis; identical to SEQ ID NO: 7127

SEQ ID NO: 17404 - protein, 874 aa, Neisseria meningitidis
MKTSELRQKFLKFFETKGHTVVRSSSLVPHDDPTLLFTNAGMNQFKDVFLGFDKRPYSRATTAQKCVRAGGKHNDLENVGYTARHHTFFEMMGNFSFGDYFKRDAIHFAWEFLTSPEWLNIPKDKLLATVYAEDDEAYNIWLNEIGMPSERIVRIGDNKGAKYASDNFWQMGDTGPCGPCSEIFYDHGEEIWGGIPGSPEEDGDRWIEIWNCVFMQFNRDEQGNMNPLPKPSVDTGMGLERIAAVMQHVHSNYEIDLFQDLLKAVARETGAPFSMEEPSLKVIADHIRSCSFLIADGVLPSNEGRGYVLRRIIRRAVRHGYKLGQSKPFFHKLVADLVKEMGGAYPELKEKQAQIEEALKNEESRFAQTLETGMALLENALVKGGKTLGGEIIFKLYDTYGFPYDLTADICRERNIEPDEAGFEREMEAQRARARAAQSFKANAQLPYDGQDTEFKGYSERQTESKVLALYKDGEQVNELNEGDSGAVVIDFTPFYAESGGQVGDVGYIFSGENRFEVRDTQKIKAAVFGQFGVQTSGRLKVGDSVTAKVDDEIRNANMRNHSATHLMHKALRDVLGRHVEQKGSLVTAESTRFDISHPQAVTAEEIAEVERRVNEAILANVAVNAAIMSMEDAQKTGAMMLFGEKYGEEVRVLQMGGFSTELCGGTHVSRTGDIGLFKIISEGGIAAGVRRIEAITGLNALKWAQEQERLVKDIIAETKAQTEKDVLAKIQAGAAHAKALEKELARAKAELAVHAGAKLLDDAKDLGAAKLVAAQIEADAAALREIVTDLTGKSDNAVILLAAVNDGKVSLCAGVSKPLTGKVKAGDLVKFAAEQVGGKGGGRPDLAQAGGTDADKLPAVLDSVKDWVGAKLV

SEQ ID NO: 17405 - protein, 307 aa, Neisseria meningitidis; identical to SEQ ID NO: 6458

SEQ ID NO: 17406 - protein, 435 aa, Neisseria meningitidis; identical to SEQ ID NO: 4637

SEQ ID NO: 17407 - protein, 208 aa, Neisseria meningitidis; identical to SEQ ID NO: 6521

SEQ ID NO: 17408 - protein, 258 aa, Neisseria meningitidis; identical to SEQ ID NO: 6783

SEQ ID NO: 17409 - protein, 590 aa, Neisseria meningitidis
MILPARFSDGISLSLRLKLLTGVWVGLAALSVVLTLLLSLRLENAASVIEEAGNLRMQAYRLAYMAGEGSPRAQIDNQVAEFEKSLNRISQSDAIHPLIPSDTPLAYDLIQSMLIIDWQAHILPPLQSYRRPTQVDLYRFAGNIELFLQALENANEKNTWWLRRFQWAIMLMTLVSSVLMLFWHQIWVIRPLQALREGAERIGRRCFDIPVPEGGTPEFKQVGRCFNQMGGRLKILYDDLEGQVAEQTRSLEKQNQNLTLLYQTTRDLHQSYIPQQAAEHFLNRILPAVGADSGRVCLDGGSDVYVSIHHADCGTAASDLGKYHEEIFPIEYQNETLGRLLLSFPNGISLDEDDRILLQTLGRQLGVSLAGAKQEEEKRLLAVLQERNLIAQGLHDSIAQALTFLNLQVQMLETAFAENKREEAAENIGFIKTGVQECYEDVRELLLNFRTKISNKEFPEAVADLFARFTQQTGITVETAWENGSFLPPQEAQLQMIFILQESLSNIRKHARATHVKFTLSEHGGRFTMTIQDNGQGFDTEKIGEPTGSHVGLHIMQERAKRIHAVLEIRSQPQQGTTVSLTGASEESLK

SEQ ID NO: 17410 - protein, 174 aa, Neisseria meningitidis; identical to SEQ ID NO: 7110

SEQ ID NO: 17411 - protein, 57 aa, Neisseria meningitidis; identical to SEQ ID NO: 2122

SEQ ID NO: 17412 - protein, 480 aa, Neisseria meningitidis
MNWSDLNLMPAMPEIVLLSLLVLLLLADLWVSDDKRRWTHYGALATVAVTAVVQLAVWEQGSTSSFNGMYIADGMSRLAKMVLYALTFALFVYAKPYNQVRGIFKGEFYTLSLFALLGMSVMVSAGHFLTAYIGLELLSLALYALIALRRDSGFAAEAALKYFVLGALASGLLLYGISMVYGATGSLEFAGVLASSFNEEANEWLLKLGLVFIVVAVAFKLGAVPFHMWVPDVYHGAPTSVTALVGTAPKIAAVVFTFRILVTGLGTVHHDWSLMFALLAAASLLVGNLAAIMQTNIKRMFAYSTVSHMGFILLAFMAGAVGFAAGLYYAITYALMAAAGFGVLMVLSDGDNECENISDLAGLNQHRVWLAFLMLLVMFSMAGIPPLMGFYAKFGVIMALLKQGHVWLSVFAVIMSLIGAFYYLRVVKVIYFDVPDHDQPVGSNYAAKFVLTVNAFLLLLWGIMPQTVIDWCAKALENTL

SEQ ID NO: 17413 - protein, 96 aa, Neisseria meningitidis; identical to SEQ ID NO: 688

SEQ ID NO: 17414 - protein, 105 aa, Neisseria meningitidis; identical to SEQ ID NO: 895

SEQ ID NO: 17415 - protein, 418 aa, Neisseria meningitidis; identical to SEQ ID NO: 7682

SEQ ID NO: 17416 - protein, 148 aa, Neisseria meningitidis; identical to SEQ ID NO: 14771

SEQ ID NO: 17417 - protein, 81 aa, Neisseria meningitidis; identical to SEQ ID NO: 1361

SEQ ID NO: 17418 - protein, 119 aa, Neisseria meningitidis; identical to SEQ ID NO: 3366

SEQ ID NO: 17419 - protein, 166 aa, Neisseria meningitidis; identical to SEQ ID NO: 987

SEQ ID NO: 17420 - protein, 301 aa, Neisseria meningitidis; identical to SEQ ID NO: 7795

SEQ ID NO: 17421 - protein, 148 aa, Neisseria meningitidis; identical to SEQ ID NO: 4019

SEQ ID NO: 17422 - protein, 467 aa, Neisseria meningitidis
MDTTLKTTLTSVAAAFALSACTMIPQYEQPKVEVAETFKNDTADSGIRAVDLGWHDYFADPRLQKLIDIALERNTSLRTAVLNSEIYRKQYMIERNNLLPTLAANANDSRQGSLSGGNVSSSYKVGLGAASYELDLFGRVRSSSEAALQGYFASTANRDAAHLSLIATVAKAYFNERYAEEAMSLAQRVLKTREETYKLSELRYKAGVISAVALRQQEALIESAKADYAHAARSREQARNALATLINQPIPEDLPAGLPLDKQFFVEKLPAGLSSEVLLDRPDIRAAEHALKQANANIGAARAAFFPSIRLTGTVGTGSAELGGLFKSGTGVWSFAPSITLPIFTWGTNKANLDVAKLRQQVQIVAYESAVQSAFQDVANALAAREQLDKAYDALSKQSRASKEALRLVGLRYKHGVSGALDLLDAERSSYAAEGAALSAQLTRAENLADLYKALGGGLKRDTQTDK

SEQ ID NO: 17423 - protein, 310 aa, Neisseria meningitidis; identical to SEQ ID NO: 7143

SEQ ID NO: 17424 - protein, 151 aa, Neisseria meningitidis; identical to SEQ ID NO: 6340

SEQ ID NO: 17425 - protein, 548 aa, Neisseria meningitidis; identical to SEQ ID NO: 7438

SEQ ID NO: 17426 - protein, 54 aa, Neisseria meningitidis; identical to SEQ ID NO: 6606

SEQ ID NO: 17427 - protein, 206 aa, Neisseria meningitidis; identical to SEQ ID NO: 1725

SEQ ID NO: 17428 - protein, 617 aa, Neisseria meningitidis; identical to SEQ ID NO: 6171

SEQ ID NO: 17429 - protein, 311 aa, Neisseria meningitidis; identical to SEQ ID NO: 6161

SEQ ID NO: 17430 - protein, 69 aa, Neisseria meningitidis; identical to SEQ ID NO: 7188

SEQ ID NO: 17431 - protein, 581 aa, Neisseria meningitidis
MQVNIQIPYILPRCVRAEDTPYACYLKQLQVTKDVNWNQVQLAYDKWDYKQEGLTGAGAAIIALAVTVVTAGAGAGAALGLNGAAAAATDAAFASLASQASVSLINNKGDVGKTLKELGRSRTVKKLVVAAAIAGVSNKIGASSLATWSETPWVNNLNVNLANAGSAALINTAVNGGSLKDNLEANILAALVNTAHGEAASKIKQLDQHYITHKIAHAIAGCAAAAANKGKCQDGAIGAAVGEILGEALLDGRDPGSLNVKDRAKIIAKAKLAAGTVAALSKGDVNAAANAAAVAVESNALSKERMDKLTKCLSGKTCSTTMEKVNAIKKDEQFSKVIDTEIQKVCSRNPLGDGCRNGINMSIKYIAMPAAWKYMPTDVSRVAKEVFGYLYNSQGASTRFDKYFNTIDNRADFFAASNLYEQNLGSKARWFGGADFVSRAAITGLGADGEASYITFAAGKVVGNPPIYEWRAASGNALIVNGFYNFRDLFNKKTNPREWDIQQLKSEQKLLQPIHQKYLSNEKDYLSLIKGVTSNKIFSIIPNPLDERKKIEDGINMLDYKSRIKYGCKLMGYSEKQGCKP

SEQ ID NO: 17432 - protein, 395 aa, Neisseria meningitidis; identical to SEQ ID NO: 6427

SEQ ID NO: 17433 - protein, 343 aa, Neisseria meningitidis; identical to SEQ ID NO: 7589

SEQ ID NO: 17434 - protein, 65 aa, Neisseria meningitidis; identical to SEQ ID NO: 7687

SEQ ID NO: 17435 - protein, 469 aa, Neisseria meningitidis
MKYISTRGETAHKPFSEVLLMGLAPDGGLMLPEHYPQIGRETLDKWRGLAYPELAFEIMRLFVTDIPEDDLRDILNRTYTEAAFGTKEITPVRTLSDGIKIQALSNGPTLAFKDMAMQFLGNAFEYVLNKEGKKLNILGATSGDTGSAAEYALRGKKGVNVFMLSPDGKMSAFQRAQMYSLQDENIHNIAVKGMFDDCQDIVKAVQNDAAFKEKYHIGTVNSINWGRIVAQVVYYFAGYFNATSSNDETVSFCVPSGNFGNVCAGHIAKQMGLPIRRLIVATNENDVLDEFFKTGAYRPRNSAHTYVTSSPSMDISKASNFERFVFDLMDRDPAEINTLWAEVAAGKGFDLRFALDKVGGKYGFTSGKSTHADRLATIKQVYEQDQELIDPHTADGVKVAREVREEGEMVVCLETALAAKFDATIREAVGDAAIPRPAALEGLENLPQRVQTVPNSADAVKGIIEQTLA

SEQ ID NO: 17436 - protein, 512 aa, Neisseria meningitidis; identical to SEQ ID NO: 6421

SEQ ID NO: 17437 - protein, 240 aa, Neisseria meningitidis
MKPAYFISDLHLSEKQPELTALLLRFLRSSAARQARAVYILGDLFDFWVGDDEVSELNTSVAREIRKLSDKGVAVFFVRGNRDFLIGQNFCRQAGMTLLPDYSVLDLFGCKTLICHGDTLCTDDRAYQRFRKIVHRKRLQKLFLMLPLKWRTRLATKIRRVSKMEKQVKPADIMDVNAAFTARQVRAFGAERLIHGHTHREHIHHENGFTRIVLGDWHNDYASILRVDGDGAVFVPLEKY

SEQ ID NO: 17438 - protein, 258 aa, Neisseria meningitidis; identical to SEQ ID NO: 7545

SEQ ID NO: 17439 - protein, 201 aa, Neisseria meningitidis; identical to SEQ ID NO: 6817

SEQ ID NO: 17440 - protein, 397 aa, Neisseria meningitidis; identical to SEQ ID NO: 6616

SEQ ID NO: 17441 - protein, 248 aa, Neisseria meningitidis; identical to SEQ ID NO: 3755

SEQ ID NO: 17442 - protein, 190 aa, Neisseria meningitidis; identical to SEQ ID NO: 7132

SEQ ID NO: 17443 - protein, 179 aa, Neisseria meningitidis; identical to SEQ ID NO: 7746

SEQ ID NO: 17444 - protein, 188 aa, Neisseria meningitidis; identical to SEQ ID NO: 2794

SEQ ID NO: 17445 - protein, 477 aa, Neisseria meningitidis; identical to SEQ ID NO: 7680

SEQ ID NO: 17446 - protein, 205 aa, Neisseria meningitidis; identical to SEQ ID NO: 6536

SEQ ID NO: 17447 - protein, 235 aa, Neisseria meningitidis; identical to SEQ ID NO: 5939

SEQ ID NO: 17448 - protein, 60 aa, Neisseria meningitidis; identical to SEQ ID NO: 3547

SEQ ID NO: 17449 - protein, 376 aa, Neisseria meningitidis
MIKISTRFDAGSVVVKDLTDPSNIRLALRPDNASDFAQWFYFRLQGAAYQNCIMHFENAAEAAYPKGWEGYQACASYDRRNWFRVPTSYENGVLTVNHTPLSNSVYYAYFEPYSEEQHLNLLGDAQGSGLCRIDDLGSTVQGRDINLLTIGNQVESDLKIWITARQHPGETMAEWFIEGLLGRLLDPQDPTARALLDRATFYIVPNMNPDGSALGNLRTNAAGANLNREWENPTVEKSPEVFFVREKMLETGVDLFLDIHGDEGLPFVFVAGTEGVPNYNPRIAALEAQFKNALLNASPDFQDEYGYEKDAPGEANMTLATNWVGNRFNCLAYTLEMPFKDNANLPDDDFGWNGQRSLRLGEAALSAILNVIGDLR

SEQ ID NO: 17450 - protein, 861 aa, Neisseria meningitidis; identical to SEQ ID NO: 7392

SEQ ID NO: 17451 - protein, 295 aa, Neisseria meningitidis; identical to SEQ ID NO: 7411

SEQ ID NO: 17452 - protein, 344 aa, Neisseria meningitidis; identical to SEQ ID NO: 7515

SEQ ID NO: 17453 - protein, 238 aa, Neisseria meningitidis; identical to SEQ ID NO: 7356

SEQ ID NO: 17454 - protein, 119 aa, Neisseria meningitidis; identical to SEQ ID NO: 6100

SEQ ID NO: 17455 - protein, 135 aa, Neisseria meningitidis; identical to SEQ ID NO: 4758

SEQ ID NO: 17456 - protein, 423 aa, Neisseria meningitidis; identical to SEQ ID NO: 7723

SEQ ID NO: 17457 - protein, 250 aa, Neisseria meningitidis
MANQRPIYGFHAVNARLWQNPKSIVELYIQEGKSDARTREVLEKAANENIRVYFADADRLNAISKGARHQGVVGFIDASKNHVHLEDVLENLSEPPLLLILDGITDPHNLGACLRTADAMGVHAVIAPKDKSAGLNATVSKVACGAAETVPYITVTNLARTLRELKEYGIWIIGTDMSGESDLYHCNLPDSAAWVMGNEGDGMRRLTREHCDMLVSIPMFGTVESMNVSVSAGMVLSETRRQRVLKNEKV

SEQ ID NO: 17458 - protein, 141 aa, Neisseria meningitidis; identical to SEQ ID NO: 6006

SEQ ID NO: 17459 - protein, 139 aa, Neisseria meningitidis; identical to SEQ ID NO: 6288

SEQ ID NO: 17460 - protein, 470 aa, Neisseria meningitidis; identical to SEQ ID NO: 6204

SEQ ID NO: 17461 - protein, 269 aa, Neisseria meningitidis
MTPLKIAIAGVNGRMGRVLVEAVNNHPDTVLSGALEHSGSEALGLDAGYAVGLKTGIAISDDVDAVLAQSDVLIDFTRPEPTLKHLQKCVEKQVNIIIGTTGFDDAGKAAIQAAGEKTGVVFAANFSVGVNLTFHLLDTVARVLNEGYDIEIIEGHHRHKVDAPSGTALRMGEVIAGALGRDLKQCAVYGREGHTGPRDPSTIGFATVRAGDIVGDHTALFATDGERVEITHKASSRMTFAAGAVRAAVWVNGKTGLYDMQDVLGLNNR

SEQ ID NO: 17462 - protein, 178 aa, Neisseria meningitidis; identical to SEQ ID NO: 6466

SEQ ID NO: 17463 - protein, 169 aa, Neisseria meningitidis; identical to SEQ ID NO: 4575

SEQ ID NO: 17464 - protein, 558 aa, Neisseria meningitidis; identical to SEQ ID NO: 6829

SEQ ID NO: 17465 - protein, 367 aa, Neisseria meningitidis
MNTTANPSNIIVGLSGGVDSSVTAALLKQQGYQVRGVFMQNWEDDDNDEYCSIKQDSFDAIAVADIIGIDIDIVNFAAQYKDKVFAYFLQEYSAGRTPNPDVLCNAEIKFKCFLDYAVGQGADTIATGHYARKEVRNGVHYLLKGLDRNKDQSYFLYRLKPFQLERAIFPLGGLEKPEVRRLAAEFKLPTAAKKDSTGICFIGERPFREFLQKYLPTDNGKMVTPEGKTVGEHVGLMFYTLGQRKGLGIGGAGEPWFVAAKDLTKNELIVVQGHDHPLLYTRSLVMNDLSFTLPERPKAGRYTCKTRYRMADAPCELRYLDDETAELVFDEPQWAVTPGQSAVLYDGDICLGGGIIQTTDKPVIITR

SEQ ID NO: 17466 - protein, 129 aa, Neisseria meningitidis; identical to SEQ ID NO: 7065

SEQ ID NO: 17467 - protein, 128 aa, Neisseria meningitidis; identical to SEQ ID NO: 7600

SEQ ID NO: 17468 - protein, 823 aa, Neisseria meningitidis
MKKTCFHCGLDVPEHLHLTVRYENEDRETCCAGCQAVAQSIIDAGLGSYYKQRTADAQKTELPPQEILDQIRLYDLPEVQSDFVETHGGTREAVLMLGGITCAACVWLIEQQLLRTDGIVRIDLNYSTHRCRVVWDDGKIRLSDILLKIRQIGYTAAPYDAQKIEAANQKERKQYIVRLAVAGLGMMQTMMFALPTYLYGSDIEPDFLQILHWGGFLMVLPVVFYCAVPFYQGALRDLKNRRVGMDTPITVAIIMTFIAGVYSLATNAGQGMYFESIAMLLFFLLGGRFMEHIARRKAGDAAERLVKLIPAFCHHMPDYPDTQETCEAAVVKLKAGDIVLVKPGETIPVDGTVLEGSSAVNESMLTGESLPVAKMPSEKVTAGTLNTQSPLIIRTDRTGGGTRLSHIVRLLDRALAQKPRTAELAEQYASSFIFGELLLAVPVFIGWTLYADAHTALWITVALLVITCPCALSLATPTALAASTGTLAREGILIGGKQAIETLAQTTDIIFDKTGTLTQGKPAVRRISLLRGTDEAFVLAVAQALEQQSEHPLARAILNCRVSSGSVPDIAIKQRLNRIGEGVGAQLTVNGETQVWALGRASYVAEISGKEPQTEGGGSAVYLGSQSGFQAVFYLTDPLKDSAAEAVRQLAGKNLTLHILSGDRETAVAETARALGVAHYRAQAMPEDKLEYVKALQKEGKKVLMIGDGINDAPVLAQADVSAAAAGGTDIARDGADIVLLNEDLRTVAHLLDQARRTRHIIRQNLIWAGAYNIIAVPLAVLGYVQPWIAALGMSFSSLVVLGNAMRLHKQVDMPSEKMPSEQ

SEQ ID NO: 17469 - protein, 384 aa, Neisseria meningitidis; identical to SEQ ID NO: 6554

SEQ ID NO: 17470 - protein, 355 aa, Neisseria meningitidis; identical to SEQ ID NO: 6342

SEQ ID NO: 17471 - protein, 238 aa, Neisseria meningitidis
MLFRKTTAAVLAATLMLNGCTLMLWGMNNPVSETITRKHVDKDQIRAFGVVAEDNAQLEKGSLVMMGGKYWFVVNPEDSAKLTGILKAGLDKPFQIVEDTPSYARHQALPVKLESPGSQNFSTEGLCLRYDTDKPADIAKLKQLGFEAVKLDNRTIYTRCVSAKGKYYATPQKLNADYHFEQSVPADIYYTVTEEHTDKSKLFANILYTPPFLILDAAGAVLALPAAALGAVVDAARK

SEQ ID NO: 17472 - protein, 144 aa, Neisseria meningitidis
MNFALSVIMLTLASFLPVPPAGAAVFTWKDGGGNSYSDVPKQLHPDQSQILNLRTRQTKPAVKPAQADAGKRTDGAAQENNPDTAEKNRQLEEEKKRIAETERQNKEENCRISKMNLKAVGNSNAKNKDDLIRKYNNAVNKYCR

SEQ ID NO: 17473 - protein, 603 aa, Neisseria meningitidis; identical to SEQ ID NO: 6451

SEQ ID NO: 17474 - protein, 570 aa, Neisseria meningitidis
MKASQFFISTLKEAPAEAALASHKLMIRAGLIKANASGLYTWMPMGLRVLRKVENVVREEMARAGSVELLMPVVQPAELWQESGRWEFYGKELLRLKDRHDRDFCMGPTCEEVIADIVRKEINSYKQLPKNFYHIQTKFRDEVRPRFGVMRAREFVMKDAYSFHADYASLQTTYQDMYDAYCRIFTRLGLAFRPVAADTGSIGGTGSHEFQVLAESGEDVIAYSDTSDYAANIELAPTLPLKGERAAAQAELVKVHTPNVKTIDSLVDFLSIPIEKTLKSIVVEGENEGELILLLLRGDHEFNDIKAEKLAGVKSPLTMASPAAIVEQFGANGGSLGPVGFAGKVYADFATEKGADWVIGANEDDYHYTGFNFGRDAAEPEFVDLRNVVEGDESPDGQGRLKLARGIEVGHVFQLRDKYTQAMNVSFLDNNGKSQIMEMGCYGIGITRVVAAAIEQNNDEKGIIWTKAMAPFEVVIVPMNYKKSDTVREAADKIYAELLAAGADVLLDDRDERAGVLLNDSELLGIPHRIVIGDRALKEGNVEYAERRDNEAQAVAIGEIVARVTASLNA

SEQ ID NO: 17475 - protein, 78 aa, Neisseria meningitidis; identical to SEQ ID NO: 1246

SEQ ID NO: 17476 - protein, 462 aa, Neisseria meningitidis; identical to SEQ ID NO: 6281

SEQ ID NO: 17477 - protein, 205 aa, Neisseria meningitidis
MPYTEDMRPGDTANPYGASKAMVERMLTDIQKADPRWSVILLRYFNPIGAHESGLIGEQPNGIPNNLLPYICQVAAGKLPQLAVFGDDYPTPDGTGMRDYIHVMDLAEGHVAAMQAKSNVAGTHLLNLGSGRASSVLEIIRAFEAASGLTIPYEVKPRRAGDLACFYADPSYTKAQIGWQTQRDLTQMMEDSWRWVSNNPNGYDD

SEQ ID NO: 17478 - protein, 459 aa, Neisseria meningitidis
MQDYGISVCLTLTPYLQHELFSAMKSYFSKYILPVSLFTLPLSLSPSVSAFTLPEAWRAAQQHSADFQASHYQRDAVRARQQQAKAAFLPHVSANASYQRQPPSISSTRETQGWSVQVGQTLFDAAKFAQYRQSRFDTQAAEQRFDAAREELLLKVAESYFNVLLSRDTVAAHAAEKEAYAQQVRQAQALFNKGAATALDIHEAKAGYDNALAQEIAVLAEKQTYENQLNDYTDLDSKQIEAIDTANLLARYLPKLERYSLDEWQRIALSNNHEYRMQQLALQSSGQALRAAQNSRYPTVSAHVGYQNNLYTSSAQNNDYHYRGKGMSVGVQLNLPLYTGGELSGKIHEAEAQYGAAEAQLTATERHIKLAVRQAYTESGAARYQIMAQERVLESSRLKLKSTETGQQYGIRNRLEVIRARQEVAQAEQKLAQARYKFMLAYLRLVKESGLGLETVFAE

SEQ ID NO: 17479 - protein, 97 aa, Neisseria meningitidis; identical to SEQ ID NO: 910

SEQ ID NO: 17480 - protein, 317 aa, Neisseria meningitidis; identical to SEQ ID NO: 4876

SEQ ID NO: 17481 - protein, 94 aa, Neisseria meningitidis; identical to SEQ ID NO: 973

SEQ ID NO: 17482 - protein, 208 aa, Neisseria meningitidis
MKNIVILISGRGSNMQAIVNAAIHNVRIAAVLSNSETAAGLQWAAERGIPTDSLNHKNFTSRLAFDTAMMEKIDAYQPDLVVLAGFMRILTPEFCARYEGRLMNIHPSILPSFTGLHTHERALEAGCRVAGCTIHFVTAELDCGPIVSQGVVPILDGDTADDIAARVLAVEHKLYPKAVADFAAGRLIIEGNRVRNSENADAARFLTA

SEQ ID NO: 17483 - protein, 313 aa, Neisseria meningitidis; identical to SEQ ID NO: 7029

SEQ ID NO: 17484 - protein, 235 aa, Neisseria meningitidis; identical to SEQ ID NO: 6978

SEQ ID NO: 17485 - protein, 990 aa, Neisseria meningitidis
MNERNQPEVKRNGQYSTIKDKDREREYTHQGTRGGGSVSFNNSDELVSRQSGTAVFGTATYLPPYGKVSGFDADGLEERNNAAGWIRTTRIALAGYSYADVVCRSATGCPKLVYKTQFTFGNSGLAKKANGGGLDIYVDKSRDNSPIYKLKDHPWLGVSFNLSAKGTANDGKTINKFDEKNSNNNLVYTTESGDISLGNRHRETTAMAYYLNAKLHLLDKKQIQNITDKTVQLGVLKPSIDVRQGNTGIAGLLKFWARWDIKDTGQIPVKLGLQQVKAGRCITTPNPNPKSKAPSPALTAPALWFGPVQNGKVQMYSASVSTYPDSSSSRIFLQNLKRKNDPNKPGRYSLADLSENEIKSKEPSFTSRQTVIRLDKGVHQIKLQGNEVANFNGNDGKNDTFGIVSEGSFMPDASEWKKVLLPWTVRASNDDGQFNTFNKEEKDGKPKYSQKYRSRDNGKHERNLGDIVNSPIVAVGEYLATSANDGMVHIFKQSGGDKRSYNLKLSYIPGTMPRKDIQNTESTLAKELRAFAEKSYVGDRYGVDGGFVLRKVERNGKDHVFMFGAMGFGGRGAYALDLSKIDSGNGNLADVSLFDVKHDKNGNNGVKLGYTVGTPQIGKTHDGKYAAFLASGYATKDITSGDNKTALYVYDLESSGTLIKKIEVPGDKGGLSSPTLVDKDLDGTVDIAYAGDRGGSMYRFDLSNQDPNQWSVRAIFEGTKPITSAPAISQLKDKRVVIFGTGSDLSEDDVLSTSEQYIYGIFDDDTVANNVNVKLSGLGGGLLEQELKQEDKTLFLTDYKRSDGSGSKGWVVKLKGGQRVTVKPTVVLRTAFVTIHKYTGTDKCGAETAILGINTADGGKLTKKSARPIVPAENQAVAQYSGHKKGINGKSIPIGCMQKGNEIVCPNGYVYDKPVNVRYLDEKKTDGFSTTADGDAGGSGIDPAGKRSGKNNRCFSQKGVRTLLMNDLDSLDITGPTCGMKRISWREVFY

SEQ ID NO: 17486 - protein, 2233 aa, Neisseria meningitidis
VTGAASVSSARAAFGFRMAAFSVMLALGVAAFSPAPASGIIADKSAPKNQQAVILQTANGLPQVNIQTPSSQGVSVNRFKQFDVDEKGVILNNSRSNTQTQLGGWIQGNPHLARGEARVIVNQIDSSNPSLLNGYIEVGGKRAEVVVANPSGIRVNGGGLINAASVTLTSGVPVLNNGNLTGFDVSSGKVVIGGKGLDTSDADYTRILSRAAEINAGVWGKDVKVVSGKNKLDFDGSLAKTASAPSSSDSVTPTVAIDTATLGGMYADKITLISTDNGAVIRNKGRIFAATGGVTLSADGKLSNSGSIDAAEITISAQTVDNRQGFIRSGKGSVLKVSDGINNQAGLIGSAGLLDIRDTGKSSLHINNTDGTIIAGKDVSLQAKSLDNDGILTAARDVSVSLHDDFAGKRDIEAGRTLTFSTQGRLKNTRIIQAGDTVSLTAAQIDNTVSGKIQSGNRTGLNGKNGITNRGLINSNGITLLQTEAKSDNAGTGRIYGSRVAVEADTLLNREETVNGETKAAVIAARERLDIGAREIENREAALLSSSGDLHIGSALNGSRQVQGANTSLHNRSAAIESSGNIRIATKDLQNTNEHLRFHTEETHREHRIEYQAEGRTERYPEGSQKELGWEIFEDESLHMRTPDGSPHSVWYKYDYERITAESKITESKPGQIISGGNLVLDAAKLKNHNSRIIAGGRLIVGTPESALDNDETLGTKTITDKGDLHRYHRHHKKGRDSTGYSRSPYEPAPEVSSIRMGISAYKGYAPQQASDIPGTVVPVVAENGIHPTFTLPNSSLFAIAPNNKGYLIETDPAFTDYRKWLGSGYMLAALQQDPNHIHKRLGDGYYEQKLVNEQIAKLTGYRRLDGYTNDEEQFKALMDNGITIAKELQLTPGIALSAEQVARLTSDIVWLENETVTLPDGTTQTVLKPKVYVRARPKDMNGQGALLSGSVVDIGSGAIENRGGLIAGREALILNAQNIKNLQGDLQGKNIFAAAGSDITNTGSIGAENALLLKASNNIESRSETRSNQNEQGSVRNIGRVAGIYLTGRQNGSVLLDAGNNIVLTASELTNQSEDGQTVLNAGGDIRSDTTGISRNQNTIFDSDNYVIRKEQNEVGSTIRTRGNLSLNAKGDIRIRAAEVGSEQGRLKLAAGRDIKVEAGKAHTETEDALKYTGRSGGGIKQKMTRHLKNQNGQAVSGTLDGKEIILVSGRDITVTGSNIIADNHTILSAKNNIVLKAAETRSRSAEMNKKEKSGLMGSGGIGFTAGSKKDTQTNRSETVSHTESVVGSLNGNTLISAGKHYTQTGSTISSPQGDVGISSGKISIDAAQNRYSQESKQVYEQKGVTVAISVPVVNTVMGAVDAVKAVQTVGKSKNSRVNAMAAANALNKGVDSGVALYNAARNPKKAAGQGISVSVTYGEQKNTSESRIKGTQVQEGKITGGGKVSLTASGAGKDSRITITGSDVYGGKGTRLKAENAVQIEAARQTHQERSENKSAGFNAGVAIAINKGISFGFTAGANYGKGYGNGDETAYRNSHIGSKDSQTAIESGGDTVIKGGQLKGKGVGVTAESLHIESLQDTAVFKGKQENVSAQVTVGYGFSVGGSYNRSKSSSDYASVNEQSGIFAGGDGYRIRVNGKTGLVGAAVVSDADKSKNLLKTSEIWHKDIQNHASAAASALGLSGGFSYSPKPTSGQYSTKKEAEIGKIGGKPVSLMRFDQVSAKDDELNEKYRSERIEKGETFKEANLNQNNAGGLKFGLKQNDIHSNDKYALAKMGLGNLLGNAKESESRQSITRSVISEGDWQIASAQGRKNIAGIEKGTSSAHKALAKADREGLLKEVELNRDVAKEFINETLIGGIADEAYRSQFIAEHRLMTFKMDENGEPIEDKQLEEDINKQFDNSVKLKKEFASFKDYWEAYKAIGGNIYELREVSDQERKNLKTARYTDPETGKTVEKIVVGVNGIFNNIQAAAKFAAQQYVGRFNPEKNRYERTYENVYFLHNPETNGRGFSKLPEIAVAAFHKMLEGAKIGNKTVIGLSNSGLALGNIMEDYGKDKNGLFVGSHSRGTLVVDNVLNTLNTQANRDKKILSNTELKMVGPAANVVRADKRLFQLQQGVTTPRTADFARQSIQIENHELDLIGMLIGRNPATVGTNTRQKSQWQAIRDIIGDYTSPHNCYGMANKQCVTDGYRDPENKQTQSPTGVFERGVSNEIEIMYRPVRIYDLQHPKGKTK

SEQ ID NO: 17487 - protein, 202 aa, Neisseria meningitidis; identical to SEQ ID NO: 597

SEQ ID NO: 17488 - protein, 324 aa, Neisseria meningitidis; identical to SEQ ID NO: 766

SEQ ID NO: 17489 - protein, 384 aa, Neisseria meningitidis; identical to SEQ ID NO: 7236

SEQ ID NO: 17490 - protein, 864 aa, Neisseria meningitidis; identical to SEQ ID NO: 6372

SEQ ID NO: 17491 - protein, 321 aa, Neisseria meningitidis; identical to SEQ ID NO: 7025

SEQ ID NO: 17492 - protein, 483 aa, Neisseria meningitidis; identical to SEQ ID NO: 7669

SEQ ID NO: 17493 - protein, 753 aa, Neisseria meningitidis; identical to SEQ ID NO: 6904

SEQ ID NO: 17494 - protein, 1144 aa, Neisseria meningitidis; identical to SEQ ID NO: 7159

SEQ ID NO: 17495 - protein, 380 aa, Neisseria meningitidis; identical to SEQ ID NO: 6519

SEQ ID NO: 17496 - protein, 85 aa, Neisseria meningitidis; identical to SEQ ID NO: 6082

SEQ ID NO: 17497 - protein, 796 aa, Neisseria meningitidis
MTEQKHEEYGADSIQVLEGLEAVRKRPGMYIGDTQDGSGLHHMVFEVLDNAIDEALAGHCDKITVTIHADHSVSVADNGRGMPTGIHPKEGRSAAEVIMTVLHAGGKFDNNSYKISGGLHGVGVSVVNALSDWVTLTIYRDGKEHFVRFVRGETEEPLKIVGDSDKKGTTVRFLASTETFGNVEYSFDILAKRIRELSFLNNGVDIELTDERDGKHESFALSGGVAGFVQYMNRKKTPLHEKIFYAFGEKDGMSVECAMQWNDSYQESVQCFTNNIPQRDGGTHLTALRQVMTRTINNYIEANEVAKKAKVETAGDDMREGLTCVLSVKLPDPKFSSQTKDKLVSGEIGPVVNEVISQALTDFLEENPNEAKIITGKIVDAARAREAARKAREITRRKGVMDGLGLPGKLADCQEKDPALSELYLVEGDSAGGSAMQGRDRKFQAILPLKGKILNVEKARFEKMLASQEVATLITALGAGIGKEEFNAEKLRYHRIIIMTDADVDGAHIRTLLLTFFYRQMPELVERGYIYIAQPPLYKAKYGKQERYLKDELEKDQWLLGLALEKAKIISDGRTIEGAELADTAKQFLLAKTVIEQESRFVDELVLRAMLHASPIDLTSSENADKAVAELSGLLDEKEVALERIEGHEGHRFIKITRKLHGNVMVSYIEPKFLNSKAYQTLTQTAAALKGMVGEGAKLYKGENGYDADSFETALDILMSVAQKGMSIQRYKGLGEMNPEQLWETTMDPAVRRLLKVRIEDAIAADEVFVTLMGDEVEPRRAFIENNALIAQNIDA

SEQ ID NO: 17498 - protein, 267 aa, Neisseria meningitidis; identical to SEQ ID NO: 7686

SEQ ID NO: 17499 - protein, 318 aa, Neisseria meningitidis
MKEFDFIKRYLQTGTDNDVVLGIGDDAAIVRPREGFDLCFSADMLLKDRHFFADVKPEDLAWKVLAVNISDMAAMGAIPRWVLLSAALPELDEVWLKRFCGSFFGLAKKFGVTLIGGDTTKGDMAFNVTIIGELPKGRALRRDAAVAGDDIWVSGRIGMAAAALNCRLKRCVLPDEVFAECEQKLLHPEPRVGLGLALLPFARAAQDVSDGLAQDLGHILTASGKGAEIWADSLPSLSVLKDILPRAQWLSYTLAGGDDYELVFTAPESCRSRVFDAAERCGVPVTRIGKINGGCRLKVLDADGRELELHSLGFDHFG

SEQ ID NO: 17500 - protein, 979 aa, Neisseria meningitidis; identical to SEQ ID NO: 7212

SEQ ID NO: 17501 - protein, 248 aa, Neisseria meningitidis; identical to SEQ ID NO: 6565

SEQ ID NO: 17502 - protein, 140 aa, Neisseria meningitidis; identical to SEQ ID NO: 1135

SEQ ID NO: 17503 - protein, 500 aa, Neisseria meningitidis; identical to SEQ ID NO: 8952

SEQ ID NO: 17504 - protein, 575 aa, Neisseria meningitidis; identical to SEQ ID NO: 2951

SEQ ID NO: 17505 - protein, 271 aa, Neisseria meningitidis; identical to SEQ ID NO: 3345

SEQ ID NO: 17506 - protein, 239 aa, Neisseria meningitidis; identical to SEQ ID NO: 6374

SEQ ID NO: 17507 - protein, 1277 aa, Neisseria meningitidis
MTTTTAPQRIREIPYNYTSYTDREIVIRLLGDEAWQILQDLRGQRKTGRSARMLFEVLGDIWVVVRNPYLVDDLLEHPKRRAALVREMRHRLNEIRKRRDDNRQVDVLVAAAEKAVERFDSSFDETSQKRRQILERLSKITKPHNIMFDGLARVTHVTDATDWRVEYPFVVVNPDTEAEIAPLVRALIELDLVIIPRGGGTGYTGGAIPLDANSAVINTEKLDKHRGVEYVELAGLDGKHPIIRCGAGVVTRRVEETAHQAGLVFAVDPTSADASCVGGNVAMNAGGKKAVLWGTALDNLAYWNMVNPQGEWLRIERVRHNFGKIHDEETAVFDVHTLDSDGINIVKTERLEIPGHKFRKVGLGKDVTDKFLSGLPGVQKEGTDGIITSVAFVLHKMPKYTRTVCMEFFGTVATATPSIVEIRDFLLAHESVRLAGLEHLDWRYVRAVGYATKAAGKGRPKMVLLADVVSDDEAAVEAAAEHICELARARDGEGFIAVSPEARKTFWLDRSRTAAIAKHTNAFKINEDVVIPLERLGEYSDGIERINIELSIQNKLKLCAALEQYLSGKLPIDKMGTDLPTAELLGERGKHALAHVSAVKTRWEWLLANLDTPLADYKARYGAAVHAAPEAKNNESCFIAFRDFRLRVSVKADVMKPLSEIFSGKTDTKIIQGLGKIHAKTVRSRVFVALHMHAGDGNVHTNIPVNSDDAEMLQTAYRSVERIMKIARSLNGVISGEHGIGITKLEFLSDEEMQPFWDYKNQVDPKHTFNRHKLMKGSDLRNAYTPSFELLGAESLIMEKSNLGTIADSVKDCLRCGKCKPVCSTHVPRANLLYSPRNKILGVGLLIEAFLYEEQTRRGVSIKHFEELMDIGDHCTVCHRCVKPCPVNIDFGDVTVAVRNYLADSGHKRFAPAAAMGMAFLNATGPKTIKALRAAMIQIGFPAQNFAYKIGKLLPIGTKKQKAEPKATVGKAPIKEQVIHFINRPLPKNVPAKTPRSLLGIEDGKSIPIIRNPAAPEDAEAVFYFPGCGSERLFSQIGLAVQAMLWHVGVQTVLPPGYMCCGYPQDAGGNKAKAEEMSTNNRVAFHRMANTLNYLDIKTVVVSCGTCYDQLEKYRFEEIFPGCRIIDIHEYLLEKGVKLDGVKGQQYLYHDPCHTPIKTMNATQMASSLMGQKVVLSDRCCGESGMFAVKRPDIATQVKFRKQEEIEKNLKELPQGEPVKMLTSCPACLQGLSRYADDNNMPADYIVIEMAKYILGENWLDEFVKKANNGGVEKVLL

SEQ ID NO: 17508 - protein, 124 aa, Neisseria meningitidis
LAEGQKSAVTEYYLNHGEWPGNNSSAGVATSANIKGKYVEKVEVKNGVVTATMLSTGVNKEIKGKKLSLWAKRQDGSVKWFYGQPVKRDNASADAVKADTAANGKQIDTKHLPSTASTRKSTPN

SEQ ID NO: 17509 - protein, 268 aa, Neisseria meningitidis; identical to SEQ ID NO: 7419

SEQ ID NO: 17510 - protein, 117 aa, Neisseria meningitidis; identical to SEQ ID NO: 3438

SEQ ID NO: 17511 - protein, 1007 aa, Neisseria meningitidis
MNAQNLPEVKWGDQYQSLTHKSNEREVIHTSGFGLAKKSISFSFNNTDEVVAEKKDTVVFGAATYLPPYGKVSGFDTAKLTERKNALDQIGTTKTGLVGYSYEGSTCSSGGCPTVAYRTQFTFGNSSLAKKTNGGGLDIYEDKSRDNSPIYKLKDHPWLGVSFNLGGESSFKPKRQGSLVSSFSEDVTQQNGAGSQHKDKNLVYTTDDYKSQNNKNHQDKHHAVAFYLNAKLHLLDKKHIKNIVQGKTVNLGILKTRIEPTEAWKRRNSNFFNGSWTYEEKGTVSVKLKLPEVKAGRCINANNPNKSTKAPSPALTAPALWFGPVQNGKVQMYSASVSTYPDSSSSRIFLQNLKRKNDPNKPGRYSLADLSENEIKSKEPSFTSRQTVIRLDKGVHQIKLQGNEVANFNGNDGKNDTFGIVSEGSFMPDASEWKKVLLPWTVRASNDDGQFNTFNKEEKDGKPKYSQKYRSRDNGKHERNLGDIVNSPIVAVGEYLATSANDGMVHIFKQSGGDKRSYNLKLSYIPGTMPRKDIQNTESTLAKELRAFAEKSYVGDRYGVDGGFVLRKVERNGKDHVFMFGAMGFGGRGAYALDLSKIDSGNGNLADVSLFDVKHDKNGNNGVKLGYTVGTPQIGKTHDGKYAAFLASGYATKDITSGDNKTALYVYDLESSGTLIKKIEVPGDKGGLSSPTLVDKDLDGTVDIAYAGDRGGSMYRFDLSNQDPNQWSVRAIFEGTKPITSAPAISQLKDKRVVIFGTGSDLSEDDVLSTSEQYIYGIFDDDTVANNVNVKLSGLGGGLLEQELKQEDKTLFLTDYKRSDGSGSKGWVVKLKGGQRVTVKPTVVLRTAFVTIHKYTGTDKCGAETAILGINTADGGKLTKKSARPIVPAENQAVAQYSGHKKGINGKSIPIGCMQKGNEIVCPNGYVYDKPVNVRYLDEKKTDGFSTTADGDAGGSGIDPAGKRSGKNNRCFSQKGVRTLLMNDLDSLDITGPTCGMKRISWREVFY

SEQ ID NO: 17512 - protein, 95 aa, Neisseria meningitidis; identical to SEQ ID NO: 589

SEQ ID NO: 17513 - protein, 400 aa, Neisseria meningitidis
MKNYHAPDEKGFFGEHGGLFVSETLIPALQELADAYKAAKNDPEFWEAFRHDLKHYVGRPSPVYHAARLSEHLGGAQIWLKREDLNHTGAHKVNNTIGQALLAKRMGKKRVIAETGAGQHGVASATVAARFGMTCDVYMGADDIQRQMPNVFRMKLLGANVVGVESGSRTLKDAMNEAMREWVARVDDTFYIIGTAAGPAPYPEMVRDFQCVIGNEAKAQMQEAIGRQPDVAVACVGGGSNAIGLFHPYIGEENVRLVGVEAGGLGVNTPDHAAPITSGSPIGVLHGFRSYLMQDENGQVLGTHSVSAGLDYPGIGPEHSHLHDIKRVEYTVAKDDEALEAFDLLCRFEGIIPALESSHAVAWAVKNAPKMGKDQVILVNLSGRGDKDINTVAKLKGIKL

SEQ ID NO: 17514 - protein, 200 aa, Neisseria meningitidis; identical to SEQ ID NO: 7297

SEQ ID NO: 17515 - protein, 193 aa, Neisseria meningitidis; identical to SEQ ID NO: 3067

SEQ ID NO: 17516 - protein, 79 aa, Neisseria meningitidis; identical to SEQ ID NO: 831

SEQ ID NO: 17517 - protein, 208 aa, Neisseria meningitidis
MTQERLPEFFDRAPTLTVQDPLAAFLGAAENGILTYRYADAVRLCGHSCPTVAGAYLMVIKGLKALYGEELPERGGIEAAMQGARDEGTVGVTASVVQLLTGAAPETGFGGIGMQGRFARRNLLSFGAGEINGTLTLRRKDNGKTVAVSLNAALQPFAPEMRELMPKTVGGSASAEELERFGQLWQARVKAFLTESADDPQFVIVREV

SEQ ID NO: 17518 - protein, 371 aa, Neisseria meningitidis; identical to SEQ ID NO: 7259

SEQ ID NO: 17519 - protein, 99 aa, Neisseria meningitidis
VLKNGQFALFCKGTQPIGYISWAYFDEVAQAHYLESDRHLRDNSDWNCGDNIWLIQWFAPLGHSHQMRSAVRQLFPSTTVRALYHKGSDKGLRILTFKT

SEQ ID NO: 17520 - protein, 76 aa, Neisseria meningitidis; identical to SEQ ID NO: 2262

SEQ ID NO: 17521 - protein, 354 aa, Neisseria meningitidis; identical to SEQ ID NO: 7087

SEQ ID NO: 17522 - protein, 143 aa, Neisseria meningitidis; identical to SEQ ID NO: 7535

SEQ ID NO: 17523 - protein, 470 aa, Neisseria meningitidis
LLFEFKENKMIVASRWPLLEKVFLRFGMPVAVVDLESTGGNLYEDRVTEVALVKFEQGRVVRHEWLVNPQKPIPQFVAGLTGISDGMVADAPVFAEIAGELFSVLKGCVLVAHNSRFDYTFLKHEFHRAGIGFSSPALCSVQLSRCLYPQFYKHSLDSIIERLGIVVEDRHRAMADVSALCDYLEYSLSEHGVEAWIRQCFRLMNPKPLPAALPERLREQLYGLPDGMGVLACFDGGGKVNYIGTFERVYSEISALLDSGKAPFDWCNTEEVRFFPALGSLHAYKIKAELVGRYHSDCYVSAKNLLKTFTTVRFEKGSDGMLNAKTAALKNGVTDNPPTGLFANKKAARRALSSWAETYGLCPAAAGILPDGYAEDEPCPVYVSGRCDKACGRSDEQVLAFAHKLPVLDWGKMHEVEITETDPLTGEKVVLHGMGGALEMDDGLWYFDKDLPDAFKAKFKTDRKNIKEIG

SEQ ID NO: 17524 - protein, 410 aa, Neisseria meningitidis; identical to SEQ ID NO: 446

SEQ ID NO: 17525 - protein, 291 aa, Neisseria meningitidis
MPTVRFTESVSKQDLDALFEWAKASYGAESCWKTLYLNGLPLGNLSPEWVERVKKDWEAGCSESSDGIFLNADGWPDMGGRLQHLALGWHCAGLLDGWRNECFDLTDGGGNPLFTLERAAFRPFGLLSRAVHLNGLTESDGRWHFWIGRRSPHKAVDPNKLDNTAAGGVSGGEMPSEAVCRESSEEAGLDKTLLPLIRPVSQLHSLRSVSRGVHNEILYVFDAVLPETFLPENQDGEVAGFEKMDIGGLLDAMLSGNMMHDAQLVTLDAFCRYGLIDAAHPLSEWLDGIRL

SEQ ID NO: 17526 - protein, 117 aa, Neisseria meningitidis; identical to SEQ ID NO: 545

SEQ ID NO: 17527 - protein, 279 aa, Neisseria meningitidis; identical to SEQ ID NO: 343

SEQ ID NO: 17528 - protein, 187 aa, Neisseria meningitidis
MTDLETKRLETQAMLENADLLFDQGQCRAALQKVADEITRDLGGKYPLLLPVMGGAVVFTGQLLPLLRFPLDFDYVHVSRYGDKLEGGAFNWKRMPDAEQIRGRHVVVLDDILDEGHTMSAIQAKLLEMGAASCRAAVFANKLIDKPKPIRADYVGLDVPNRYVFGYGMDAAGCWRNLGEIYALGGK

SEQ ID NO: 17529 - protein, 315 aa, Neisseria meningitidis; identical to SEQ ID NO: 1791

SEQ ID NO: 17530 - protein, 370 aa, Neisseria meningitidis
MSTFFRQTAQAMIAKHINRFPLLKLDQVIDWQPIEQYLNRQKTRYLRDHRGRPAYPLLSMFKAVLLGQWHSLSDPELEHSLITRIDFNLFCRFDELSIPDYSTLCRYRNRLAQDDTLSELLELINRQLTEKGLKVEKASAAVVDATIIQTVGSKQRQAIEVDEEGQINGQTTPSKDSDARWIKKNGLYKLGYKQHTRTDAEGYIEKLHITPANAHECKHLPPLLEGLPKGTTVYADKGYDSAENRQHLEEHQLQDGIMRKACRNRPLTETQTKRNRYLSKTRYSGLNLNQDKATKPQTVQIVRQGEATPYWFKFNPLYVVEQSFGTLHRKFRYARAAYFGLIKVSAQSHLKAMCLNLLKAANRLSAPAAA

SEQ ID NO: 17531 - protein, 291 aa, Neisseria meningitidis; identical to SEQ ID NO: 7634

SEQ ID NO: 17532 - protein, 160 aa, Neisseria meningitidis; identical to SEQ ID NO: 1762

SEQ ID NO: 17533 - protein, 265 aa, Neisseria meningitidis; identical to SEQ ID NO: 7180

SEQ ID NO: 17534 - protein, 288 aa, Neisseria meningitidis; identical to SEQ ID NO: 464

SEQ ID NO: 17535 - protein, 369 aa, Neisseria meningitidis; identical to SEQ ID NO: 7068

SEQ ID NO: 17536 - protein, 446 aa, Neisseria meningitidis; identical to SEQ ID NO: 6769

SEQ ID NO: 17537 - protein, 266 aa, Neisseria meningitidis; identical to SEQ ID NO: 6807

SEQ ID NO: 17538 - protein, 69 aa, Neisseria meningitidis; identical to SEQ ID NO: 5143

SEQ ID NO: 17539 - protein, 146 aa, Neisseria meningitidis
MMQTFRKISLYAATLWLGMQIMAGYIAAPVLFKMLPKMQAGEIAGVLFDILSWSGLAVWGAVLAAAFAALTRRQTALLLFLLSALAANQFLVTPVIEALKYGHENWLLSFVGGSFGMWHGISSIVFMAAALLSIYLSWRLSGKDAV

SEQ ID NO: 17540 - protein, 505 aa, Neisseria meningitidis; identical to SEQ ID NO: 6076

SEQ ID NO: 17541 - protein, 165 aa, Neisseria meningitidis; identical to SEQ ID NO: 2055

SEQ ID NO: 17542 - protein, 372 aa, Neisseria meningitidis
LGGRFQAVEYTNKKKSRGTAAGASKVEVKANGNIEHQLASFTADYPNSWENSANLDANIKVNSLALSDTLGFVDNKYRLTLGGRFQTVEYTDKKSQSGDAKRFSPMLMAAWVPQPDLVVYGNYMEDLEPADIKTDDSGETTMAKPRVSRQFEVGVRKNWGNFVTTLNAFQIKRPGYWRGHTTTKTTKGVTTTLTYGNNSDFARYKAQGGAAGDEQGMERNRGIEFNTYANLLNNTLRPTLGLMYLQSTVKEYPNSRDMLVNGVQVANPRVIAKAGLEWDTPFAKGLTLNGNVSYFGKSDQDTQKQYAFPSYTLIDVGARYKTKLGKNTLTVSSSVENLFNKNYWQVQRGQYDRSFAVVGMPRTYWLKAELDF

SEQ ID NO: 17543 - protein, 234 aa, Neisseria meningitidis; identical to SEQ ID NO: 6426

SEQ ID NO: 17544 - protein, 128 aa, Neisseria meningitidis; identical to SEQ ID NO: 6883

SEQ ID NO: 17545 - protein, 397 aa, Neisseria meningitidis; identical to SEQ ID NO: 103

SEQ ID NO: 17546 - protein, 261 aa, Neisseria meningitidis; identical to SEQ ID NO: 335

SEQ ID NO: 17547 - protein, 305 aa, Neisseria meningitidis; identical to SEQ ID NO: 1198

SEQ ID NO: 17548 - protein, 504 aa, Neisseria meningitidis
MTTSKCPVTHLTMNNGAPVADNQNSLTAGPRGPLLAQDLWLNEKLADFVREVIPERRMHAKGSGAFGTFTVTHDITKYTRAKIFSEVGKKTEMFARFTTVAGERGAADAERDIRGFALKFYTEEGNWDVVGNNTPVFFLRDPRKFPDLNKAVKRDPRTNMRSATNNWDFWTLLPEALHQVTIVMSDRGIPAGYRHMHGFGSHTYSFWNEAGERFWVKFHFRTQQGIKNLTNEEAAKIIADDRESHQRDLYEAIERGEFPKWTMYIQVMPEADAEKVPYHPFDLTKVWPKKDYPLIEVGEFELNRNPENFFADVEQSAFAPSNLVPGVGASPDKMLQARLFNYADAQRYRLGVNFRQIPVNRPRCPVHSNQRDGQGRADGNYGSLPHYEPNSFGQWQQQPDFAEPPLKINGDAAHWDYRQDDDDYFSQPRALFNLMNDAQKQALFGNTAAAMGDAPDFIKYRHIRNCYRCDPAYGEGVAKALGLTVEDAQAARATDPALGQAGLL

SEQ ID NO: 17549 - protein, 389 aa, Neisseria meningitidis
MSKKLHPQTLAIRGGKEQTEYREHNQALFLTSSFMWDNAQHAADLFSKKIKGFTYTRTANPTTAAFEKRIAALEGAERAVATSAGMSAIQAAFFTFLQAGDHVISSRSLFGTTVGFINNIVAKFGIEVSHVSPTDINEWKAAVKANTKLLFLETPSNPLGEVADLEALAELAHGIGALLVVDNSLLSPVGSQPLKHGADISVSSATKAIDGHGRVMGGVLAGSEELLAQVAMYCNSCGLAMSPFNAWQLLSGVETLSLRMEKQFDNALKIAQWLQAQPQVQAVYYTGLSDHPQAALIRKQQNGGGIVIGFEVADQEAAWKVVDGVELFSRTANLGDVRSTITHPWTTTHGRMQPEEKLAANIRPGLVRLSVGLEYVGDLIDDLKQALAR

SEQ ID NO: 17550 - protein, 430 aa, Neisseria meningitidis; identical to SEQ ID NO: 6971

SEQ ID NO: 17551 - protein, 389 aa, Neisseria meningitidis; identical to SEQ ID NO: 6784

SEQ ID NO: 17552 - protein, 321 aa, Neisseria meningitidis
MSYTQLTQGERYHIQYLSRHCTVTEIAKQLNRHKSTISREIRRHRTQGQQYSAEKAQRQSRTIKQRKRQPYKLDSQLIQHIDPFIRRKLSPEQVCAYLCKHHQITLHHSTIYRYLRQDKSNGSTLWQHLRICSKPYRKRYGSTWTRGKVPNRVGIENRPAIVDQKSRIGDWEADTIVGKGQKSALLTLVERVTRYTIICKLDSLKAEDTARAAVRALKAHKDRVHTITMDNGKEFYQHTKITKALKAETYFCRPYHSWEKGLNENTNGLIRQYFPKQTDFRNISDREIRRVQDELNHRPRKTLGYETPSVLFLNLFQPLVP

SEQ ID NO: 17553 - protein, 485 aa, Neisseria meningitidis; identical to SEQ ID NO: 6202

SEQ ID NO: 17554 - protein, 82 aa, Neisseria meningitidis; identical to SEQ ID NO: 3017

SEQ ID NO: 17555 - protein, 84 aa, Neisseria meningitidis; identical to SEQ ID NO: 6902

SEQ ID NO: 17556 - protein, 488 aa, Neisseria meningitidis; identical to SEQ ID NO: 7364

SEQ ID NO: 17557 - protein, 183 aa, Neisseria meningitidis; identical to SEQ ID NO: 1696

SEQ ID NO: 17558 - protein, 155 aa, Neisseria meningitidis
MAQTRREAKAEIIPFQAPTLPVAPVYSPPQLTGPNAFDFRRMETDKKGENAPDTKRIKETLEKFSLENMRYVGILKSGQKVSGFIEAEGYVYTVGVGNYLGQNYGRIESITDDSIVLNELIEDSTGNWVSRKAELLLNSSDKNTEQAAAPAAEQN

SEQ ID NO: 17559 - protein, 321 aa, Neisseria meningitidis; identical to SEQ ID NO: 6149

SEQ ID NO: 17560 - protein, 158 aa, Neisseria meningitidis
MEHLFGKWLPDLPTPISDGISLPMVRLLHTRSLTAALRALPHTFSVELLKLGELETECGGRLVREVLLKLDGIPVVAARSECRIGSAFWQNILDCGTRPLGERLFQADLEGARSAFEFAVSGEGCGRYFAARRSRFSRHGEEMLLTEYFLPELKRFIG

SEQ ID NO: 17561 - protein, 658 aa, Neisseria meningitidis; identical to SEQ ID NO: 6621

SEQ ID NO: 17562 - protein, 388 aa, Neisseria meningitidis; identical to SEQ ID NO: 7585

SEQ ID NO: 17563 - protein, 285 aa, Neisseria meningitidis; identical to SEQ ID NO: 13923

SEQ ID NO: 17564 - protein, 316 aa, Neisseria meningitidis; identical to SEQ ID NO: 6611

SEQ ID NO: 17565 - protein, 171 aa, Neisseria meningitidis; identical to SEQ ID NO: 6461

SEQ ID NO: 17566 - protein, 171 aa, Neisseria meningitidis; identical to SEQ ID NO: 7184

SEQ ID NO: 17567 - protein, 442 aa, Neisseria meningitidis; identical to SEQ ID NO: 6493

SEQ ID NO: 17568 - protein, 349 aa, Neisseria meningitidis; identical to SEQ ID NO: 6547

SEQ ID NO: 17569 - protein, 312 aa, Neisseria meningitidis; identical to SEQ ID NO: 6959

SEQ ID NO: 17570 - protein, 274 aa, Neisseria meningitidis; identical to SEQ ID NO: 7393

SEQ ID NO: 17571 - protein, 107 aa, Neisseria meningitidis
MDNCIFCKIAAKDIPAQTVYEDGEMVCFKDINPAAPVHLLLIPKVHFDSLAHAAPEHQMLLGKMMLKVPEIAKAAGLADGFKTLINTGKGGGQEVFHLHIHIMGTPV

SEQ ID NO: 17572 - protein, 428 aa, Neisseria meningitidis; identical to SEQ ID NO: 10889

SEQ ID NO: 17573 - protein, 107 aa, Neisseria meningitidis; identical to SEQ ID NO: 7198

SEQ ID NO: 17574 - protein, 94 aa, Neisseria meningitidis; identical to SEQ ID NO: 6698

SEQ ID NO: 17575 - protein, 349 aa, Neisseria meningitidis; identical to SEQ ID NO: 328

SEQ ID NO: 17576 - protein, 668 aa, Neisseria meningitidis
MADMKKITPQNLRPLLSESLGHTDFVNVLNALIKFLRRGGKKCAGERFDLIIDTFKQDRELLSRFSRCFYIWLAQIHIYPALIKLGIFSRHSFAREMGIRIYERFSPSYKDFANLGEVFLYLFHSENDDKWLQTLNIRQWLVLYELIRSHAEPSKLQTAGIRLADARLRAIEMLSVWTASEAIEPDLIRIAPRLLEADSSFVALQRETAKLVEHYRNGTTPYDTAHLEVMFDQCFSQIDYLRRKGTGAGSGSSVKVAHLLERLRQTVDRLKLLTDIQTGAGNSNRLTIALMNSLIYAAVEQYSTRHLRRSSIRMLARSITENKSHHGEHYITRNRKEYFKMFYSAAGGGIIIALMALLKIRIGSLGLSPFLTSLSAGFNYGIGFMIIHMLHCTVATKQPAMTAASFAEQVDLNEGGKAVDNKLAKLLIDVCRSQSVAVFGNVSIAILLACAISFGYAHLYRLPILDAHTAAYQFKSIDIIAYPTLWYAAIAGLWLFCSGIIAGFFDNRADYLNLRQRLPFNPLLRKIMRPGPRRVLAAYIHKHYGSLVGNFIFGMLLGMTGYFGHLLGLPLDIRHVAFSSANLGYAAVSGNVGLGTFVLGIFSVLAIGLVNLCVSFSLALFVALRSRGTKIGSIRNLIKSFWNQIKSNPCILFLPPAKEQGHPPSDKP

SEQ ID NO: 17577 - protein, 296 aa, Neisseria meningitidis
MNPKSPLFLRLSDRLDVYLRLMRADKPIGALLLLWPTYWALWLASDGIPDLAVLAAFTIGTFLMRSAGCVINDFADRDFDGAVERTKNRPFAQGRVKKKEALLLTAFLCLLAALCLIPLNHLTWLMSLPALFLALTYPFTKRFFPIPQLYLGLAFSFGIPMAFAAVAGNVLPQAWILFAANVLWTLAYDTVYAMADKEDDLKIGIKTSAVTFGRYDIAAVMLCHGGFTLLMAVLGAVIGAAWAYWTAIPIVLLLQYRQYAAIKSRVRQICFETFLANNRIGWVWFTAIFAHTFFAK

SEQ ID NO: 17578 - protein, 228 aa, Neisseria meningitidis; identical to SEQ ID NO: 4638

SEQ ID NO: 17579 - protein, 76 aa, Neisseria meningitidis; identical to SEQ ID NO: 6364

SEQ ID NO: 17580 - protein, 498 aa, Neisseria meningitidis; identical to SEQ ID NO: 6669

SEQ ID NO: 17581 - protein, 320 aa, Neisseria meningitidis
MPSISVRRLFDDNQYKLQLAWAAGNSGADNRIGVEADKPVLALVGHLNFIHPNQIQVVGLAESEYLNRLESGETGYQFGDLFDISMSLVIVANGLPVSPGLRDYCHKNDIPLLTSKLESPYLMDVLRIYLQRTLAASSVKHGVFLDVFEIGVLITGHSGLGKSELALELISRGHSLIADDAVELFRIGPETLEGRCSPMLRDFLEVRGLGILNIRHIFGETSIRPKKILQLIINLVEADDEYMKQLDRLSIRTETESILNVNVRSVTLPVAVGRNLAVLVEAAVRNYILQLRGKDSTREFLERHQTQLKENEQHNENRPD

SEQ ID NO: 17582 - protein, 876 aa, Neisseria meningitidis; identical to SEQ ID NO: 6812

SEQ ID NO: 17583 - protein, 257 aa, Neisseria meningitidis
MRPYATTIYQLFILFIGSVFTMTSCEPVNEQTSFNNPEPMTGFEHTVTFDFQGTKMVIPYGYLARYTQDNATKWLSDTPGQDAYSINLIEISVYYKKTDQGWVLEPYNQQNKAHFIQFLRDGLDSVDDIVIRKDACSLSTTMGERLLTYGVKKMPSAYPEYEAYEDKRHIPENPYFHEFYYIKKGENPAIITHWNNRVNQAEEDNYSTSVGSCINGFTVQYYPFIREKQQLTQQELVGYHQQVEQLVQSFVNNSSKK

SEQ ID NO: 17584 - protein, 74 aa, Neisseria meningitidis; identical to SEQ ID NO: 801

SEQ ID NO: 17585 - protein, 47 aa, Neisseria meningitidis; identical to SEQ ID NO: 7066

SEQ ID NO: 17586 - protein, 305 aa, Neisseria meningitidis; identical to SEQ ID NO: 6805

SEQ ID NO: 17587 - protein, 71 aa, Neisseria meningitidis; identical to SEQ ID NO: 1238

SEQ ID NO: 17588 - protein, 107 aa, Neisseria meningitidis; identical to SEQ ID NO: 7371

SEQ ID NO: 17589 - protein, 248 aa, Neisseria meningitidis; identical to SEQ ID NO: 7207

SEQ ID NO: 17590 - protein, 274 aa, Neisseria meningitidis; identical to SEQ ID NO: 13554

SEQ ID NO: 17591 - protein, 494 aa, Neisseria meningitidis; identical to SEQ ID NO: 7079

SEQ ID NO: 17592 - protein, 134 aa, Neisseria meningitidis; identical to SEQ ID NO: 6069

SEQ ID NO: 17593 - protein, 233 aa, Neisseria meningitidis; identical to SEQ ID NO: 3223

SEQ ID NO: 17594 - protein, 321 aa, Neisseria meningitidis
MSHTQLTQGERYHIQYLSRHCTVTEIAKQLNRHKSTISREIRRHRTQGQQYSAEKAQRQSQTIKQRKRQPYKLDSQLIQHIDTLIRRKLSPEQVCAYLCKHHQITLHHSTIYRYLRQDKSNGSTLWQHLRICSKPYRKRYGSTWTRGKVPNRVGIENRPAIVDQKSRIGDWEADTIVGKGQKSALLTLVERVTRYTIICKLDSLKAEDTARAAVRALKAHKDRVHTITMDNGKEFYQHTKITKALKAETYFCRPYHSWEKGLNENTNGLIRQYFPKQTDFRNISDREIRRVQDELNHRPRKTLGYETPSVLFLNLFQPLIH

SEQ ID NO: 17595 - protein, 233 aa, Neisseria meningitidis; identical to SEQ ID NO: 7461

SEQ ID NO: 17596 - protein, 278 aa, Neisseria meningitidis; identical to SEQ ID NO: 6923

SEQ ID NO: 17597 - protein, 392 aa, Neisseria meningitidis
MTGRTGRNGSTQAQPERVMLVGVMLDKDGTGSSATRLNGFQTALAEAVELVKAAGGDSVRVETAKRDRPHTALFVGTGKAAELSEAVAADGIDLVVFNHELTPTQERNLEKELKCRVLDRVGLILAIFARRARTQEGRLQVELAQLSHLAGRLIRGYGHLQSQRGGIGMKGPGETKLETDRRLIAHRINALKKQLANLKKQRALRRKSRESGTIKTFALVGYTNVGKSSLFNRLTKSGIYAKDQLFATLDTTARRLYISPECSIILTDTVGFVSDLPHKLISAFSATLEETAQADVLLHVVDAAAPNSGQQIEDVENVLQEIHAGDIPCIKVYNKTDLLPSEEQNTGIWRDAAGKIAAVRISVAENTGIDALREAIAESCAAAPNTDETEMP

SEQ ID NO: 17598 - protein, 474 aa, Neisseria meningitidis; identical to SEQ ID NO: 5995

SEQ ID NO: 17599 - protein, 916 aa, Neisseria meningitidis; identical to SEQ ID NO: 7204

SEQ ID NO: 17600 - protein, 606 aa, Neisseria meningitidis; identical to SEQ ID NO: 5905

SEQ ID NO: 17601 - protein, 469 aa, Neisseria meningitidis; identical to SEQ ID NO: 7183

SEQ ID NO: 17602 - protein, 67 aa, Neisseria meningitidis; identical to SEQ ID NO: 7480

SEQ ID NO: 17603 - protein, 216 aa, Neisseria meningitidis
MAQYIFGARNKIHIVNLEKTLPMFQDAQEAVRRLVANKGTVLFVGTKRQARDIIREEATRAGMPFVDYRWLGGMLTNYKTVKQSIKRLEEKTAALENAAESGFSKKEILEMQRDVEKLERSLGGIKNMKGLPDAIFVIDTGYQKGTLVEAEKLGIPVIAVVDTNNSPDGVKYVIPGNDDSAKAIRLYCRGIADAVLEGKNQALQETVAAAQEAAAE

SEQ ID NO: 17604 - protein, 281 aa, Neisseria meningitidis; identical to SEQ ID NO: 3006

SEQ ID NO: 17605 - protein, 152 aa, Neisseria meningitidis; identical to SEQ ID NO: 5260

SEQ ID NO: 17606 - protein, 112 aa, Neisseria meningitidis; identical to SEQ ID NO: 3481

SEQ ID NO: 17607 - protein, 526 aa, Neisseria meningitidis
MSSIKRALISLSDKTGAVEFAQTLHKLGVEILSTGGTAKLLADAGVPVIEVADYTGFPEMLDGRVKTLHPKIHGGILGRRDLDEHVAKMEEHGIGNIDLVCVNLYPFAATIAKPNCTLEDAIENIDIGGPTMVRSAAKNWKHVAIVTDTADFPAIAAELEANNGALSDKTRFNLSRKAFSHTAQYDGMISNYLTSLSDDVLSGTPEIAGFPGRFNQSWIKVQDMRYGENPHQRAAFYRDIDPAAGSLAAYKQLQGKELSYNNIADADAAWEAVKSFDVPACVIVKHANPCGVAIASNTLDAYKLAYATDTTSAFGGIIAFNREVDGATVKQITDNQFMEVLMAPKFTAEALEIAAAKKNVRVLEVPLEAGANRFELKRVGGGLLVQTPDIHRISRADLKVVSKRQPTEQEWNDLLFVWNVAKYVKSNAIVFGKGGQTYGIGAGQMSRVDSTRIAARKAQDAGLDLNGACAASDAFFPFRDGVDVIAEQGIKAIIHPAGSMRDQEVFDAADEHGIAMVVTGIRHFRH

SEQ ID NO: 17608 - protein, 55 aa, Neisseria meningitidis; identical to SEQ ID NO: 7238

SEQ ID NO: 17609 - protein, 336 aa, Neisseria meningitidis; identical to SEQ ID NO: 6647

SEQ ID NO: 17610 - protein, 210 aa, Neisseria meningitidis; identical to SEQ ID NO: 48

SEQ ID NO: 17611 - protein, 336 aa, Neisseria meningitidis; identical to SEQ ID NO: 6728

SEQ ID NO: 17612 - protein, 366 aa, Neisseria meningitidis; identical to SEQ ID NO: 6349

SEQ ID NO: 17613 - protein, 54 aa, Neisseria meningitidis; identical to SEQ ID NO: 6606

SEQ ID NO: 17614 - protein, 167 aa, Neisseria meningitidis; identical to SEQ ID NO: 189

SEQ ID NO: 17615 - protein, 244 aa, Neisseria meningitidis; identical to SEQ ID NO: 7175

SEQ ID NO: 17616 - protein, 397 aa, Neisseria meningitidis; identical to SEQ ID NO: 5952

SEQ ID NO: 17617 - protein, 241 aa, Neisseria meningitidis
MRIPLLAPDNYAFPDPAYALARCDGLVGVSGDLDTGRLLEAYRNGVFPWFSRDGWFFWYAVGPRAVIVPERLHVPRSLAKTLRNGSYRVAVNGCFAEVVAHCAAAARPNQDGTWIAPEFQTAYLKLHEMGYAHSFECHYPDESGETRLAGGFYGVQIGSVFYGESMFALQPDASKIAFACAVPFLADLGVELIDCQQDTEHMRRFGSELLPFADFAERLRMLNAVPLKEEIGRREVACKGL

SEQ ID NO: 17618 - protein, 109 aa, Neisseria meningitidis; identical to SEQ ID NO: 4604

SEQ ID NO: 17619 - protein, 286 aa, Neisseria meningitidis; identical to SEQ ID NO: 6265

SEQ ID NO: 17620 - protein, 125 aa, Neisseria meningitidis
MCELKNFRRNITCFEGYDENSFIGKWYDDGVWDDEEYWKLENDLIEVRKKYPYPMDIPRYVVIGIGTIIDFLMVPNWKLFEIKASPWLPDSVGIHERYERFTTMLRYIFTEKDIVNVRFDYYNKK

SEQ ID NO: 17621 - protein, 310 aa, Neisseria meningitidis; identical to SEQ ID NO: 714

SEQ ID NO: 17622 - protein, 225 aa, Neisseria meningitidis; identical to SEQ ID NO: 7182

SEQ ID NO: 17623 - protein, 385 aa, Neisseria meningitidis; identical to SEQ ID NO: 6747

SEQ ID NO: 17624 - protein, 94 aa, Neisseria meningitidis; identical to SEQ ID NO: 944

SEQ ID NO: 17625 - protein, 92 aa, Neisseria meningitidis; identical to SEQ ID NO: 419

SEQ ID NO: 17626 - protein, 208 aa, Neisseria meningitidis; identical to SEQ ID NO: 4867

SEQ ID NO: 17627 - protein, 356 aa, Neisseria meningitidis; identical to SEQ ID NO: 5919

SEQ ID NO: 17628 - protein, 153 aa, Neisseria meningitidis; identical to SEQ ID NO: 6963

SEQ ID NO: 17629 - protein, 296 aa, Neisseria meningitidis
METQDDDTVKVWGYASSEEIDSDGEVIAAAAMKAAIPDYMKFGAGREMHGSNAAGTAIEINVEDDGRTFFVAHIVDPVAVTKVKTGVYKGFSIGGSVTAHDELNKSQITGLKLTEISLVDRPANPDAVSTCFKADKGAEAVNNDTEHNATYFSHFPSKQKSTDGGRCPFLYRFPYFLSAGSTGLAGAFGAGAPTEAWSFSFASTAGPMPFTLVKSSTDLNAPFCARYSAMAFAFAGPMPGSASNSCCEAALMFTAAREKAQENSIQNSTNIFFMVFPLRVANNKPHLATIKRVILK

SEQ ID NO: 17630 - protein, 118 aa, Neisseria meningitidis; identical to SEQ ID NO: 7534

SEQ ID NO: 17631 - protein, 354 aa, Neisseria meningitidis; identical to SEQ ID NO: 7532

SEQ ID NO: 17632 - protein, 216 aa, Neisseria meningitidis; identical to SEQ ID NO: 7459

SEQ ID NO: 17633 - protein, 940 aa, Neisseria meningitidis
MNKKHSFPLTLTALAIATAFPSYAANSETAAQTQSLKEVTVRAAKVGRRSKEVTGLGKIVKTSETLNKEQVLGIRDLTRYDPGVAVVEQGNGASGGYSIRGVDKNRVAVSVDGVAQIQAFTVQGSLSGYGGRGGSGAINEIEYENISTVEIDKGAGSSDHGSGALGGAVAFRTKEAADLISDGKSWGIQAKTAYGSKNRQFMKSLGAGFSKDGWEGLLIRTERQGRETRPHGDIADGVEYGIDRLDAFRQTYDIQKQNKKAEYFLAEGESELKPAAKLAGNGNYLKNQLNRWVEERKKNNQSLSAEEEAMVREAQARHENLSAQAYTGGGRILPDPMDYRSGSWLAKLGYRFGGRHYVGGVFEDTKQRYDIRDMTEKQYYGTDEAKKFSDKSGVYDGDDFRDGLYFVPNIEEWKGDKNLVKGIGLKYSRTKFIDEHHRRRRMGLLYRYENEAYSDNWADKAVLSFDKQGVATDNNTLKLNCAVYPSVDKACRASADKPYSYDSSDRFHYREQHNVLNALFEKSLKNKWTKHHLTLGFGYDASKAVSRPEQLSHNAARISEFSDYADDGKYKYLLGKPEVVEGSVCGYIETLRSRKCVPRKINGSNIHISLNDRFSIGKYFDFSLGGRYDRQNFTTSEELVRSGRYTDRSWNSGIVFKPSRHLSLSYRASSGFRTPSFQELFGIDIYHDYPKGWQRPALKSEKAANREIGLQWKGDFGFLEISSFRNRYTDMIAVADHKTKLPNQAGRLTEIDIRDYYNAQNMSLQGVNILGKIDWNGVYGKLPEGLYTTLAYNRIKPKSVSNRPDLSLRSYALDAVQPSRYVLGFGYDQPEGKWGANIMLTYSKGKNPDELAYLAGDQKRYSTKRASSSWSTADVSAYLNLKKRLTLRAAIYNIGNYRYVTWESLRQTAESTANRHGGDSNYGRYAAPGRNFSLALEMKF

SEQ ID NO: 17634 - protein, 82 aa, Neisseria meningitidis; identical to SEQ ID NO: 1233

SEQ ID NO: 17635 - protein, 859 aa, Neisseria meningitidis; identical to SEQ ID NO: 6242

SEQ ID NO: 17636 - protein, 129 aa, Neisseria meningitidis
MKNVQKGFTLLELMIAVAILGILTLITYPSYKTYIRRVRLSEVRTTLLHNAQTMERYYRQKGTFKTYDKNKLKQNEYFDITLSEVSPDHFTLKATPNPTTNDGETCVVTLNDGGTIAASDTNQSCPGFD

SEQ ID NO: 17637 - protein, 123 aa, Neisseria meningitidis; identical to SEQ ID NO: 1296

SEQ ID NO: 17638 - protein, 281 aa, Neisseria meningitidis; identical to SEQ ID NO: 5932

SEQ ID NO: 17639 - protein, 146 aa, Neisseria meningitidis; identical to SEQ ID NO: 6964

SEQ ID NO: 17640 - protein, 166 aa, Neisseria meningitidis; identical to SEQ ID NO: 1240

SEQ ID NO: 17641 - protein, 451 aa, Neisseria meningitidis; identical to SEQ ID NO: 7806

SEQ ID NO: 17642 - protein, 604 aa, Neisseria meningitidis
MPAETTVSGAHPAAKLPIYILPCFLWIGIVPFTFALKLKPSPDFYHDAAAAAGLIVLLFLTAGKKLFDVKIPAISFLLFAMAAFWYLQARLMNLIYPGMNDIVSWIFILLAVSAWACRSLVAHFGQERIVTLFAWSLLIGSLLQSCIVVIQFAGWEDTPLFQNIIVYSGQGVIGHIGQRNNLGHYLMWGILAAAYLNGQRKIPAALGVICLIMQTAVLGLVNSRTILTYIAAIALILPFWYFRSDKSNRRTMLGIAAAVFLTALFQFSMNTILETFTGIRYETAVERVANGGFTDLPRQIEWNKALAAFQSAPIFGHGWNSFAQQTFLINAEQHNIYDNLLSNLFTHSHNIVLQLLAEMGISGTLLVAATLLTGIAGLLKRPLTPASLFLICTLAVSMCHSMLEYPLWYVYFLIPFGLMLFLSPAEASDGIAFKKAANLGILTASAAIFAGLLHLDWTYTRLVNAFSPATDDSAKTLNRKINELRYISANSPMLSFYADFSLVNFALPEYPETQTWAEEATLKSLKYRPHSATYRIALYLMRQGKVAEAKQWMRATQSYYPYLMPRYADEIRKLPVWAPLLPELLKDCKAFAAAPGHPEAKPCK

SEQ ID NO: 17643 - protein, 146 aa, Neisseria meningitidis
MPKATFYTHVAQVPIFTCRLIARAIRDGGRILVWSDSFGQLQELDKMLWQYEAESFIPHEIWETEEAMPSEPSVLLACGGNLPRIPEGMTVLNLSDGFWNTAPVLPARVLEIVGNSLEELADARERFTAYRRSGFAIEHHGMEGKA

SEQ ID NO: 17644 - protein, 329 aa, Neisseria meningitidis; identical to SEQ ID NO: 247

SEQ ID NO: 17645 - protein, 272 aa, Neisseria meningitidis; identical to SEQ ID NO: 1395

SEQ ID NO: 17646 - protein, 456 aa, Neisseria meningitidis; identical to SEQ ID NO: 6557

SEQ ID NO: 17647 - protein, 348 aa, Neisseria meningitidis
MIPATYTLSQITARLGGEWRGEDISVTAVRPLADAQAEHISFLANPKYKAEVHDSSAGAVIVSAKAADGFEGRNLIVADDPYLYFAKVARLFSPVVKARGGIHPTAVVEPGATVPTSCEIGANVYIGANTVLGEGCRILANAVVQHDCKLGDEVVLHPNAVVYYGCTLGRRVEIHSGAVIGADGFGLAFADDSWFKIPQTGAVTLGDDVEIGSNTNIDRGAMSDTTVGNGTKIDNQVQIGHNCKIGSHTVIAAKTGISGSVTIGSYCIIGGGVGTVGHIEIADKTTIGGGTSVTHSITESGKHLAGIFPMSTHKEWARNAVYIHRLSEMNKRLKTLEQQLSDAGQDSK

SEQ ID NO: 17648 - protein, 279 aa, Neisseria meningitidis; identical to SEQ ID NO: 2627

SEQ ID NO: 17649 - protein, 321 aa, Neisseria meningitidis
MSYTQLTQGERYHIQYLSRHCTVTEIAKQLNRHKSTISREIRRHRTQGQQYSAEKAQRQSQTIKQRKRQPYKLDSQLIQHIDPLIRRKLSPEQVCAYLCKHHQITLHHSTIYRYLRQDKSNGSTLWQHLRICSKPYRKRYGSTWTRGKVPNRVGIENRPAIVDQKSRIGDWEADTIVGKGQKSALLTLVERVTRYTIICKLDSLKAEDTARAAVRALKAHKDRVHTITMDNGKEFYQHTKITKALKAETYFCRPYHSWEKGLNENTNGLIRQYFPKQTDFRNISDREIRRVQDELNHRPRKTLGYETPSVLFLNLFQPLIH

SEQ ID NO: 17650 - protein, 572 aa, Neisseria meningitidis; identical to SEQ ID NO: 7185

SEQ ID NO: 17651 - protein, 162 aa, Neisseria meningitidis; identical to SEQ ID NO: 6462

SEQ ID NO: 17652 - protein, 465 aa, Neisseria meningitidis
MTVRIEHDLLGDREIPAEVYWGIHTLRAIENFKISTQKISDVPQFVRSMVMVKKATAQANGKLGAVKPEIAAAIEKACDEVLLNNRCLDQFPSDVYQGGAGTSVNMNTNEVIANLALEALGYEKGRYDIVNPMDHVNASQSTNDAYPTGFRLAVYYSIGELLDKLVVLKNAFAAKAEEFKDVLKMGRTQLQDAVPMTTGQEFQSFQVLLEEEILNLDRTRQLLLEVNLGATAIGTGVNTPKGYAELVVKKLSEVSGLPCKLTENLIEATSDCGAYVMVHGALKRTAVKLSKICNDLRLLSSGPRAGLKEINLPELQAGSSIMPAKVNPVIPEVVNQVCFKVIGNDTTITFAAEAGQLQLNVMEPVIAQCMFETISLLGNAAINLSDKCVKGITVNREICERYVFNSIGLVTYLNPYIGHHNGDLVGKICAQTGKGVREVVLERGLLSEEELNRILSPENLMNPHL

SEQ ID NO: 17653 - protein, 311 aa, Neisseria meningitidis; identical to SEQ ID NO: 5677

SEQ ID NO: 17654 - protein, 380 aa, Neisseria meningitidis; identical to SEQ ID NO: 7635

SEQ ID NO: 17655 - protein, 133 aa, Neisseria meningitidis
MNTTRLPTALVLGCFCAAASAADNSIMTKGQKVYESNCVACHGKKGEGRGTMFPPLYRSDFIMKKPQVLLHSMVKGINGTIKVNGKTYNGFMPATAISDADIAAVATYIMNAFDNGGGSVTEKDVKQAKSKKN

SEQ ID NO: 17656 - protein, 331 aa, Neisseria meningitidis; identical to SEQ ID NO: 5914

SEQ ID NO: 17657 - protein, 158 aa, Neisseria meningitidis; identical to SEQ ID NO: 6684

SEQ ID NO: 17658 - protein, 88 aa, Neisseria meningitidis; identical to SEQ ID NO: 255

SEQ ID NO: 17659 - protein, 51 aa, Neisseria meningitidis; identical to SEQ ID NO: 7347

SEQ ID NO: 17660 - protein, 309 aa, Neisseria meningitidis; identical to SEQ ID NO: 6560

SEQ ID NO: 17661 - protein, 241 aa, Neisseria meningitidis
LLDHDNGFFDNSNQRPKSETIGTAWRNEDGSGKTFYVGRKKNSRFVRVYEKGRQLGDKESKWVRFEIQFNYGDIEIPLDILINQGSYFCGAFPICRKFKNMPVPERFDQRKKKLNLTFEHKLHYAKNAVGKLVNFMIEMGFDNSEIVESLKADSGFPKGLEPEKYALEMLRDGLKHGFIHEQPDIDLEIELDELGVIAFKNSDKFDREKRLFSPDYDVEKERKYQEYLSKVYHQNVDYDYF

SEQ ID NO: 17662 - protein, 321 aa, Neisseria meningitidis
MSYTQLTQGERYHIQYLSRHCTVTEIAKQLNRHKSTISREIRRHRTQGQQYSAEKAQRQSQTIKQRKRQPYKLDSQLIQHIDTLIRRKLSPEQVCAYLCKHHQITLHHSTIYRYLRQDKSNGSTLWQHLRICSKPYRKRYGSTWTRGKVPNRVGIENRPAIVDQKSRIGDWEADTIVGKGQKSALLTLVERVTRYTIICKLDSLKAEDTARAAVRALKAHKDRVYTITMDNGKEFYQHTKITKALKAETYFCRPYHSWEKGLNENTNGLIRQYFPKQTDFRNISDREIRRVQDELNHRPRKTLGYETPSVLFLNLFQPLIH

SEQ ID NO: 17663 - protein, 65 aa, Neisseria meningitidis; identical to SEQ ID NO: 6901

SEQ ID NO: 17664 - protein, 157 aa, Neisseria meningitidis; identical to SEQ ID NO: 7285

SEQ ID NO: 17665 - protein, 158 aa, Neisseria meningitidis
MKTNFKQKIIEQARSEGLQVTALREQVLDIVLQQSGVIKAYNVLSQMQQQSEGVLAPPTAYRALDFWAEQGVLHKVAAVNGYILCSHAQHECDDHCHDHEEAEAHHSAFILVCTECGTADEQTLSHEWAALRAGVAESGFALKEEHVVLTGICKKCQQ

SEQ ID NO: 17666 - protein, 371 aa, Neisseria meningitidis; identical to SEQ ID NO: 849

SEQ ID NO: 17667 - protein, 230 aa, Neisseria meningitidis; identical to SEQ ID NO: 7412

SEQ ID NO: 17668 - protein, 260 aa, Neisseria meningitidis; identical to SEQ ID NO: 7097

SEQ ID NO: 17669 - protein, 159 aa, Neisseria meningitidis; identical to SEQ ID NO: 4893

SEQ ID NO: 17670 - protein, 230 aa, Neisseria meningitidis; identical to SEQ ID NO: 1269

SEQ ID NO: 17671 - protein, 76 aa, Neisseria meningitidis; identical to SEQ ID NO: 286

SEQ ID NO: 17672 - protein, 331 aa, Neisseria meningitidis; identical to SEQ ID NO: 1014

SEQ ID NO: 17673 - protein, 469 aa, Neisseria meningitidis; identical to SEQ ID NO: 6773

SEQ ID NO: 17674 - protein, 287 aa, Neisseria meningitidis; identical to SEQ ID NO: 7439

SEQ ID NO: 17675 - protein, 900 aa, Neisseria meningitidis
MQLHILNNPKDAALAADAEFLKQSLFNLLHEEASPLVVETVKLLSTSDDSAALIEKVLPQLDEQQTHDLTLACGLFAQILNIAEDVHHERRRQIHEEAGRGGAEGSLTETVRRLKAGKADGKSVQRQLDNTSVTAVLTAHPTEVQRQTVLSFNRRIRALLPQRERCTNADALARLRREIDTILLGLWQTSETRRHKLSVNDEINNGVSIFPMSFFEALPKLYRKMEHDFQTAYPGVRVPDILKIGGWIGGDRDGNPFVSAETLRFAFRRHADAVFRFYRGELDKLYRELPLSIRRVKVNGDVTALSDKSPDEEIARAEEPYRRAIAYIMARAMGKARALGLGMGCKFGFLEPYASAQEFLDDLKKLQRSLIDNGSRLLAEGRLADLIRSVSVFGFHMMPLDLRQHAGKHADVVAELFQHAGLEDYNRLNEEQKQTALLRELSHQRPLYSPFITYSDHTRHELAIFNEARKIKDEFGEDAVTQSIISNCEQPSDLLALALLLKETGLLAVENGKPHSRINIVPLFETIEALENACPVMETMFRLDWYDALLESRGNIQEIMLGYSDSNKDGGYVTSSWCLYQAELGLVELFKKYDVRMRLFHGRGGSVGRGGGPSYQAILAQPAGSVAGQIRITEQGEVITAKYADPGNAQRNLETLVAATLEASILPDKKDPDAKLMQALSDVSFKYYRELITHPDFIDYFLQTSPIQEIATLNLGSRPASRKTLARIQDLRAIPWVFSWMQNRLMLPAWYGFGSAVETLCEDKPETLAALREHAQSNPFFQAMLSNMEQVMAKTDITLAENYAGLSESPDKAKIIFGMIKEEYRRSRKALLDLLQTEELLRDNRSLARSLALRIPYLNALNGLQVAMLKRLRKEPDNPHALLMVHLTINGVAQGLRNTG

SEQ ID NO: 17676 - protein, 553 aa, Neisseria meningitidis; identical to SEQ ID NO: 7816

SEQ ID NO: 17677 - protein, 262 aa, Neisseria meningitidis; identical to SEQ ID NO: 5957

SEQ ID NO: 17678 - protein, 213 aa, Neisseria meningitidis; identical to SEQ ID NO: 2136

SEQ ID NO: 17679 - protein, 1161 aa, Neisseria meningitidis
MRLTHIKLSGFKSFTDPTTIHVPGQLVAVIGPNGCGKSNVIDAVRWVLGEASAKQLRGESMQDVIFNGAATRRPAPRASVELVFDNSGHSLQGAWGQYAEVSIKRQLTRQGESTYFINNQTVRRRDITDLFLGTGVGARGYAVIEQGMISRIIEARPEELRAYIEEAAGVSKYKERRKETEGCLKDTREHLQRLGDLQNELARQVEKLEKQAETAERYKSLTAQLNQQQDLLDYAQWQQSLAAADKATAQHQSLQAQQDETAAQVQALNDEVHALQTAEQSQQQAVHELGNKRGVLREQIARLEEQIRHQQNLHQRIERDKQAAQAQLQRIHQEQQQIRVQLEENELQVEEKQTELAEWAMQVAEHEERLPELEEAQATLNAAFQTQQDEANRIRRELALKQQQLAHAEQTVAKHEERKGRLKQENQALNLPDEAETAAAQEAAALLQSQQEHYEEQIIAAEEALHAAREAFQTASNRFQSLKQQHITLQAQQQALSQILSQQQEAADFWQATDHAAAPQLWQHITAPAEWQHALSVILAERLHARAVPQGFVPPEPLPQGQAAWLSDGLSGGIKKSLPVQALLNQIQAQPPFQTALHYWLDGVLCAPDLSYALAHQNDLGAHQIWLTPEGHQVDKVSVLLYAKPAQESLIAQKARLDGIASELENLAPELSAAEAAFKQAEAAVRSSEVQHKNLMQQQQQHTRQYSQAQQRAAELLARTNQGQIRREHIERELAQLAEEQTVLQHTSDGLSDDIVTLQEAAAELEHQQQTTAHSRQEQQGRLKQAQLALLEANRQYGLAEVAVHKLNQQKQNYRQQIAQLEQQTLDWQERQQELALAYETEFQNDEQHIKLEELSEAVQTLDEEYIVVQEKLAQIQEQGREQYAKVQTLQTKLPQLQAATQTALLQQQEALINAKRYHQNLTERAADLDALEALAKESPKVLNSSIGSLSQQIEALGAVNLAALQELEEARERDGYYRSQSEDVQAAITLLEEAIAQIDDKTKARFKETFDAVNSKVQTFFPTLFGGGEATLKMIGDDLLTAGVSIMARPPGKKNSTIHLLSGGEKALTAMSLVFALFSLNPAPFCLLDEVDAPLDDANTSRFCRLVKEMSAQTQFLYISHNRLTMEMAEQLVGVTMQEKGVSRVVAVDIKQALEMAEAV

SEQ ID NO: 17680 - protein, 92 aa, Neisseria meningitidis
MLLATDGEDVHEARMAARPEHLKRLETLKSEGRLLTAGPNPLPEDSNRVSGSLIVAQFESLDAAQAWAEDDPYVHAGVYSEVLIKPFKAVFK

SEQ ID NO: 17681 - protein, 459 aa, Neisseria meningitidis
MAKTLKTLYQCTECGGTSPKWQGKCPHCGEWNTLQESLAAPEPKNARFQSWAADTSTVQSLSAVTATEVPRNPTGMGELDRVLGGGLVDGAVILLGGDPGIGKSTLLLQTIAKMAQSRKVLYVSGEESAQQVALRAQRLELPTDGVNLLAEIRMEAIQAALKQHQPEVVVIDSIQTMYSDQITSAPGSVSQVRECAAQLTRMAKQMGIAMILVGHVTKDGAIAGPRVLEHMVDTVLYFEGDQHSNYRMIRAIKNRFGAANELGVFAMTENGLKGVSNPSAIFLASYRDDTPGSCVLVTQEGSRPLLVEIQALVDDAHGFTPKRLTVGLEQNRLAMLLAVLNRHGGIACFDQDVFLNAVGGVKIGEPAADLAVILAMLSSFRNRPMPEKTVVFGEIGLSGEVRPVARGQERLKEAEKLGFKRAIVPKANMPRNAKEFPNLKIYGVSSLQEAIDICRDSRE

SEQ ID NO: 17682 - protein, 149 aa, Neisseria meningitidis; identical to SEQ ID NO: 6141

SEQ ID NO: 17683 - protein, 122 aa, Neisseria meningitidis; identical to SEQ ID NO: 3130

SEQ ID NO: 17684 - protein, 113 aa, Neisseria meningitidis; identical to SEQ ID NO: 6827

SEQ ID NO: 17685 - protein, 246 aa, Neisseria meningitidis
MLIVRPSGRAAEDVETCLNAGWRAEVLSPVEIEADAAGLELLSEQYARADAVFWVSPTAVETAVPYLNLSDGIKAQIAVGQGSRRALERCLVRTVIAPDDGNDSEAVLRLPVWNSLPEGARVLFVRGHGGRDFLMNALQEKGFRTEVAEVYFRRHKPLNFQNFQTENIAAAYITSTELVRLLFGQLPPQFSRFFKSLLYFTHHPRIAEALKREGVCSVETVPTLEAALSHSSISVSDGMVFPGTSN

SEQ ID NO: 17686 - protein, 256 aa, Neisseria meningitidis; identical to SEQ ID NO: 6000

SEQ ID NO: 17687 - protein, 304 aa, Neisseria meningitidis; identical to SEQ ID NO: 6584

SEQ ID NO: 17688 - protein, 704 aa, Neisseria meningitidis; identical to SEQ ID NO: 7378

SEQ ID NO: 17689 - protein, 336 aa, Neisseria meningitidis; identical to SEQ ID NO: 7176

SEQ ID NO: 17690 - protein, 106 aa, Neisseria meningitidis; identical to SEQ ID NO: 6407

SEQ ID NO: 17691 - protein, 340 aa, Neisseria meningitidis
LSYRDAGVDIDAGDQLVENIKPFAKRTMRPEVLGDLGGFGALVEIGKKYQNPVLVSGTDGVGTKLKLAFDWDKHDTVGIDLVAMSVNDILVQGAEPLFFLDYFACGKLDVPRATDVIKGIAQGCEESGCALIGGETAEMPGMYPVGEYDLAGFAVGVVEKENVITGRSIGVGDVVLGLASNGAHSNGYSLIRKIIERDNPDLDAEFDNGKTLREAVIAPTRLYVKPILAALEKFTIKGMAHITGGGITENVPRVLPENTVAQIDAKSWELPKLFQWLQKAGNVETQEMYRTFNCGIGMVVIVAAEDADAVQGLLGEQGETVYRLGLIRERQGDEHQTQVA

SEQ ID NO: 17692 - protein, 962 aa, Neisseria meningitidis; identical to SEQ ID NO: 7662

SEQ ID NO: 17693 - protein, 133 aa, Neisseria meningitidis; identical to SEQ ID NO: 12354

SEQ ID NO: 17694 - protein, 589 aa, Neisseria meningitidis; identical to SEQ ID NO: 7400

SEQ ID NO: 17695 - protein, 432 aa, Neisseria meningitidis; identical to SEQ ID NO: 2024

SEQ ID NO: 17696 - protein, 141 aa, Neisseria meningitidis; identical to SEQ ID NO: 7042

SEQ ID NO: 17697 - protein, 103 aa, Neisseria meningitidis; identical to SEQ ID NO: 2233

SEQ ID NO: 17698 - protein, 62 aa, Neisseria meningitidis; identical to SEQ ID NO: 5951

SEQ ID NO: 17699 - protein, 77 aa, Neisseria meningitidis; identical to SEQ ID NO: 7738

SEQ ID NO: 17700 - protein, 498 aa, Neisseria meningitidis; identical to SEQ ID NO: 2733

SEQ ID NO: 17701 - protein, 1389 aa, Neisseria meningitidis; identical to SEQ ID NO: 7706

SEQ ID NO: 17702 - protein, 413 aa, Neisseria meningitidis; identical to SEQ ID NO: 6124

SEQ ID NO: 17703 - protein, 226 aa, Neisseria meningitidis; identical to SEQ ID NO: 6943

SEQ ID NO: 17704 - protein, 627 aa, Neisseria meningitidis
LAISENGQTKVIENAEGARTTPSVIAYLDGGEILVGAPAKRQAVTNAKNTIYAAKRLIGHKFEDKEVQRDIESMPFEIIKANNGDAWVKAQGKELSPPQISAEVLRKMKEAAEAYLGEKVTEAVITVPAYFNDSQRQATKDAGRIAGLDVKRIINEPTAAALAFGMDKGDNKDRKVAVYDLGGGTFDISIIEIANLDGDKQFEVLATNGDTFLGGEDFDQRLIDHIIAEFKKEQGIDLKQDVMALQRLKEAAEKAKIELSSGQQTEINLPYITMDATGPKHLAMKITRAKFESLVEDLITRSIEPCKIALKDAGLSTGDIDDVILVGGQSRMPKVQEAVKAFFGKEPRKDVNPDEAVAVGAAIQGEVLSGGRSDVLLLDVTPLSLGIETMGGVMTKLIQKNTTIPTKASQVFSTAEDNQSAVTIHVLQGERERASANKSLGQFNLGDIAPAPRGMPQIEVTFDIDANGILHVSAKDKGTGKAANITIQGSSGLSEEEIERMVKDAEANAEEDKKLTELVASRNQAEALIHSVKKSLADYGDKLDAAEKEKIEAALKEAEEAVKGDDKAAIDAKTEALGAASQKLGEMVYAQAQAEAQAGESEQANASAKKDDDVVDADFEEVKDDKK

SEQ ID NO: 17705 - protein, 371 aa, Neisseria meningitidis
MGLKKACLTVLCLIVFCFGIFYTFDRVNQGERNAVSLLKEKLFNEEGEPVNLIFCYTILQMKVAERIMAQHPGERFYVVLMSENRNEKYDYYFNQIKDKAERAYFFHLPYGLNKSFNFIPTMAELKVKSMLLPKVKRIYLASLEKVSIAAFLSTYPDAEIKTFDDGTGNLIQSSSYLGDEFSVNGTIKRNFARMMIGDWSIAKTRNASDEHYTIFKGLKNIMDDGRRKMTYLPLFDASELKTGDETGGTVRILLGSPDKEMKEISEKAAKNFKIQYVAPHPRQTYGLSGVTTLNSPYVIEDYILREIKKNPHTRYEIYTFFSGAALTMKDFPNVHVYALKPASLPEDYWLKPVYALFTQSGIPILTFDDKN

SEQ ID NO: 17706 - protein, 544 aa, Neisseria meningitidis; identical to SEQ ID NO: 3460

SEQ ID NO: 17707 - protein, 729 aa, Neisseria meningitidis
MIYHRIAVNVPLSDGLLTYSHSDPLPPGTRVLVPFRNKTVVGMVWETDIAPDMDMARILSVQTAFVEEKPLPESWRDLLAFTSRYYHYPTGQAVFAALPQGLKETRAVEMPQPPLFYALNEAGRAQTPPPARFNKKAALWDALLSGGMTMAALKQVNAQAAKLIEDWAEQGWIETTEAAKPVLRSYHGQASHSEFVLNADQQQASDEIQTAFGSFQPFLLYGITGSGKTEVYFDAMAKVLAQGRQVLFLLPEINLTPQLLKRVENRFADVPTAVLHSQMAAGKRTQDYLRAMLGQAKLVIGTRLAVFTPMDDVGLIVVDEEHDGSFKQDNELRYHARDLAVWRAKQGGCPIILGSATPSLESWHKAQSGAYRLLQLTERAHTAAQLPQVDILNVGRLKLDNGFSPQALQLLKQNFEAGGMSLVYLNRRGFAPALFCGDCGYTFGCPNCSAKMVLHQRARQLRCHHCDHREPIPYKCPDCGNQDLTAVGHGTQRVEETLRTFLPKAAVVRVDRDSTAHKNDWADLYRRIADNKIDILVGTQMLAKGHDFARLNLVIVLNADGSLYSADFRAPERLFAELMQVSGRAGRADKPGKVLIQTQLPEHPVFAAVKAQDYAVFAENELNERQMFAMPPFGFQTAVRADAPRVADAMEFLNAAKETLAPLLPESVSQFGAAPMLMVRLAERERAQIFLESPSRQDLHRAVSLWAQVLQQNRDGKIRWSVDVDPQEA

SEQ ID NO: 17708 - protein, 242 aa, Neisseria meningitidis; identical to SEQ ID NO: 1183

SEQ ID NO: 17709 - protein, 485 aa, Neisseria meningitidis; identical to SEQ ID NO: 6505

SEQ ID NO: 17710 - protein, 223 aa, Neisseria meningitidis; identical to SEQ ID NO: 1391

SEQ ID NO: 17711 - protein, 96 aa, Neisseria meningitidis; identical to SEQ ID NO: 7305

SEQ ID NO: 17712 - protein, 160 aa, Neisseria meningitidis
MGYIKGVFGIKGWLKIAANTEYSDSLLDYPEWHLVKDGKTISVTLEAGKVVNGELQVKFEGINDRDLAFSLRGYTIEIPREAFAPTEEDEYYWTDLVGMTVVNKDHTVLGKVSNLMETGANDVLMIDGEHGQILIPFVSQYIETVDTGSKTITADWGLDY

SEQ ID NO: 17713 - protein, 520 aa, Neisseria meningitidis
LFEVMKKPLISVAAALLGVALGTPYYLGVKAEESLTQQQKILQETGFLTVESHQYERGWFTSMETTVIRLKPELLNNARKYLPDNLKTVLEQPVTLVNHITHGPFAGGFGTQAYIETEFKYAPETEKVLERFFGKQVPASLANTVYFNGSGKMEVSVPAFDYEELSGIRLHWEGLTGETVYQKGFKSYRNGYDAPLFKIKLADKGDAAFEKVHFDSETSDGINPLALGSSNLTLEKFSLEWKEGVDYNVKLNELVNLVTDLQIGAFINPNGSIAPSKIEVGKLAFSTKTGESGAFINSEGQFRFDTLVYGDEKYGPLDIHIAAEHLDASALTVLKRKFAQISAKKMTEEQIRNDLIAAVKGEASGLFTNNPVLDIKTFRFTLPSGKIDVGGKIMFKDMKKEDLNQLGLMLKKTEADIRMSIPQKMLEDLAVSQAGNIFSVNAEDEAEGRASLDDINETLRLMVDSTVQSMAREKYLTLNGDQIDTAISLKNNQLKLNGKTLQNEPEPDFDEGGMVSEPQQ

SEQ ID NO: 17714 - protein, 201 aa, Neisseria meningitidis; identical to SEQ ID NO: 6159

SEQ ID NO: 17715 - protein, 158 aa, Neisseria meningitidis; identical to SEQ ID NO: 7382

SEQ ID NO: 17716 - protein, 214 aa, Neisseria meningitidis; identical to SEQ ID NO: 6886

SEQ ID NO: 17717 - protein, 119 aa, Neisseria meningitidis; identical to SEQ ID NO: 6994

SEQ ID NO: 17718 - protein, 387 aa, Neisseria meningitidis; identical to SEQ ID NO: 30

SEQ ID NO: 17719 - protein, 37 aa, Neisseria meningitidis; identical to SEQ ID NO: 7611

SEQ ID NO: 17720 - protein, 89 aa, Neisseria meningitidis; identical to SEQ ID NO: 494

SEQ ID NO: 17721 - protein, 241 aa, Neisseria meningitidis; identical to SEQ ID NO: 6487

SEQ ID NO: 17722 - protein, 63 aa, Neisseria meningitidis; identical to SEQ ID NO: 5865

SEQ ID NO: 17723 - protein, 99 aa, Neisseria meningitidis; identical to SEQ ID NO: 1110

SEQ ID NO: 17724 - protein, 140 aa, Neisseria meningitidis; identical to SEQ ID NO: 7388

SEQ ID NO: 17725 - protein, 431 aa, Neisseria meningitidis; identical to SEQ ID NO: 6225

SEQ ID NO: 17726 - protein, 152 aa, Neisseria meningitidis; identical to SEQ ID NO: 16296

SEQ ID NO: 17727 - protein, 161 aa, Neisseria meningitidis; identical to SEQ ID NO: 7269

SEQ ID NO: 17728 - protein, 245 aa, Neisseria meningitidis; identical to SEQ ID NO: 4045

SEQ ID NO: 17729 - protein, 563 aa, Neisseria meningitidis
MSASQLLSRLTQTVGEKYIITDPAKTEQYRQGYRFGEGKALAVVRPGSILEMWKILQACVEADVIVITQAANTGLTGGSTPDGNDYDRDIVIVNTMRMNIIQTINNNEQVVCLPGSTLNQLELLLKPLGREPHSVIGSSCIGASVLGGVCNNSGGALVQRGPAYTEMALFAQINEEGRLELVNHLGIDLGNTPEEILTNLQGHHYQNKDITQDAGKGHDHAYCEHVRQVDEPTAARFNADPARHYEASGCAGKLMVFAVRLDTFPQEKQTAVFYIGTNDINELTDIRRAALGEFESLPVSGEYIHRHAFDIADVYGKDTFYVIKKFGTHQLPKLFDLKARVDRFGKKVSFLPKHFSDKAMQFVSKFLPDHLPKSMRDYRDKYEHHLILKMGGKGVDEARAFLKEYFAHHGGAFFECNAEETQAAMLHRFAVASAAIRYRAVHDDEVEDLVALDIALRRDDRDWFEKLPPEIDNKIIHKLYYGHFMCHVFHQDYIIKKGNDCMALEHEMLHLLDQRGAQYPAEHNVGHLYEAKPALKQFYRKLDPTNSFNPGVGKTSKKKNWAE

SEQ ID NO: 17730 - protein, 419 aa, Neisseria meningitidis; identical to SEQ ID NO: 6995

SEQ ID NO: 17731 - protein, 255 aa, Neisseria meningitidis; identical to SEQ ID NO: 7390

SEQ ID NO: 17732 - protein, 327 aa, Neisseria meningitidis; identical to SEQ ID NO: 6287

SEQ ID NO: 17733 - protein, 596 aa, Neisseria meningitidis; identical to SEQ ID NO: 6764

SEQ ID NO: 17734 - protein, 640 aa, Neisseria meningitidis; identical to SEQ ID NO: 6790

SEQ ID NO: 17735 - protein, 251 aa, Neisseria meningitidis; identical to SEQ ID NO: 6429

SEQ ID NO: 17736 - protein, 503 aa, Neisseria meningitidis; identical to SEQ ID NO: 7312

SEQ ID NO: 17737 - protein, 150 aa, Neisseria meningitidis; identical to SEQ ID NO: 5989

SEQ ID NO: 17738 - protein, 187 aa, Neisseria meningitidis; identical to SEQ ID NO: 7528

SEQ ID NO: 17739 - protein, 243 aa, Neisseria meningitidis; identical to SEQ ID NO: 6600

SEQ ID NO: 17740 - protein, 354 aa, Neisseria meningitidis; identical to SEQ ID NO: 6846

SEQ ID NO: 17741 - protein, 162 aa, Neisseria meningitidis; identical to SEQ ID NO: 7842

SEQ ID NO: 17742 - protein, 154 aa, Neisseria meningitidis; identical to SEQ ID NO: 7221

SEQ ID NO: 17743 - protein, 151 aa, Neisseria meningitidis; identical to SEQ ID NO: 658

SEQ ID NO: 17744 - protein, 335 aa, Neisseria meningitidis
MYPLARRILFALDAEKAHHFTLDALYTVYKLGLIPVTDNRTKPVKLMGMDLPNPVGLAAGLDKNGEYIDALGALGFGFIEIGTVTPNPQPGNPQPRLFRVPEHQGIINRMGFNNHGIDTMIRNIEKSKFSGVLGINIGKNAVTPIENAADDYLICLEKAYAHASYITVNISSPNTKNLRALQGGDELSALLEALKNKQAQLASVHGKYVPLAVKIAPDLDEAQIEDIAHVVKSVEMDGIIATNTTIDKSSLGSHPLAGEQGGLSGLPVHEKSNRVLKLLADHIDGKLPIIGVGGIMEGEDSADKIRLGATAVQVYSGLIYKGPALVKECLKALAR

SEQ ID NO: 17745 - protein, 757 aa, Neisseria meningitidis; identical to SEQ ID NO: 1692

SEQ ID NO: 17746 - protein, 92 aa, Neisseria meningitidis; identical to SEQ ID NO: 7272

SEQ ID NO: 17747 - protein, 70 aa, Neisseria meningitidis; identical to SEQ ID NO: 232

SEQ ID NO: 17748 - protein, 489 aa, Neisseria meningitidis
LALALAVITRRVLLSLGIGILVGVAFLVGGNPVDGLTHLKDMVVGLAWSDGDWSLGKPKILVFLILLGIFTSLLTYSGSNQAFADWAKRHIKNRRGAKMLTACLVFVTFIDDYFHSLAVGAIARPVTDKFKVSRTKLAYILDSTAAPMCVLMPVSSWGASIIATLAGLLVTYKITEYTPMGTFVAMSLMNYYALFALIMVFVVAWFSFDIGSMARFEQAALNEAHDETAVSDATKGRVYALIIPVLALIASTVSAMIYTGAQASETFSILGAFENTDVNTSLVFGGTCGVLAVVLCTLGTIKTADYPKAVWQGAKSMFGAIAILILAWLISTVVGEMHTGDYLSTLVAGNIHPGFLPVILFLLASVMAFATGTSWGTFGIMLPIAAAMAVKVEPALIIPCMSAVMAGAVCGDHCSPISDTTILSSTGARCNHIDHVTSQLPYALTVAAAAASGYLALGLTKSALLGFGTTGIVLAVLIFLLKDKKRANA

SEQ ID NO: 17749 - protein, 115 aa, Neisseria meningitidis; identical to SEQ ID NO: 7546

SEQ ID NO: 17750 - protein, 213 aa, Neisseria meningitidis
MKAFTKITAIVAPLDRSNVDTDAIIPKQFLKSIKRSGFGPNAFDEWRYLDHGEPGMDNSKRPLNPDFSLNQPRYQGAQILLTRKNFGCGSSREHAPWALDDYGFRAVIAPSFADIFFNNCYKNGLLPIVLTEERVDRLFKEVEANEGYQLSIDLAEQTLTTPSGETFTFDITEHRKHCLLNGLDEIGLTLQHADEIHAFEEKRRQSQPWLFNG

SEQ ID NO: 17751 - protein, 242 aa, Neisseria meningitidis; identical to SEQ ID NO: 6897

SEQ ID NO: 17752 - protein, 462 aa, Neisseria meningitidis; identical to SEQ ID NO: 6768

SEQ ID NO: 17753 - protein, 764 aa, Neisseria meningitidis; identical to SEQ ID NO: 6491

SEQ ID NO: 17754 - protein, 160 aa, Neisseria meningitidis; identical to SEQ ID NO: 1608

SEQ ID NO: 17755 - protein, 100 aa, Neisseria meningitidis; identical to SEQ ID NO: 3521

SEQ ID NO: 17756 - protein, 103 aa, Neisseria meningitidis; identical to SEQ ID NO: 1558

SEQ ID NO: 17757 - protein, 118 aa, Neisseria meningitidis; identical to SEQ ID NO: 5958

SEQ ID NO: 17758 - protein, 199 aa, Neisseria meningitidis; identical to SEQ ID NO: 1276

SEQ ID NO: 17759 - protein, 181 aa, Neisseria meningitidis; identical to SEQ ID NO: 1552

SEQ ID NO: 17760 - protein, 125 aa, Neisseria meningitidis; identical to SEQ ID NO: 535

SEQ ID NO: 17761 - protein, 52 aa, Neisseria meningitidis; identical to SEQ ID NO: 6488

SEQ ID NO: 17762 - protein, 42 aa, Neisseria meningitidis; identical to SEQ ID NO: 6215

SEQ ID NO: 17763 - protein, 97 aa, Neisseria meningitidis; identical to SEQ ID NO: 177

SEQ ID NO: 17764 - protein, 275 aa, Neisseria meningitidis; identical to SEQ ID NO: 7533

SEQ ID NO: 17765 - protein, 239 aa, Neisseria meningitidis; identical to SEQ ID NO: 7144

SEQ ID NO: 17766 - protein, 477 aa, Neisseria meningitidis; identical to SEQ ID NO: 3214

SEQ ID NO: 17767 - protein, 129 aa, Neisseria meningitidis; identical to SEQ ID NO: 5927

SEQ ID NO: 17768 - protein, 466 aa, Neisseria meningitidis; identical to SEQ ID NO: 7726

SEQ ID NO: 17769 - protein, 431 aa, Neisseria meningitidis; identical to SEQ ID NO: 7538

SEQ ID NO: 17770 - protein, 443 aa, Neisseria meningitidis; identical to SEQ ID NO: 6693

SEQ ID NO: 17771 - protein, 921 aa, Neisseria meningitidis; identical to SEQ ID NO: 6053

SEQ ID NO: 17772 - protein, 192 aa, Neisseria meningitidis; identical to SEQ ID NO: 746

SEQ ID NO: 17773 - protein, 445 aa, Neisseria meningitidis; identical to SEQ ID NO: 6650

SEQ ID NO: 17774 - protein, 170 aa, Neisseria meningitidis; identical to SEQ ID NO: 1267

SEQ ID NO: 17775 - protein, 421 aa, Neisseria meningitidis; identical to SEQ ID NO: 15476

SEQ ID NO: 17776 - protein, 176 aa, Neisseria meningitidis; identical to SEQ ID NO: 1829

SEQ ID NO: 17777 - protein, 737 aa, Neisseria meningitidis; identical to SEQ ID NO: 6258

SEQ ID NO: 17778 - protein, 429 aa, Neisseria meningitidis; identical to SEQ ID NO: 2821

SEQ ID NO: 17779 - protein, 111 aa, Neisseria meningitidis; identical to SEQ ID NO: 7253

SEQ ID NO: 17780 - protein, 218 aa, Neisseria meningitidis; identical to SEQ ID NO: 6313

SEQ ID NO: 17781 - protein, 371 aa, Neisseria meningitidis; identical to SEQ ID NO: 6315

SEQ ID NO: 17782 - protein, 150 aa, Neisseria meningitidis; identical to SEQ ID NO: 7002

SEQ ID NO: 17783 - protein, 1321 aa, Neisseria meningitidis
MSVVLPLRGVTALSDFRVEKLLQKAAALGLPEVKLSSEFWYFVGSEKALDAATVEKLQALLAAQSVEQTPKAREGLHLFLVTPRLGTISPWASKATNIAENCGLAGIERIERGMAVWLEGALTDRQKQQWAALLHDRMTESVLTDIDAAAQLFHHIQSETFSTVDVLGGGKEALVKANTEMGLALSADEIDYLVENYQALQRNPSDVELMMFAQANSEHCRHKIFNADFILNGEKQPKSLFGMIRDTHNAHPEGTVVAYKDNSSVIEGAKIERFYPDAAENQGYRFHEEDTHIIMKVETHNHPTAIAPFAGAATGAGGEIRDEGATGKGSRPKAGLTGFTVSNLNIPGLKQPWEQDYGKPEHISSPLDIMIEGPIGGAAFNNEFGRPNLLGYFRTFEEKFDGQVRGYHKPIMIAGGLGSIQAQQTHKDEIPEGALLIQLGGPGMLIGLGGGAASSMDTGTNDASLDFNSVQRGNPEIERRAQEVIDRCWQLGDKNPIISIHDVGAGGLSNAFPELVNDAGRGAVFELREVPLEEHGLTPLQIWCNESQERYVLSILEKDLETFRAICERERCPFAVVGTATDDGHLKVRDDLFANNPVDLPLNVLLGKPPKTTRTDKTVTPSKKPFHAGDIDITEAAYRVLRLPTVAAKNFLITIGDRSVGGMTHRDQMVGKYQTPVADCAVTMMGFNTYRGEAMSMGEKPTVALFDAPASGRMCVGEAITNIAAANIGDIGNIKLSANWMAACGNEGEDEKLYRTVEAVSKACQALDLSIPVGKDSLSMKTVWQDGEEKKSVVSPLSLIISAFAPVQDVRKTVTPELKNVEDSVLLFVDLGFGKARMGGSAFGQVYNNMSGDAPDLDDTGRLKAFYNVIQQLVAEDKLLAYHDRSDGGLFAVLVEMAFAGRCGLDIDLNLLLAQTFITNHTALSQSLRTEEVKALAEWQETIARTLFNEELGAVIQVRKQDVADIINLFYQQQLHHNVFEIGTLTDENTLIIRDGQTHLISDNLIKLQQTWQETSHQIQRLRDNPACADSEFALIGDNERSALFANLKFDVNEDIAAPFINSGAKPKIAILREQGVNGQIEMAAAFTRAGFDAYDVHMSDLMAGRFRLADFKMLAACGGFSYGDVLGAGEGWAKSILFHPALRDQFAAFFADPDTLTLGVCNGCQMVSNLAEIIPGAAEAWPKFKRNLSEQFEARLSMVHVPKSASLILNEMQGSSLPVVVSHGEGRADFALHGGNISADLGIALQYVDGQNQVTQTYPLNPNGSPQGIAGITNADGRVTIMMPHPERVYRAAQMSWKPEDWTELSGWYRLFAGARKALG

SEQ ID NO: 17784 - protein, 336 aa, Neisseria meningitidis; identical to SEQ ID NO: 7907

SEQ ID NO: 17785 - protein, 43 aa, Neisseria meningitidis; identical to SEQ ID NO: 6156

SEQ ID NO: 17786 - protein, 71 aa, Neisseria meningitidis; identical to SEQ ID NO: 3926

SEQ ID NO: 17787 - protein, 222 aa, Neisseria meningitidis; identical to SEQ ID NO: 6733

SEQ ID NO: 17788 - protein, 417 aa, Neisseria meningitidis; identical to SEQ ID NO: 1859

SEQ ID NO: 17789 - protein, 81 aa, Neisseria meningitidis; identical to SEQ ID NO: 6740

SEQ ID NO: 17790 - protein, 642 aa, Neisseria meningitidis
LIECKNINRYFGSGENRVHILKDISLSIEKGDFVAIIGQSGSGKSTLMNILGCLDTAGSGSYRIDGIETAKMQPDELAALRRERFGFIFQRYNLLSSLTARDNVALPAVYMGAGGKERSARADKLLQDLGLASKEGNKPGELSGGQQQRVSIARALMNGGEIIFADEPTGALDTASGKNVMEIIRRLHEAGHTVIMVTHDPDIAANANRVIEIRDGEIISDTSKNPEIPASNVGRIREKASWSFYYDQFVEAFRMSVQAVLAHKMRSLLTMLGIIIGIASVVSVVALGNGSQKKILEDISSIGTNTISIFPGRGFGDRRSGRIKTLTIDDAKIIAKQSYVASATPMTSSGGTLTYRNTDLTASLYGVGEQYFDVRGLKLETGRLFDENDVKEDAQVVVIDQNVKDKLFADSDPLGKTILFRKRPLTVIGVMKKDENAFGNSDVLMLWSPYTTVMHQITGESHTNSITVKIKDNANTQVAEKGLTDLLKARHGTEDFFMNNSDSIRQIVESTTGTMKLLISSIALISLVVGGIGVMNIMLVSVTERTKEIGIRMAIGARRGNILQQFLIEAVLICVIGGLVGVGLSAAVSLVFNHFVTDFPMDISAMSVIGAVACSTGIGIAFGFMPANKAAKLNPIDALAQD

SEQ ID NO: 17791 - protein, 161 aa, Neisseria meningitidis
MSNKMEQKGFTLIEMMIVVAILGIISVIAIPSYQSYIEKGYQSQLYTEMVGINNISKQFILKNPLDDNQTIENKLEIFVSGYKMNPKIAKKYSVSVKFVDKEKSRAYRLVGVPKAGTGYTLSVWMNSVGDGYKCRDAASAQAHLETLSSDVGCEAFSNRKK

SEQ ID NO: 17792 - protein, 398 aa, Neisseria meningitidis; identical to SEQ ID NO: 6776

SEQ ID NO: 17793 - protein, 242 aa, Neisseria meningitidis; identical to SEQ ID NO: 1952

SEQ ID NO: 17794 - protein, 146 aa, Neisseria meningitidis; identical to SEQ ID NO: 6527

SEQ ID NO: 17795 - protein, 156 aa, Neisseria meningitidis; identical to SEQ ID NO: 7583

SEQ ID NO: 17796 - protein, 300 aa, Neisseria meningitidis
MDSLMTLLSVLIPMFAGFFIRVPKPYLPALDKVLSVLVYAVLLLIGVSLSRVEDLGSRLDDMALTVLWLFVCTVGANLLALAVLGKLFPWRIKGKGKGVSVGVSGSVGQLGCVLLGFAFGKLMRDIWMPSESAGMYCLMLLVFLIGVQLKSSGVSLRQVLVNRRGIRLSVWFMLSSLSGGLLFAASADGVSWVKGLAMASGFGWYSLSGLVMTEAYGAVWGSIALLNDLARELFALAFIPLLMKRFPDAAVGVGGATSMDFTLPVIRGAGGLEAVPVAVSFGVVVNIAAPFLMVVFSALG

SEQ ID NO: 17797 - protein, 275 aa, Neisseria meningitidis; identical to SEQ ID NO: 7331

SEQ ID NO: 17798 - protein, 257 aa, Neisseria meningitidis; identical to SEQ ID NO: 17583

SEQ ID NO: 17799 - protein, 81 aa, Neisseria meningitidis
MGASRDVSKSAKGWSVGIGLNVGKQLTDSVGLEFDPYYRHKTIYKPREIVLDGDKTKMGRSKSNEYGFRVAATFYSQLKSK

SEQ ID NO: 17800 - protein, 162 aa, Neisseria meningitidis; identical to SEQ ID NO: 7536

SEQ ID NO: 17801 - protein, 295 aa, Neisseria meningitidis; identical to SEQ ID NO: 6246

SEQ ID NO: 17802 - protein, 298 aa, Neisseria meningitidis
MFRLQFRLFPPLRTAMHILLTALLKCLSLLPLSCLHTLGNRLGHLAFYLLKEDRARIVANMRQAGLNPDPKTVKAVFAETAKGGLELAPAFFRKPEDIETMFKAVHGWEHVQQALDKHEGLLFITPHIGSYDLGGRYISQQLPFPLTAMYKPPKIKAIDKIMQAGRVRGKGKTAPTSIQGVKQIIKALRSGEATIVLPDHVPSPQEGGEGVWVDFFGKPAYTMTLAAKLAHVKGVKTLFFCCERLPGGQGFDLHIRPVQGELNGDKAHDAAVFNRNAEYWIRRFPTQYLFMYNRYKMP

SEQ ID NO: 17803 - protein, 394 aa, Neisseria meningitidis
LILVLNCGSSSLKGAVLDNGSGEVLLSCLAEKLNLPDAYITFKVNGEKHKVDLSAHPDHTGAVEALMEELKAHGLDSRIGAIGHRVVSGGELYSESILVDDEVIAGIEKCIPLAPLHNPAHLLGLRAAQSIFKGLPNVVVFDTSFHQTMPEVAYKYAVPQELYEKYGLRRYGAHGTSYRFVADETARFLGKDKKDLRMVIAHLGNGASITAVANGESRDTSMGLTPLEGLVMGTRSGDIDPSVFGFLAENANMTIAQITEMLNKKSGLLGISGLSNDCRTIEEEAAKGHKGAKLALDMFIYRLAKYIGSMAVAAGGLDALVFTGGIGENSDIIRERVIGYLGFLGLNIDQEANLKARFGNAGVITTADSKAVAVVIPTNEELMIAHDTARLSGL

SEQ ID NO: 17804 - protein, 199 aa, Neisseria meningitidis; identical to SEQ ID NO: 368

SEQ ID NO: 17805 - protein, 69 aa, Neisseria meningitidis; identical to SEQ ID NO: 7468

SEQ ID NO: 17806 - protein, 210 aa, Neisseria meningitidis; identical to SEQ ID NO: 3436

SEQ ID NO: 17807 - protein, 270 aa, Neisseria meningitidis; identical to SEQ ID NO: 6442

SEQ ID NO: 17808 - protein, 115 aa, Neisseria meningitidis; identical to SEQ ID NO: 6822

SEQ ID NO: 17809 - protein, 160 aa, Neisseria meningitidis; identical to SEQ ID NO: 515

SEQ ID NO: 17810 - protein, 525 aa, Neisseria meningitidis; identical to SEQ ID NO: 7309

SEQ ID NO: 17811 - protein, 140 aa, Neisseria meningitidis; identical to SEQ ID NO: 6690

SEQ ID NO: 17812 - protein, 188 aa, Neisseria meningitidis; identical to SEQ ID NO: 6079

SEQ ID NO: 17813 - protein, 352 aa, Neisseria meningitidis; identical to SEQ ID NO: 6199

SEQ ID NO: 17814 - protein, 92 aa, Neisseria meningitidis; identical to SEQ ID NO: 600

SEQ ID NO: 17815 - protein, 611 aa, Neisseria meningitidis; identical to SEQ ID NO: 6640

SEQ ID NO: 17816 - protein, 198 aa, Neisseria meningitidis; identical to SEQ ID NO: 7255

SEQ ID NO: 17817 - protein, 172 aa, Neisseria meningitidis; identical to SEQ ID NO: 601

SEQ ID NO: 17818 - protein, 41 aa, Neisseria meningitidis; identical to SEQ ID NO: 3182

SEQ ID NO: 17819 - protein, 178 aa, Neisseria meningitidis; identical to SEQ ID NO: 5654

SEQ ID NO: 17820 - protein, 57 aa, Neisseria meningitidis; identical to SEQ ID NO: 735

SEQ ID NO: 17821 - protein, 120 aa, Neisseria meningitidis; identical to SEQ ID NO: 6845

SEQ ID NO: 17822 - protein, 98 aa, Neisseria meningitidis; identical to SEQ ID NO: 1735

SEQ ID NO: 17823 - protein, 153 aa, Neisseria meningitidis; identical to SEQ ID NO: 7521

SEQ ID NO: 17824 - protein, 165 aa, Neisseria meningitidis
MRKSRLSQYKQNKLIELFVTGVTARTAAELVGVNKNTAAYYFHRLRLLIYQNSPHLEMFDGEVEADESYFGGQRKGKRGRGAAGKVAVFGLLKRNGKVYTVTVPNTQTATLFPIIREQVKPDSIIYTDCYRSYDVLDVREFSHFSFAETSFSYQSQHTFCTTKPY

SEQ ID NO: 17825 - protein, 92 aa, Neisseria meningitidis; identical to SEQ ID NO: 1005

SEQ ID NO: 17826 - protein, 145 aa, Neisseria meningitidis; identical to SEQ ID NO: 7262

SEQ ID NO: 17827 - protein, 172 aa, Neisseria meningitidis; identical to SEQ ID NO: 6617

SEQ ID NO: 17828 - protein, 37 aa, Neisseria meningitidis
MVQQGAATQNSFLFPPCLSKPMPSEAGMFQTASHQTP

SEQ ID NO: 17829 - protein, 72 aa, Neisseria meningitidis; identical to SEQ ID NO: 113

SEQ ID NO: 17830 - protein, 122 aa, Neisseria meningitidis; identical to SEQ ID NO: 848

SEQ ID NO: 17831 - protein, 120 aa, Neisseria meningitidis; identical to SEQ ID NO: 1496

SEQ ID NO: 17832 - protein, 209 aa, Neisseria meningitidis
MKITHCKLKKKVQKELLRFLCWKLPPVLPPIFWVSIPIRQHCSTVKSARLSTIIWPWLPMRFLRALSSRTKAISADGVKADVVAVRQEKWLSSAFNATDGSIPLWWIMPSLKRYSLSSKRKSCRTALFIPIVAAATSWTAVLSITASTIPRNLQTVRTTLTALRTFGIRQNASCENTTESIVNLSRCSKNANFDLTSAHRLNSLKSCGI

SEQ ID NO: 17833 - protein, 96 aa, Neisseria meningitidis; identical to SEQ ID NO: 7329

SEQ ID NO: 17834 - protein, 37 aa, Neisseria meningitidis; identical to SEQ ID NO: 6771

SEQ ID NO: 17835 - protein, 42 aa, Neisseria meningitidis; identical to SEQ ID NO: 6907

SEQ ID NO: 17836 - protein, 124 aa, Neisseria meningitidis; identical to SEQ ID NO: 6571

SEQ ID NO: 17837 - protein, 136 aa, Neisseria meningitidis
MTTYTIPKKDYQFLYIYEGTLLNYTLKNDEFHIIVQNVDYPDFPQEIPTPNYIDWVKIKFKQFSYLKFIYGYATKSQDKDIDNILELGELKQDDEILDYGGTLELIGGRCDLLTGFSIDIVCREIELEFLDQESFN

SEQ ID NO: 17838 - protein, 131 aa, Neisseria meningitidis; identical to SEQ ID NO: 1281

SEQ ID NO: 17839 - protein, 101 aa, Neisseria meningitidis; identical to SEQ ID NO: 705

SEQ ID NO: 17840 - protein, 56 aa, Neisseria meningitidis; identical to SEQ ID NO: 6169

SEQ ID NO: 17841 - protein, 130 aa, Neisseria meningitidis; identical to SEQ ID NO: 1661

SEQ ID NO: 17842 - protein, 150 aa, Neisseria meningitidis; identical to SEQ ID NO: 7624

SEQ ID NO: 17843 - protein, 134 aa, Neisseria meningitidis; identical to SEQ ID NO: 6496

SEQ ID NO: 17844 - protein, 164 aa, Neisseria meningitidis
MRKSRLSQYKQNKLIELFVAGATARTAAELVGVNKNTAAYYFHRLRLLIYQNSPHLEMFDGEVEADESYFGGQRKGKRGRGAAGKVAVFGLLKRNGKVYTVTVPNTQTATLFPIIREQVKPDSIVYTDCYRSYDVIRCERIPFLRNFVFVSITAHILLNDKTIL

SEQ ID NO: 17845 - protein, 133 aa, Neisseria meningitidis; identical to SEQ ID NO: 6682

SEQ ID NO: 17846 - protein, 150 aa, Neisseria meningitidis; identical to SEQ ID NO: 6130

SEQ ID NO: 17847 - protein, 94 aa, Neisseria meningitidis; identical to SEQ ID NO: 387

SEQ ID NO: 17848 - protein, 123 aa, Neisseria meningitidis; identical to SEQ ID NO: 130

SEQ ID NO: 17849 - protein, 107 aa, Neisseria meningitidis; identical to SEQ ID NO: 875

SEQ ID NO: 17850 - protein, 117 aa, Neisseria meningitidis; identical to SEQ ID NO: 408

SEQ ID NO: 17851 - protein, 144 aa, Neisseria meningitidis; identical to SEQ ID NO: 6

SEQ ID NO: 17852 - protein, 122 aa, Neisseria meningitidis; identical to SEQ ID NO: 83

SEQ ID NO: 17853 - protein, 142 aa, Neisseria meningitidis; identical to SEQ ID NO: 5523

SEQ ID NO: 17854 - protein, 103 aa, Neisseria meningitidis; identical to SEQ ID NO: 3787

SEQ ID NO: 17855 - protein, 303 aa, Neisseria meningitidis; identical to SEQ ID NO: 7711

SEQ ID NO: 17856 - protein, 71 aa, Neisseria meningitidis; identical to SEQ ID NO: 1785

SEQ ID NO: 17857 - protein, 131 aa, Neisseria meningitidis; identical to SEQ ID NO: 7719

SEQ ID NO: 17858 - protein, 131 aa, Neisseria meningitidis; identical to SEQ ID NO: 7720

SEQ ID NO: 17859 - protein, 130 aa, Neisseria meningitidis
MYSFEANANAVKISETVSVDTGQGAKIHKFVPKNSKTYSSDLIKTVDLTHIPTGAKARINAKITASVSRAGVLAGVGKLARLGAKFSTRAVPYVGTALLAHDVYETFKEDIQARGYQYDPETDKFAKVSG

SEQ ID NO: 17860 - protein, 138 aa, Neisseria meningitidis; identical to SEQ ID NO: 489

SEQ ID NO: 17861 - protein, 317 aa, Neisseria meningitidis; identical to SEQ ID NO: 6875

SEQ ID NO: 17862 - protein, 175 aa, Neisseria meningitidis; identical to SEQ ID NO: 7725

SEQ ID NO: 17863 - protein, 105 aa, Neisseria meningitidis; identical to SEQ ID NO: 3792

SEQ ID NO: 17864 - protein, 111 aa, Neisseria meningitidis; identical to SEQ ID NO: 7149

SEQ ID NO: 17865 - protein, 164 aa, Neisseria meningitidis; identical to SEQ ID NO: 7730

SEQ ID NO: 17866 - protein, 119 aa, Neisseria meningitidis
MKLPRNRFSLLSALWFAGGIYSLLFKAADTAPPPFPHFDKAAHLALFFAQILLTKAFKTGKLPIPYRSLMVFALCFALFSECAQAWFTATRTGSLGDVLADMAGTVLALFAARAADRPD

SEQ ID NO: 17867 - protein, 252 aa, Neisseria meningitidis; identical to SEQ ID NO: 6509

SEQ ID NO: 17868 - protein, 242 aa, Neisseria meningitidis; identical to SEQ ID NO: 5032

SEQ ID NO: 17869 - protein, 112 aa, Neisseria meningitidis; identical to SEQ ID NO: 7736

SEQ ID NO: 17870 - protein, 751 aa, Neisseria meningitidis; identical to SEQ ID NO: 7063

SEQ ID NO: 17871 - protein, 442 aa, Neisseria meningitidis; identical to SEQ ID NO: 7737

SEQ ID NO: 17872 - protein, 105 aa, Neisseria meningitidis; identical to SEQ ID NO: 7739

SEQ ID NO: 17873 - protein, 273 aa, Neisseria meningitidis; identical to SEQ ID NO: 7740

SEQ ID NO: 17874 - protein, 124 aa, Neisseria meningitidis; identical to SEQ ID NO: 1678

SEQ ID NO: 17875 - protein, 69 aa, Neisseria meningitidis; identical to SEQ ID NO: 7742

SEQ ID NO: 17876 - protein, 391 aa, Neisseria meningitidis; identical to SEQ ID NO: 2276

SEQ ID NO: 17877 - protein, 185 aa, Neisseria meningitidis; identical to SEQ ID NO: 7750

SEQ ID NO: 17878 - protein, 405 aa, Neisseria meningitidis; identical to SEQ ID NO: 3566

SEQ ID NO: 17879 - protein, 231 aa, Neisseria meningitidis; identical to SEQ ID NO: 3708

SEQ ID NO: 17880 - protein, 166 aa, Neisseria meningitidis; identical to SEQ ID NO: 1704

SEQ ID NO: 17881 - protein, 156 aa, Neisseria meningitidis; identical to SEQ ID NO: 955

SEQ ID NO: 17882 - protein, 1391 aa, Neisseria meningitidis; identical to SEQ ID NO: 4736

SEQ ID NO: 17883 - protein, 106 aa, Neisseria meningitidis; identical to SEQ ID NO: 7757

SEQ ID NO: 17884 - protein, 92 aa, Neisseria meningitidis; identical to SEQ ID NO: 752

SEQ ID NO: 17885 - protein, 179 aa, Neisseria meningitidis; identical to SEQ ID NO: 403

SEQ ID NO: 17886 - protein, 177 aa, Neisseria meningitidis; identical to SEQ ID NO: 6774

SEQ ID NO: 17887 - protein, 436 aa, Neisseria meningitidis; identical to SEQ ID NO: 1523

SEQ ID NO: 17888 - protein, 206 aa, Neisseria meningitidis; identical to SEQ ID NO: 1193

SEQ ID NO: 17889 - protein, 237 aa, Neisseria meningitidis; identical to SEQ ID NO: 7758

SEQ ID NO: 17890 - protein, 919 aa, Neisseria meningitidis; identical to SEQ ID NO: 3807

SEQ ID NO: 17891 - protein, 96 aa, Neisseria meningitidis; identical to SEQ ID NO: 4410

SEQ ID NO: 17892 - protein, 290 aa, Neisseria meningitidis; identical to SEQ ID NO: 7766

SEQ ID NO: 17893 - protein, 483 aa, Neisseria meningitidis; identical to SEQ ID NO: 5802

SEQ ID NO: 17894 - protein, 358 aa, Neisseria meningitidis; identical to SEQ ID NO: 7769

SEQ ID NO: 17895 - protein, 113 aa, Neisseria meningitidis; identical to SEQ ID NO: 1729

SEQ ID NO: 17896 - protein, 360 aa, Neisseria meningitidis
MMKIKALMIAAALLAAADVHAAPQKAKTASAKAAKAAKAAKAAKAAKAAKVAKVAKVAKVAKVAATAQKEAAPAQQQGGIRFSDGIAAVADNEVITRRRLAEAVAEAKANLPKDAQISESELSRQVLMQLVNQSLIVQAGKRRNIQASEAEIDAVVAKNPALKNLSPAQRRDFADNIIAEKVRQQAVMQNSRVSEAEIDAFLEQAQKQGITLPEGAPLRQYRAQHILIKADSENAAVGAESTIRKIYGEARSGTDFSSLARQYSQDASAGNGGDLGWFADGVMVPAFEEAVHALKPGQVGAPVRTQFGWHIIKLNEVRDAGTPQERIRNSVRQYIFQQKAEQATVNLLRDLHSGAYVDIR

SEQ ID NO: 17897 - protein, 214 aa, Neisseria meningitidis; identical to SEQ ID NO: 1743

SEQ ID NO: 17898 - protein, 82 aa, Neisseria meningitidis; identical to SEQ ID NO: 1744

SEQ ID NO: 17899 - protein, 65 aa, Neisseria meningitidis; identical to SEQ ID NO: 3913

SEQ ID NO: 17900 - protein, 149 aa, Neisseria meningitidis; identical to SEQ ID NO: 628

SEQ ID NO: 17901 - protein, 216 aa, Neisseria meningitidis; identical to SEQ ID NO: 7775

SEQ ID NO: 17902 - protein, 228 aa, Neisseria meningitidis; identical to SEQ ID NO: 380

SEQ ID NO: 17903 - protein, 68 aa, Neisseria meningitidis; identical to SEQ ID NO: 3821

SEQ ID NO: 17904 - protein, 125 aa, Neisseria meningitidis; identical to SEQ ID NO: 7790

SEQ ID NO: 17905 - protein, 135 aa, Neisseria meningitidis; identical to SEQ ID NO: 7791

SEQ ID NO: 17906 - protein, 369 aa, Neisseria meningitidis; identical to SEQ ID NO: 7792

SEQ ID NO: 17907 - protein, 208 aa, Neisseria meningitidis; identical to SEQ ID NO: 7817

SEQ ID NO: 17908 - protein, 180 aa, Neisseria meningitidis; identical to SEQ ID NO: 7793

SEQ ID NO: 17909 - protein, 307 aa, Neisseria meningitidis; identical to SEQ ID NO: 7794

SEQ ID NO: 17910 - protein, 143 aa, Neisseria meningitidis; identical to SEQ ID NO: 7796

SEQ ID NO: 17911 - protein, 104 aa, Neisseria meningitidis; identical to SEQ ID NO: 1772

SEQ ID NO: 17912 - protein, 186 aa, Neisseria meningitidis; identical to SEQ ID NO: 104

SEQ ID NO: 17913 - protein, 134 aa, Neisseria meningitidis; identical to SEQ ID NO: 1773

SEQ ID NO: 17914 - protein, 136 aa, Neisseria meningitidis; identical to SEQ ID NO: 1774

SEQ ID NO: 17915 - protein, 145 aa, Neisseria meningitidis; identical to SEQ ID NO: 1775

SEQ ID NO: 17916 - protein, 130 aa, Neisseria meningitidis; identical to SEQ ID NO: 7797

SEQ ID NO: 17917 - protein, 186 aa, Neisseria meningitidis; identical to SEQ ID NO: 7798

SEQ ID NO: 17918 - protein, 106 aa, Neisseria meningitidis; identical to SEQ ID NO: 7799

SEQ ID NO: 17919 - protein, 399 aa, Neisseria meningitidis; identical to SEQ ID NO: 7800

SEQ ID NO: 17920 - protein, 109 aa, Neisseria meningitidis; identical to SEQ ID NO: 6762

SEQ ID NO: 17921 - protein, 105 aa, Neisseria meningitidis; identical to SEQ ID NO: 5128

SEQ ID NO: 17922 - protein, 129 aa, Neisseria meningitidis; identical to SEQ ID NO: 7802

SEQ ID NO: 17923 - protein, 86 aa, Neisseria meningitidis; identical to SEQ ID NO: 3834

SEQ ID NO: 17924 - protein, 114 aa, Neisseria meningitidis; identical to SEQ ID NO: 6153

SEQ ID NO: 17925 - protein, 144 aa, Neisseria meningitidis; identical to SEQ ID NO: 4260

SEQ ID NO: 17926 - protein, 104 aa, Neisseria meningitidis; identical to SEQ ID NO: 6457

SEQ ID NO: 17927 - protein, 180 aa, Neisseria meningitidis
MRTAEKNRLHQVHETQVGSVKQLIAHFDRLIDESDKQIDDHTHTHFDGKAQVAEQIKGIGSITTATLMAMLPELGRLSHKRIASLVGIAPHPRKSGEAKFKSRCFGGRSAVLKALYMATVAATRFEPLIRDFHQRPLSEGKPYKVAVTACMRKLLETFAKFLSLTTTEIPTQVFGCFRPK

SEQ ID NO: 17928 - protein, 154 aa, Neisseria meningitidis; identical to SEQ ID NO: 741

SEQ ID NO: 17929 - protein, 183 aa, Neisseria meningitidis; identical to SEQ ID NO: 3839

SEQ ID NO: 17930 - protein, 74 aa, Neisseria meningitidis
VGCRVCFSPLHQKFLENRRESAVLVSAGTVEMGNIDGIDGSGGLKPTLVYWNHRIIATNRPAATRAHPRHTTVA

SEQ ID NO: 17931 - protein, 93 aa, Neisseria meningitidis
MQNGGGKIYQTADNVEGIMLLKVVPERTVSADAKTRDPMWDNAALQTSEGVNFIARFLGFFSDGEYRYVDVLQPNHSDIIRYSGKDFSAKSNI

SEQ ID NO: 17932 - protein, 74 aa, Neisseria meningitidis; identical to SEQ ID NO: 7804

SEQ ID NO: 17933 - protein, 121 aa, Neisseria meningitidis; identical to SEQ ID NO: 7805

SEQ ID NO: 17934 - protein, 140 aa, Neisseria meningitidis; identical to SEQ ID NO: 6150

SEQ ID NO: 17935 - protein, 37 aa, Neisseria meningitidis; identical to SEQ ID NO: 970

SEQ ID NO: 17936 - protein, 137 aa, Neisseria meningitidis; identical to SEQ ID NO: 1900

SEQ ID NO: 17937 - protein, 811 aa, Neisseria meningitidis; identical to SEQ ID NO: 7812

SEQ ID NO: 17938 - protein, 407 aa, Neisseria meningitidis; identical to SEQ ID NO: 6513

SEQ ID NO: 17939 - protein, 122 aa, Neisseria meningitidis
LNNIPVEIRLLKNRTVLVLTYGDEPKNLPAEFLRVYSPSAEVRGHGVGQDVLQTGKADVQIADLQPVGQYALKISFSDGHDSGLYDWAYLHRLAYGYDAMWQEYLDKLAAAGASRFEKQSDC

SEQ ID NO: 17940 - protein, 490 aa, Neisseria meningitidis
MSHLFRKEVFVAQQNKWTGQVILTRPFSFLFLTFCAFLIALCIIIFLIFGSYTNKTTVEGQLLPTMGVVRVYSSDIGTITHKFVEDGNFVKAGEPLFKLSTSRFGEKGNVQAKLAAEANLKKTLALQELERLKRIHQNEQKNVHNNIHRLNNQLENIKQQITGQNRQIRLAEKTLNKNKFLASQGAVSQQDKMTAESHLLEQRSRLESLKREQNNAIRELDEQKITLSSLPERHKTELSQLNRAITEMNQEILDFDLKSEQTIRASKSGDLCKNNLLTKFDAKCAKKFSIANLPNIEQKVGKIRKVLHFENEIEHKILVTYVIAKVSGYISTINVDIGQQVEPSKLLLSIVPEQTELVANLYIPSKAVGFIKPKDKVVLRYQAYPYQKFGHATGEIISVARTALGKQKLSGLGIIFTNPTLLNEPAYLVKVKLEKQTIKAYGENKPLQIGMILEADILHERKLYEWVLDPLYSISGKINKWIIYQDCPLD

SEQ ID NO: 17941 - protein, 694 aa, Neisseria meningitidis; identical to SEQ ID NO: 7824

SEQ ID NO: 17942 - protein, 380 aa, Neisseria meningitidis; identical to SEQ ID NO: 7822

SEQ ID NO: 17943 - protein, 214 aa, Neisseria meningitidis; identical to SEQ ID NO: 7826

SEQ ID NO: 17944 - protein, 271 aa, Neisseria meningitidis; identical to SEQ ID NO: 7827

SEQ ID NO: 17945 - protein, 421 aa, Neisseria meningitidis; identical to SEQ ID NO: 7830

SEQ ID NO: 17946 - protein, 548 aa, Neisseria meningitidis; identical to SEQ ID NO: 6510

SEQ ID NO: 17947 - protein, 333 aa, Neisseria meningitidis; identical to SEQ ID NO: 11823

SEQ ID NO: 17948 - protein, 300 aa, Neisseria meningitidis; identical to SEQ ID NO: 7835

SEQ ID NO: 17949 - protein, 697 aa, Neisseria meningitidis
MKTDIQTELTQALLPHEKVWANEEKTILAKNILLDLVEKTDPTIIGLLLSNDELKRHFFVEVNGVLVFKLQDFRFFLDKHSVNNSYTKYANRIGLTDSNRFLKDSSDIVLDFPFKDCVLNGGQSTEEGEEIYFKRNNSQPASQPASQPASQPASQPASQLYTKLTRKRQEIFFNQTLAFDEIDRLFDAKAFSKFSRYTADGKQAVGEIKRHSDGTPAENLIIKGNNLIALHSLAKQFKGKVKLIYIDPPYNTGNDGFKYNDKFNHSTWLTFMKNRLEIAKELLMKDGSIFVSIDDNEQAYLKILMDEVFGNENFICNFIWEKKTGASDAKQIATITEFVLCYSKNFKTVKLNKNTFSYDTERYKLSDKFEQERGKYYIDNLDRGGLQYSDSLNFAIQCPDGTFTYPNGRTEFVNDGWIWKWSKNKIDWAITNGFLEFRKSKSKKSGWSVCYKNYMLVDNENKPIERSAPYKNLIQDILNTHATDELKKLFGSKVFTTPKPESLLQYLIQIATSESDIVLDYHLGSGTTAAVAHKMNRQYIGIEQMDYIETLAVERLKKVIDGEQGGISKAVNWQGGGEFVYAELAPFNETAKQQILACEDSDGIKTLFEGLCERYFLKYNVSVNEFSQIIQEPEFQSLPLDEQKQMVLEMLDLNQMYVSLSEMDDEQFADCLNDDDKALSRAFYQSVKNQAEKKDGE

SEQ ID NO: 17950 - protein, 924 aa, Neisseria meningitidis; identical to SEQ ID NO: 7839

SEQ ID NO: 17951 - protein, 327 aa, Neisseria meningitidis; identical to SEQ ID NO: 294

SEQ ID NO: 17952 - protein, 385 aa, Neisseria meningitidis; identical to SEQ ID NO: 7841

SEQ ID NO: 17953 - protein, 77 aa, Neisseria meningitidis; identical to SEQ ID NO: 760

SEQ ID NO: 17954 - protein, 702 aa, Neisseria meningitidis; identical to SEQ ID NO: 7846

SEQ ID NO: 17955 - protein, 1028 aa, Neisseria meningitidis; identical to SEQ ID NO: 7847

SEQ ID NO: 17956 - protein, 451 aa, Neisseria meningitidis; identical to SEQ ID NO: 7911

SEQ ID NO: 17957 - protein, 170 aa, Neisseria meningitidis; identical to SEQ ID NO: 7849

SEQ ID NO: 17958 - protein, 622 aa, Neisseria meningitidis; identical to SEQ ID NO: 7852

SEQ ID NO: 17959 - protein, 325 aa, Neisseria meningitidis
MQENPTVWLFDLDNTLHDADAGIFTLINRAMTRYMARRLKLSESAASDLRQDYWHRYGATLAGLQIHHPEIDIAEFLRESHPIDAILTRLHGMPETQNTLSRLKGRKAVFSNGPSFYVRAVVNALGLENRFDALFGTDDFGLLYKPNPQAYLNVCRLLDVPPECCIMVDDSADNLHQAKALGMKTVRFGAKSHALPFIDASVSDMAQLARYAETLSEHRQNHYNTPYPPKIRKKTMRKTFLFLTAAAALLSGCAWETYQDGNGKTAVRQKYPAGTPVYYQDGSYSKNMNYNQYRPERHAVLPNQTGNNADEEHRQHWQKPKFQNR

SEQ ID NO: 17960 - protein, 152 aa, Neisseria meningitidis; identical to SEQ ID NO: 1438

SEQ ID NO: 17961 - protein, 407 aa, Neisseria meningitidis; identical to SEQ ID NO: 7856

SEQ ID NO: 17962 - protein, 384 aa, Neisseria meningitidis; identical to SEQ ID NO: 7860

SEQ ID NO: 17963 - protein, 147 aa, Neisseria meningitidis; identical to SEQ ID NO: 2466

SEQ ID NO: 17964 - protein, 208 aa, Neisseria meningitidis; identical to SEQ ID NO: 1448

SEQ ID NO: 17965 - protein, 77 aa, Neisseria meningitidis; identical to SEQ ID NO: 92

SEQ ID NO: 17966 - protein, 83 aa, Neisseria meningitidis; identical to SEQ ID NO: 7862

SEQ ID NO: 17967 - protein, 141 aa, Neisseria meningitidis; identical to SEQ ID NO: 7863

SEQ ID NO: 17968 - protein, 317 aa, Neisseria meningitidis; identical to SEQ ID NO: 7864

SEQ ID NO: 17969 - protein, 119 aa, Neisseria meningitidis; identical to SEQ ID NO: 7865

SEQ ID NO: 17970 - protein, 214 aa, Neisseria meningitidis; identical to SEQ ID NO: 7866

SEQ ID NO: 17971 - protein, 106 aa, Neisseria meningitidis; identical to SEQ ID NO: 7868

SEQ ID NO: 17972 - protein, 69 aa, Neisseria meningitidis; identical to SEQ ID NO: 7869

SEQ ID NO: 17973 - protein, 63 aa, Neisseria meningitidis; identical to SEQ ID NO: 7871

SEQ ID NO: 17974 - protein, 78 aa, Neisseria meningitidis; identical to SEQ ID NO: 3900

SEQ ID NO: 17975 - protein, 175 aa, Neisseria meningitidis
MEFVNNLVIFSFLLLMLIPIFFVVYGIYHKIRYRKICILRTSFILLVVILCSMYYIYCRYLDQQKVAYYCIDEQCISIVHLYKDYGINSPTYARIYAGKILFRFQVRAKNYAELLMEDDISISKKILGNKFIIYGSLPVIYGNVDNIEVKEATGYIDRSSTDYIVSRNLKFRHLY

SEQ ID NO: 17976 - protein, 127 aa, Neisseria meningitidis; identical to SEQ ID NO: 3901

SEQ ID NO: 17977 - protein, 78 aa, Neisseria meningitidis; identical to SEQ ID NO: 1011

SEQ ID NO: 17978 - protein, 96 aa, Neisseria meningitidis; identical to SEQ ID NO: 7875

SEQ ID NO: 17979 - protein, 168 aa, Neisseria meningitidis; identical to SEQ ID NO: 7876

SEQ ID NO: 17980 - protein, 140 aa, Neisseria meningitidis; identical to SEQ ID NO: 7877

SEQ ID NO: 17981 - protein, 147 aa, Neisseria meningitidis; identical to SEQ ID NO: 7879

SEQ ID NO: 17982 - protein, 139 aa, Neisseria meningitidis; identical to SEQ ID NO: 7880

SEQ ID NO: 17983 - protein, 80 aa, Neisseria meningitidis; identical to SEQ ID NO: 1154

SEQ ID NO: 17984 - protein, 78 aa, Neisseria meningitidis; identical to SEQ ID NO: 7882

SEQ ID NO: 17985 - protein, 100 aa, Neisseria meningitidis; identical to SEQ ID NO: 7884

SEQ ID NO: 17986 - protein, 68 aa, Neisseria meningitidis; identical to SEQ ID NO: 3911

SEQ ID NO: 17987 - protein, 64 aa, Neisseria meningitidis; identical to SEQ ID NO: 631

SEQ ID NO: 17988 - protein, 147 aa, Neisseria meningitidis; identical to SEQ ID NO: 4898

SEQ ID NO: 17989 - protein, 267 aa, Neisseria meningitidis; identical to SEQ ID NO: 7890

SEQ ID NO: 17990 - protein, 326 aa, Neisseria meningitidis; identical to SEQ ID NO: 7891

SEQ ID NO: 17991 - protein, 144 aa, Neisseria meningitidis; identical to SEQ ID NO: 7893

SEQ ID NO: 17992 - protein, 100 aa, Neisseria meningitidis; identical to SEQ ID NO: 1890

SEQ ID NO: 17993 - protein, 92 aa, Neisseria meningitidis; identical to SEQ ID NO: 7895

SEQ ID NO: 17994 - protein, 73 aa, Neisseria meningitidis; identical to SEQ ID NO: 3916

SEQ ID NO: 17995 - protein, 72 aa, Neisseria meningitidis; identical to SEQ ID NO: 7897

SEQ ID NO: 17996 - protein, 97 aa, Neisseria meningitidis; identical to SEQ ID NO: 7898

SEQ ID NO: 17997 - protein, 67 aa, Neisseria meningitidis; identical to SEQ ID NO: 7899

SEQ ID NO: 17998 - protein, 65 aa, Neisseria meningitidis; identical to SEQ ID NO: 1894

SEQ ID NO: 17999 - protein, 53 aa, Neisseria meningitidis; identical to SEQ ID NO: 7901

SEQ ID NO: 18000 - protein, 74 aa, Neisseria meningitidis; identical to SEQ ID NO: 3918

SEQ ID NO: 18001 - protein, 107 aa, Neisseria meningitidis
LINMKTSTVVFGGFFMADNGERIQIPVLENPDIREINHFFSVSNFEKKTGVLVFRIIPEPEFGNTELTVYFKKGYYSGLTKTSTALPRLAVLVFCSTISDENKHPRQ

SEQ ID NO: 18002 - protein, 99 aa, Neisseria meningitidis; identical to SEQ ID NO: 3688

SEQ ID NO: 18003 - protein, 68 aa, Neisseria meningitidis; identical to SEQ ID NO: 531

SEQ ID NO: 18004 - protein, 86 aa, Neisseria meningitidis; identical to SEQ ID NO: 7910

SEQ ID NO: 18005 - protein, 132 aa, Neisseria meningitidis
LFVCFEKCLFPDFAIPIRFCAVRCVLARTCSKSHVIPVFEALIRDADFQYIFSYNNEGLMSVGQVREIFERFGKYNLVQTEYRRFKADKTENRNHKANSIFEFLHILEKTFYSGLTKTSTALPRLSSKRTIL

SEQ ID NO: 18006 - protein, 336 aa, Neisseria meningitidis
MIFSIIVPIYNVENLRCCVDSVLAENFADYEMILVDDGSPDGCGKICDEYAGKYPHIKVIHQENGGLSDARNAGIRAAKGDYLIFLDSDDYWADTNRSKNAGGGILFDLQQLADKKVDLILHPSSFNYRDIPKGADFSDNDFVRHFETLVEGRYYIANAWTKIVRREIIIKNNLFFPKGYIHEDFPYSLQLARFIKTFAFYDNPFYQYRVLGGSISHNIKYKNFSDVLTHLDWGVDFLVENKNSPIYGGLQKFVFDNIGYLRSILVRLYFSKNIILIYRKYFSFKEKCRKIFGAKAIRPVFIGKTAFIIGLPILRLLVPPMLYPAIKAVYQKFFSE

SEQ ID NO: 18007 - protein, 218 aa, Neisseria meningitidis; identical to SEQ ID NO: 3932

SEQ ID NO: 18008 - protein, 379 aa, Neisseria meningitidis
MDLSIVVPIYNVESYLEACLSSIESILSNENVELILVNDGSKDGSEDICYKYIDKIQQTTNNKQQTTNNKQQTTNNKQQTTNNKQQTTNNKQQTTNNKQQTTNNKQQTTNNKHRTPNIKYIYQDNQGLSEARNTGIKNSNGKYIVFIDSDDFINCQILLDFLSKDDTDMPDVVFLNAVKYDKGSVSYFGEDYQPEKILNQSKVEVLKGLCRFRKFPGSAWNKIIKRELIIREKLFFERGIYSEDIEWSMRLFNAATTFSYLDGCYYYYRQGRKDSITGTVSEKSIKSLLYILEKNAEMEFNRDISSYLYSFLSYEYLVLLFIMTSKNIECDADIKRRAYHLRFMLLKSNKLIYKLIFPIITLLGVDITGRILKAIRGNI

SEQ ID NO: 18009 - protein, 350 aa, Neisseria meningitidis; identical to SEQ ID NO: 7917

SEQ ID NO: 18010 - protein, 349 aa, Neisseria meningitidis
MKLKIDIATNNFKHGGGTERYTLDLVKGLNRQNITPAVYATKFDHSIPEYALIEPHLVDQHRTLKKLRSFLFSSRLAQTRKNSAAKLIACHHADYADLLICGGTHLGYLHHMAQKPNLLDRLAIRRNRSNYATAKLIMAHSHMMRRELVGLYGVPPERIQVAPPPDTERFFPQPGETADLRAKYGFADHETVFLFPSTGHTRKGLELLADFFEHTSLPVKLAVVGSPLPRPMKNVVGLGFCTDMPELYRAADFTIMASLYEPFGLVGVESVLCGTRVVLSENMACTEVMNEEAGFFFSRQNPETLAQAVAQAVSLKKQGGHRLSDPMRALNYNPALDKHIGLILEMLAA

SEQ ID NO: 18011 - protein, 235 aa, Neisseria meningitidis; identical to SEQ ID NO: 7920

SEQ ID NO: 18012 - protein, 140 aa, Neisseria meningitidis; identical to SEQ ID NO: 15946

SEQ ID NO: 18013 - protein, 433 aa, Neisseria meningitidis; identical to SEQ ID NO: 7922

SEQ ID NO: 18014 - protein, 320 aa, Neisseria meningitidis; identical to SEQ ID NO: 7923

SEQ ID NO: 18015 - protein, 136 aa, Neisseria meningitidis; identical to SEQ ID NO: 7924

SEQ ID NO: 18016 - protein, 707 aa, Neisseria meningitidis; identical to SEQ ID NO: 7925

SEQ ID NO: 18017 - protein, 502 aa, Neisseria meningitidis
MTTTPANVLASVDLGSNSFRLQICENNNGQLKVIDSFKQMVRFAAGLDEQKNLSAASQEQALDCLAKFGERLRGFRPEQVRAVATNTFRVAKNIADFLPKAEAALGFPIEIIAGREEARLIYTGVIHTLPPGRGKMLVIDIGGGSTEFVIGSTLNPDITESLPLGCVTYSLRFFQNKITAKDFQSAISAARNEIQRISKNMRREGWDFAVGTSGSAKSIRDVLAAEMPQEADITYKGMRALAERIIEAGSVKKAKFENLKPERIEVFAGGLAVMMAAFEEMKLDRMTVTEAALRDGVFYDLIGRGLNEDMRGQTVAEFQHRYHVSLNQAKRTAETAQTFMDSLCHAKNVTVQELALWQQYLGRAAALHEIGLDIAHTGYHKHSAYILENADMPGFSRKEQTILAQLVIGHRGDMKKMSGIIGTNEMLWYAVLSLRLAALFCRSRQDLSFPKNMQLRTDTESCGFILRIDREWLERHPLIADALEYESVQWQKINMPFKVEAV

SEQ ID NO: 18018 - protein, 117 aa, Neisseria meningitidis; identical to SEQ ID NO: 7928

SEQ ID NO: 18019 - protein, 702 aa, Neisseria meningitidis; identical to SEQ ID NO: 7930

SEQ ID NO: 18020 - protein, 676 aa, Neisseria meningitidis
MKLEASKHKQKFKKSFIVSLFFSILYTSPLLAVDYVYDKTKLTNDEITRLKKLRDKTSEYWKKETYLITEDNPKVPPFPALYPRTYQFENINNSKKISFYDQEYTEGYLVGFARGLGVAKRNGDTEEQIRKYFKECFNSNTKIRDYSTCQAEKFGSHPLIVKSHIFSLGPKIKNSHINSEILSVGNYTEWANQVIHHIENYVSFAAHLYSGLDPFHYIEVTDNSHVIGQTISLDEFRLENSLWEPRWDSNVGKLKTTNADIRFNTKSESLLVKEDYAGGARFRFAYDPKEAKNTALIFEKNVTGTSDIIFENPIDDLKSLDGHQIIKVNGTADKHAFRLSGKHQKGIYTLSLQQRPEGFFTKVQERDDMAIYAQQAQAANTLFALRLNNKNSDIFDRTLPRKGLWLRVIDGHSNQWVQGKTAPVEGYRKGVQLGGEVFTWQNESNQLSIGLMGGQAEQRSTFHNPDTDNLTTGNVKGFGAGVYATWHQLQDKQTGAYADSWMQYQRFRHRINTEDGTERFTSKGITASIEAGYNALLAEHFTKKGNSLRVYLQPQAQLTYLGVNGKFSDSENAHVNLLGSRQLQTRVGVQAKAQFSLYKNIAIEPFAAVNALYHNKPFGVEMDGERRVINNKTAIESQLGVAVKIKSHLTLQATFNRQTGKHHQAKQGALNLQWTF

SEQ ID NO: 18021 - protein, 682 aa, Neisseria meningitidis
MLPTQPNPTQPNPTQPNPPSPDLSDTAGANTEAIYTSDGITANSTQLEQLKKLFPACFDADGNFLIDRLQAEIAPQTDIGREFYEMNWLGKSYARLLRNLPPETLISEDKTHNAKPENAGSQNLLIRGDNLEVLKHLKNAYTNSVKMIYIDPPNTGSDGFVYQDDRKFTPAELARLANIDEDEAARILDFTDKGSNSHSAWLTFMYPRLYVARELLKDDGVIFISIDDNEAAQLKLLCDEVFGEGNFVAQLPWRKRTAKSDVPFGISQDYEWIFVFAKSCQFIAATKGKERRYYETDDFPDRPWRTHDLTKQTTAAERPNSFFTMVDPKTGKKYPANPNATWRVTKDTFQDYYNKGKIVFPDDYDFLNISNPVMRYFKDDDMKKAGEDFGKVAVSSRLPENVGTLADAVAEYLAIFSRTLPENIGMTKEGTKEITDLFGSKIFTFPKPSQLIKFLVSISSKSNDLILDFFAGSGTTAHAVMQLNAEGQNGNRRYICVQLPEKTAEKSEARKAGYPTIFDITKARIEKAAAKIRVEHPDYTGDSGFKIFQTADNFRQHPDKDFSPEQPDLPLNDELSEEQLQTLLTTWTLYDGAALTTPVEPVRLGAYTAYLCEKRLYLMNAGFTSADLLAFIRKLDDDADFNPNRVIVFGSNMASAMQHELDQAVRGYANKKEIELNVVIRV

SEQ ID NO: 18022 - protein, 512 aa, Neisseria meningitidis
MNMLGALAKVGSLTMVSRVLGFVRDTVIARAFGAGMATDAFFVAFKLPNLLRRVFAEGAFAQAFVPILAEYKETRSKEATEAFIRHVAGMLSFVLVIVTALGILAAPWVIYVSAPGFAKDADKFQLSIDLLRITFPYILLISLSSFVGSVLNSYHKFSIPAFTPTFLNVSFIVFALFFVPYFDPPVTALAWAVFVGGILQLGFQLPWLAKLGFLKLPKLNFKDAAVNRVMKQMAPAILGVSVAQISLVINTIFASYLQSGSVSWMYYADRMMELPGGVLGAALGTILLPTLSKHSANQDTEQFSALLDWGLRLCMLLTLPAAVGLAVLSFPLVATLFMYREFTLFDAQMTQHALIAYSFGLIGLIMIKVLAPGFYARQNIKTPVKIAIFTLICTQLMNLAFIGPLKHVGLSLAIGLGACINAGLLFYLLRRHGIYQPGKGWAAFLAKMLLSLAVMGGGLWAAQACLPFEWVRAGGMRKAGQLCILIAVGGGLYFASLAALGFRPRHFKRVEN

SEQ ID NO: 18023 - protein, 176 aa, Neisseria meningitidis
MQGFELEDLTLWLIRDAGEDQMWIDRWAVSYPVVQMSEASAGQSIGEWQAGLQTAFERIQGRHIAVVAHGAGAAAFLAWLYRADILTRKKIANIILVPQHPDIFSDDAEHTFQRVRCPCRAALVVSEHGDVPRDWAQKQADTWNARLLVSPHSGSLNGMLGGWQWGMKLMQEMLLA

SEQ ID NO: 18024 - protein, 337 aa, Neisseria meningitidis; identical to SEQ ID NO: 263

SEQ ID NO: 18025 - protein, 281 aa, Neisseria meningitidis
MPQGRQEKGEEMDKIRVAAVQMVSGVSPETNVAAMKRLVARAAEQGVDWVLLPEYWVLMGANDTDKLALAEPLGGGRFQTALSETAKECGVVLFGGTVPLQSPEAGKVMNTLLVYGRDGKRTGLYHKMHLFGFSGLGERYAEADTIRAGGDVPHLSAEGVPVAAGICYDVRFPEFFRRQLPFDVLMLPAAFTHTTGKAHWELLLRARAVENQCYVVAAAQGGLHENGRRTFGHSMIVDPWGDVLDVLPEGEGVVTADIDANRLNSVRNRLPALKYRVLDAV

SEQ ID NO: 18026 - protein, 66 aa, Neisseria meningitidis; identical to SEQ ID NO: 1185

SEQ ID NO: 18027 - protein, 2813 aa, Neisseria meningitidis
MNRTLYKVVFNKHRNCMIVVAENAKREGKNTADTQAVGILPNDIAGFAGFIHSISVISFSLSLLLGSALILTSSSANAQGIVADKSAPAQQQPTILQTGNGIPQVNIQTPTSAGVSVNQYAQFDVGNRGAILNNSRSNTQTQLGGWIQGNPWLARGEARVVVNQINSSHSSQLNGYIEVGGRRAEVVIANPAGIAVNGGGFINASRATLTTGQPQYQAGDLSGFKIRQGNVVIAGHGLDARDTDFTQILSHAVKIDGPVWGKDVRVSAGKNDVSADGSIRSSHSPATNINSDNSLYAIDTGALGGMYAGKITLISTDRDASVRNQGQWFASAGNVAVNAEGKLVNTGMIAATGENHAVSLHARNVHNSGTVASQDDANIHSQTLDNSGTVLSSGQLTVRNLGRLKNHNNGTIQAARLDMSTGGLDNTGNITQTGSQALDLVSAGKFDNSGKIGVSDVPQTGLNPNPSVIPQIPSTATGSGSSTVLASKPGSNNPVSPTAPAKNYAGGRIQTTGAFDNAGSINAGGQIDIAAQNGLENSGSLNAAKLRVSGDSFNNTVKGKLQAHDLAVNTQTAKNSGHLLTLTGKIDNRELHNAGEIAANNLTLIHSGRLSNDKKGNIRAAHLQLDTAGLHNAGNILADSGTVTTKNNLRNTGKVSVARLNTEGQTLDNTHGHIEAETVNIQSQQLTNQSGHITATEQLTINSRNVDNQNGKLLSANQAQLAVSDGLYNQHGEIATNRQLSIHDKNQNTLALNNADGTIQSAGNVSLQAKSLANNGTLTAGNKLDIALTDDFVVERDLTAGKQLNLSIKGRLKNTHTLQASHTLKLNAGNIDNQVTGKIIGGEQTDITSEQHVDNRGLINSDGLTHIGAGQTLTNTGTGKIYGNHIALDAQILLNREETTEGSTKAGAIAARKRLDIGAKEIHNQEGALLSSEGIFAVGNRLDEQHHAAGMADTFVNGSAGLEVQGDALMSVRNMQNINNHFKTETYLAKAEKQVRDYTVLGQNTYYQAGKDGLFDNSQGQKDQTTATFHLKNGSRIEANQWHVRDYHIETYKERIIENRPAHITVGGDLTASGQNWLNKDSRIVVGGRIITDDLNQKEITNQSTTGKGRTDAVGTQWDSVTKKGWYSGRKRQRRTERNHTPYHDTQLFTHDFDTPVSVIQQNAASPSFQPAASAIKLIDGVSTAAVNGQRIHTGNVVSLNNATVTLPNSSLYTTHPDNKGWLVETDPQFADYRRWLGSDYMLQQLQLDTNHLHKRLGDGYYEQKLVNEQIHQLTGYRRLDGYRSDEEQFKALMDNGLTAAKTFGLTPGIALSAEQVARLTSDIVWMENQTVTLSDGSTQTVLVPKVYALARKGDLNTSGGLISAEQVLLKLQNGNLTNSGTIAGRQAVLIQARNINSNGNIQADQIGLKAEKSINIDGGQVQAGRLLTAQAQNINLNGTTQTSGNERNGNTAIDRMAGINVVGSHTEQVDNRTSDGILSLHAGNDINLNAATVSNQVKGGTTQITAGNNLNLGTIHTEHREAYGTLDDENHRHVRQSTEVGSSIRTQNGALLRAGNDLKIRQGELEAEEGKTVLAAGRDVTISEGRQITELDTSVSGKSKGILSSTKTQDRYRFSHDEAVGSNIGGGKMIVAAGQDINVRGSNLISDKGIVLKAGHDIDISTAHNRYTGNEYHESKKSGVMGTGGLGFTIGNRKTTDDTDRTNIVHTGSIIGSLNGDTVTVAGNRYRQTGSTVSSPEGRNTVTAKSIDVEFANNRYATDYAHTQEQKGLTVALNVPVVQAAQNFIQAAQNVGKSKNKRVNAMAAANAAWQSYQAAQQMQQFAPSSSAGQGQNNNQSPSISVSITYGEQKSRNEQKRHYTEAAASQIIGKGQTTLAATGSGEQSNINITGSDVIGHAGTALIADNHIRLQSAKQDGSEQSKNKSSGWNAGVAVKIGNGIRFGITAGGNIGKGKEQGGNTTHRHTHVGSTAGQTTIRSGGDTTLKGAQLIGKGIQADTRNLHIESVQDTETYQSKQQNGNVQVTVGYGFSASGSYRQSKVKADHASVTEQSGIYTGEDGYQIKVRDNTDLKGGIITSTRSAESKGKNRFQTATLTHRDIQNHSRYEGRSFGIGGSFDLNGGWDGTVTDKQGRPTDRISPAAGYGSDGDSKNSTTRSGINTRNIHITDEAGQLARTGRTAKETEARIYTGIDTETADQHSGRLKNSFDKDAVAKEINLQREVTKEFGRNAAQAVAAVADKLGNTQSYERYQEARTLLEAELQNTDSEAEKAAIRASLGQVNAYLAENQSRYDTWKEGGIGRSILHGAAGGLTTGSLGGILAGGGTSLAAPYLDKAAENLGTAGKAAVNALGGAAIGYAAGGNVGTAAVGANVDWNNRQLHNSEIRKIKNNAAKFAKLHPGISQRQAEERLVAQAMRQVDAAYYAKHADTDTAAEQFLRSIAGSFKADGETFLDFAPMKYYRDSGKFAEHTGYRDLRAKLGQNPVHTEAQRNRTIEEKTYGTIGRGVGKGIGNTLANNLQAGPPHYVLGITNYSNWGKELIPYENPVERAIGKQAEDMTEKAVAAVSLGRSLPSKVVNVPSKLAKSIKTAETHKPLVQKRTETYFRVEGGGSGNNQAAKAAKNTEKMKAAIDQTHSGVDLPYDSRQIRAKLEKRYGAENIVSTTIPKKPVQSINNQTKPDYSSIVYTNKSGKVVNVKYKDPISGESKAVNIAYDNRGLPIFDNVSNFTTKIDNSLSYTGQMRAATKDLWKAIESGQVPKNQFTNEQLTKIKAGNEKIPGYTWHHNAQSSPNNMQLIPNSIHTAVRHTGQKSLKKGQ

SEQ ID NO: 18028 - protein, 164 aa, Neisseria meningitidis
MKKTLLAIVAVSALSACRQAEEGSPPLPRQISDRSVGHYCSMNLTEHNGPKAQIFLNGKPDQPVWFSTIKQMFGYTKLPEEPKGIRVIYVTDMGNVTDWTNPNADTEWMDAKKAFYVIDSGFIGGMGAEDALPFGNKEQAEKFAKDKGGKVVGFDDMPDTYIFK

SEQ ID NO: 18029 - protein, 76 aa, Neisseria meningitidis; identical to SEQ ID NO: 374

SEQ ID NO: 18030 - protein, 206 aa, Neisseria meningitidis
MLTSKSCDLFNIPFFQFSQLKKYQPESIPQIKADYKENWQVWQQLIQQVAAELGAPFAPPHIERWCNGWQVRAHFFAYFKYEQYKNSAAILSILLNRRRLSVSLDWHCYKADVSPIALPEYNRWLDDFDTDKYAAFDMWHGAESEYDDYRTVAQQSESDRKLQNDEDFFCIGKHIERDDLGKQDVAKWIAETVEDLLPLYEACHGK

SEQ ID NO: 18031 - protein, 98 aa, Neisseria meningitidis; identical to SEQ ID NO: 1735

SEQ ID NO: 18032 - protein, 876 aa, Neisseria meningitidis; identical to SEQ ID NO: 15237

SEQ ID NO: 18033 - protein, 131 aa, Neisseria meningitidis
MMRQRGKKMLFEENPIDGQFAEYECGAGGIRLAGQSFHKPVLVHKDSVCLSQCRTLSDLTPENLLSDIKPVDYLEILIIGTGAAQEFIHPKIMADFSRIGIGVECMNTDSAFRTLVFLHSEGRRAWAWLQP

SEQ ID NO: 18034 - protein, 290 aa, Neisseria meningitidis
MSWLDKILPPKIKNRSKDGSSNVPEGLWHKCPSCSATVYSTELQQNNQVCPKCNHHNPLSARQRLNLLLDEDGREEVAGNVKPTDPLKFKDGKKYPDRLSAARKLTGEDDALVVMKGKMNGLPVVVAAFEFRFIGGSMGSVVGERFVQGIRRAVADNCPFVCVAASGGARMQEGVNSLMQMTKTSAALHLLTEKRLPFISVLTDPTMGGVSASFAFLGDVVLAEPNALIGFAGPRVIEQTVRETLPESFQRAEFLLEKGAIDQIVDRRDMKRRISDLITLLCRQDKVSAA

SEQ ID NO: 18035 - protein, 415 aa, Neisseria meningitidis; identical to SEQ ID NO: 138

SEQ ID NO: 18036 - protein, 199 aa, Neisseria meningitidis
MNRSKISPYASLNEELWISKTEELIKQHPLSEKEIVQLCLDSWENIFSSRIGNLQIGKNFFPSPQIVGALLHALIPANIEARFENWQGEKNKYDKDIVYIKDDYYSIELKTSSDPKYIFGNRSYAQPQDGITGKSKNGYYLTINFEKFMPDLKLRPEIKIIRFGWLDHTDWIAQTAATGQQARLSPEAYRSKLKILYQK

SEQ ID NO: 18037 - protein, 287 aa, Neisseria meningitidis
MLPYPTTIQILEVLTMKKTVFTYAMIALTGTAAAAQELQTANEFTVHTDLSSISSTRAFLKEKHKAAKHIGVRADIPFDANQGIRLEAGFGRSKKNIINLETDENKLGKTKNVKLPTGVPENRIDLYTGYTYTQTLSDSLNFRVGAGLGFESSKDSIKTTKHTLHSSRQSWLAKVHADLLSQLGNGWYINPWSEVKFDLNSRYKLNTGVTNLKKDINQKTNGWGFGLGANIGKKLGESASIEAGPFYKQRTYKESGEFSVTTTSGDVSLTIPKTSIREYGLRVGIKF

SEQ ID NO: 18038 - protein, 468 aa, Neisseria meningitidis
MNDYTAMPSEDREVGALSLPPHSMEAEQSVLGGLMLENPAWDRIADVVSGEDFYRHEHRLIFRSIAKLINESRPADVITVQEDLQRNEELEAAGGFEYLITLAQNTPSAANIRRYAEIVRERSIMRQLAEVGTEIARSAYNPQGRDAGQLLDEAENKVFQIAESTAKSKQGFLEMPDLLKEVVQRIDMLYSRDNPDEVTGVPTGFIDLDKKTSGLQPGDLIIVAGRPSMGKTAFSINIAEHVAVEGKLPVAVFSMEMGGAQLVMRMLGSVGRLDQSVLKTGRLEDEHWGRLNEAVVKLSDAPVYIDETPGLTALELRARARRLARQFNNKLGLIVIDYLQLMAGSGRSDNRASELGEISRSLKALAKELQVPIIALSQLSRTVESRTDKRPMMSDLRESGAIEQDADLIMFMYRDEYYNQDSPMKGLAECIIGKHRNGPVGKIFLTWTGQFTKFDNAAYIPEEAKIED

SEQ ID NO: 18039 - protein, 292 aa, Neisseria meningitidis
LSAAPTVQDTQIEQYNQLTQIMHRTLDPKDVKGNSIGGLLIHIGSGTKDEHIRTMSNRPVQQDDHGGTQAPPSGYSFLRKEAFLYIVGHHVIFCGHGFLSASTVASYLSLLSNKLRENNPDIVQFNIEFKAVGNCDKLSLIQQHGVKSILLDVSAYQLSRNRLYQDSRSTIAKALGKVGSVFTSELSDEELEAQSEIHINLEVLLNGNSRASIEAQSLMQEQAEEIIDDETVNQGFSITTQQGEVIQPSDVKLSKSVRIGRYDEANSLLPDSAFTAISEYFLELQSRNLTEQ

SEQ ID NO: 18040 - protein, 225 aa, Neisseria meningitidis; identical to SEQ ID NO: 15412

SEQ ID NO: 18041 - protein, 185 aa, Neisseria meningitidis
LGIHPNSAALFYRKIRMVINHHLALAADEVFEGSVEPDESDFGGRRKGRRGRGAAGKVVVFGILKRNGRVYTVVVDNAKSETLLPVIKKKIMPDSIVYTDSLSSCDKLDVSGFIHYRINHSKEFADRQNHINGIENFWNQAKRVLRKYNGIDRKSFPLFLKECEFRFNFGTPSQQLKILRDWCGI

SEQ ID NO: 18042 - protein, 209 aa, Neisseria meningitidis
MKTVIKGVYKIGISDVSNFEGRMRHLENNGYANVAGLERILAVKTDNYKEKENLLHEIFSKSRIGDTELFAVDENLVKRLFLSLRGEIVFPKNETAESEFEKSVHERRQEGNAGSGRKQLLDLVRRGHREYPYALPRLLAGAASYKPKKSKIRLFKEAYLRKSGTRLTDEIADGIHIYTCFSRADLEKAYSEYLELFKSESDAEGRKPR

SEQ ID NO: 18043 - protein, 472 aa, Neisseria meningitidis
VKPLRRLTNLLAACAVAVAAFGQPALAADLAQDPFITDNAQRQHYEPGGKYHLFGDPRGSVSDRTGKINVIQDYTHQMGNLLIQQANINGTIGYHTRFSGHGHEEHAPFDNHAADSASKEQGNVDEGFTVYRLNWEGHEHHPADAYDGPKGGNYPKPTGARDEYTYHVNGTARSIKLNPTDTRSIRQRISDNYNNLGSNFSDRADEANRKMFEHNAKLDRWGNSMEFINGVAAGALNPFISAGEALGIGDILYGTRYAIDKAAMRNIAPLPAEGKFAVIGGLGSVAGFEKNTREAVDRWIQENPNAAETVEAVFNVAAAAKVAKLAKAAKPGKAAVSGDFSDSYKHNTASRLSQSVDGEMFQTRNVDFKAKSIGTKIHDGAQGKHISGHRNYIEGKSTLNQNINPQELLNGIHSGAYPVISKGARGNPVVDFGYPIGSDGKSGLSTNFGTIHSGKNGVHIVPANPKTIKKVQ

SEQ ID NO: 18044 - protein, 257 aa, Neisseria meningitidis
MKPKIQRHGEILSLVRRHQFMSVDELAAALDVTPQTIRRDIRELEEGGSLKRHHGGASSGGNLPEGLPASRQTRCQNEKNAIARLIAEHIPDGSSLFVSIGTTMEAVASELVRRRGSLRIITNNIHVASIVSARTDYTVIITSGVVRPLDGGITGVATVDFINQFKVDYAVMSTHGVESDGSLLDDDYKEVSVMQAMIANARVRFLGVDHSKFRSNALVRLGDITAFDKVFTDRLPDTAMQKMLKEAGVECLIADAV

SEQ ID NO: 18045 - protein, 161 aa, Neisseria meningitidis; identical to SEQ ID NO: 1189

SEQ ID NO: 18046 - protein, 41 aa, Neisseria meningitidis
MENIKTLLFLTAETNIPSKVILVSGRTDDTRHLVGLRPENT

SEQ ID NO: 18047 - protein, 139 aa, Neisseria meningitidis; identical to SEQ ID NO: 921

SEQ ID NO: 18048 - protein, 97 aa, Neisseria meningitidis; identical to SEQ ID NO: 1875

SEQ ID NO: 18049 - protein, 204 aa, Neisseria meningitidis
  misc_feature 2, 3, 4: 'Xaa' is any amino acid
VXXXKLKWADRLPRIILYYKQEGEIVSRDDPQGRVSIFDRLPQAASSRWVAIGRLDINTSGLLILTTSGELVQRFAHPSFEVEREYAVRVLGGLTGEQMRVLTEEGVMLEDGLAKVERIREQGGEGANKWYNVVIKEGRNREVRRIFESQGLTVSRLVRVGFGPIGLPNRLKRGQFYELNPAEVANIIKWADMLLPGERRRKKA

SEQ ID NO: 18050 - protein, 94 aa, Neisseria meningitidis; identical to SEQ ID NO: 387

SEQ ID NO: 18051 - protein, 658 aa, Neisseria meningitidis
MPRIAALPDHLVNQIAAGEVVERPANALKEIVENSIDAGATAIDVELDGGGIRLIHVSDNGGGIHPDDIELALHRHATSKIKTLNDLEHVASMGFRGEGLASIASVSLLTLTSRQEDSSHATQVKAEDGKLSSPTAATHPVGTTIEAAELFFNTPARRKFLKSENTEYAHCATMLERLALAHPHIAFSLKRDGKQVFKLPAQSLHERIAAIVGDDFQTASLEIDSGSGALRLYGAIAKPTFAKGKTDKQYCFVNHRFVRDKVMLHAVKQAYRDVLHNALTPAFVLFLDLPPEAVDVNVHPTKTEIRFRDSQQVHQLVFHTLNKALADTRANLTESVGNAGEVLHDITGVVSTPMPSENDSENLFDSVSNYPTGNKSDTHNAFGSSGKTAPMPYQSAYAPQQRSLSLRESRAAMNTYAELYKKTDDIDLELSRFEQARFGNMPSETPAPQTDTPLSDGIPSQSELPPLGFAIAQLLGIYILAQAEDSLLLIDMHAAAERVNYEKMKRQRQENGNLQSQRLLIPVTFAASHEECAALADHAEALAGFGLELSDMGGNTLAVRAAPAMLGKSDVVSLARDVLNEFAQVGSSQTIEEHENHILATMSCHGSIRAGRRLTLPEMNALLRDMENTPRSNQCNHGRPTWVKLTLKELDALFLRGQ

SEQ ID NO: 18052 - protein, 101 aa, Neisseria meningitidis; identical to SEQ ID NO: 2399

SEQ ID NO: 18053 - protein, 456 aa, Neisseria meningitidis
MINPIASLSPLDGRYAQSVEALRPIFSEYGLMKARVKVELNWLKALAAEPEIAEVPPFSAETLAEIDTVIENFSLEDAAAVKAIEATTNHDVKAIEYWLKKRFAEVPEVAAVSEFIHFACTSEDINNLSHALMLQEAREAVLLPKLAEIIEKLTAMAHDLAAVPMMSRTHGQPATPTTLGKETANVVYRLQRQFKNLQAQEFLGKINGAVGNYNAHMVAYPDVDWETHCRNFVEISLGLTFNPYTIQIEPHDYMAEFFQTLSRINTILIDFNRDVWGYISLGYFKQKVKAGEVGSSTMPHKVNPIDFENSEGNLGMANAVLGFLSEKLPISRWQRDLTDSTVLRNMGVGVGYAVLGFAAHLRGLNKLEPNPAALAADLDATWELLAEPIQTVMRRYGVANPYEKLKDLTRGKGGITPEVLKGFIGSLEIPVEAKAKLLELTPALYVGKAEALAKRI

SEQ ID NO: 18054 - protein, 250 aa, Neisseria meningitidis
MTDILIDNTATETVRTLIRAFPLVPVSQPPEQGSYLLTEHDTVSLRLVGEKSSVIVDFASGAAQYRRTKGGGELIAKAVNHTAKPTVWDATAGLGRDSFVLASLGLTVTAFEQHPAVACLLSDGIRRALLNPETQDTAARINLHFGNAAEQMPALVQTQGKPDIVYLDPMYPERRKSAAVKKEMAYFHRLVGEAQDEAVLLHTARQTAKKRVVVKRPRLGEHLAGQAPAYQYTGKSTRFDVYLPYEADKG

SEQ ID NO: 18055 - protein, 240 aa, Neisseria meningitidis
MDKDKGSYAGIPVQNTKELVWQKIQEIPISECGEPLVSVGNTGRIRVNPVYFSQGIEGAINTVLLRRSVADRLTQVVSLLPEMYGLEIFDGWRPVIVQRALRENMKQEIEKRHPEYDEVQVREALDCFAADPDRAGMPLPHLTGGSVDVGLFDIKSGKSLDMGSEFDATGHLSYSDALEKEGEYFSSARNLRRILIHAMKEAGFSNLPTEWWHFDYGNQNWAYFTQQSNAVFGAVEEQDT

SEQ ID NO: 18056 - protein, 472 aa, Neisseria meningitidis
MENILSVLVGTVNRFLWDYLLIYALLGIGLFFTLYLGAPQITKLGAGFKSVFGGLFAKGDKDDKSLSQFQALAVAISAQIGTGNVAGVATAITAGGPGAIFWMWVSAVLGMSTIFAEALLAQKYRVVSHGKYIGGPAFYITHGLTPKIGRGAARFLSGFFSIALIIALGFIGNATQANSIASAVTIAFDVPSLAVGIVLAVLAGMVVIGGVNRIANIAQFVVPFMAVVYILCAVVILFEFSDHIVPMFNHIFTAAFNPEAVLGGAAGIGMREAIRFGVARGLFSNEAGMGSTPHAHATADVKHPVQQGMAAFVGVFIDTILVCTATALIILLTDANLSGEQGAAVTQFAFNKAFPGFGSQLLAVCLTFFALTTIIGWYYFGESNIRFLFRGRHLGIYRALVLLAIVLGTLGKVDLVWSLSDMFNGFMVIPNLIALFLLRKEIRAIYDDYLAQKKAGRDLSYPYEFHEFHDKG

SEQ ID NO: 18057 - protein, 221 aa, Neisseria meningitidis; identical to SEQ ID NO: 1539

SEQ ID NO: 18058 - protein, 190 aa, Neisseria meningitidis; identical to SEQ ID NO: 917

SEQ ID NO: 18059 - protein, 51 aa, Neisseria meningitidis; identical to SEQ ID NO: 1536

SEQ ID NO: 18060 - protein, 140 aa, Neisseria meningitidis
MRPIFLSFVLLPILITACSTPDKSARWENIGTISNGNIHTYINKDSVRKNGNLMIFQDKKVVTNLKQERFANTPAYKTAIAEWEIHCNNKTYRLSSLQLFDTKNTEISTQSYTASSLRPMSILSGTLTEKQYETVCGKKL

SEQ ID NO: 18061 - protein, 399 aa, Neisseria meningitidis
MQAARPSLQCFLFLNERSKTMKKTLMAAAILSLALTACGGGSDTAAQAPSAKPEAEQSGKLNIYNWSDYVDPETVAAFEKETGIKTRSDYYDSNETLEAKVLTGKSGYDLTAPSIANVGRQIKAGAYQKIDKAQIPHYGNIDKDLLKMMEAVDPGNEYAVPYFWGINTLAINTRQVQKALGTDKLPENEWDLVFKPEYTAKLKSCGISYFDSAIEQIPLALHYLGKDPNSENPEDIKAAVDMMKAVRGDVKRFSSSGYIDDMAAGNLCAAIGYGGDLNIAKTRAEEAANGVEIKVLTPKTGVGVWVDSFMIPRDAQNVANAHRYIDYTLRPEVAAKNGSFVTYAPASRPARELMDEKYTSDASIFPNKELMEKSFIVSPKSAESVKLGVKLWQGLKAGK

SEQ ID NO: 18062 - protein, 354 aa, Neisseria meningitidis
MEKEFRILNIVSAKIWGGGEQYVYDVSKALGLRGCTMFTAVNKNNELMHRRFSEVSSVFTTRLHTLNGLFSLCALTRFIRKNRISHLMIHTGKIAALSILLKKLTGVRLIFVKHNVVANKTDFYHRLIQKNTDRFICVSRLVYDVQTADNPFKEKYRIVHNGIDTGRFPPSQEKPDSRFFTVAYAGRISPEKGLENLIEACVILHRKYPQIRLKLAGHGHPDYMCRLKRDVSVSGAEPFVSFEGFTEDIASFYRQSDVVVLPSLVPEAFGLSLCEAMYCRTAVISNTLGAQKEIIEHHQSGILLDRLTPESLADEIERLVLNPEAKNALATAGHQCVANRFTINHIADKLLDAI

SEQ ID NO: 18063 - protein, 373 aa, Neisseria meningitidis
MSNQDFYATLGVARTATDEEIKKAYRKLAMKYHPDRNPDNKEAEEKFKEVQKAYETLSDKEKRAMYDQYGHAAFEGGGQGGFGGFGGFGGAQGFDFGDIFSQMFGGGSGRAQPDYQGEDVQVGIEITLEEAAKGVKKRINIPTYESCDVCNGSGAKPGTSPETCPTCKGSGTVHIQQAIFRMQQTCPTCHGAGKHIKEPCVKCRGAGRNKAVKAVEVNIPAGIDDGQRIRLSGEGGPGMHGAPAGDLYVTVRIRAHKIFQRDGLNLHCELPISFATAALGGELEVPTLDGKVKLTVPKETQTGRRMRVKGKGVKSLRSSATGDLYCHIIVETPVNLTDRQKELLEEFERISTGLENQTPRKKSFLDKLRDLFD

SEQ ID NO: 18064 - protein, 186 aa, Neisseria meningitidis; identical to SEQ ID NO: 6815

SEQ ID NO: 18065 - protein, 206 aa, Neisseria meningitidis
MELKVIDAKGQVSGSLSVSDALFAREYNEALVHQLVNAYLANARSGNRAQKTRAEVKHSTKKPWRQKGTGRARSGMTSSPLWRKGGRAFPNKPDENFTQKVNRKMYRAGMATILSQLARDERLFAIEALTAETPKTKVFAEQVKNLGLEQVLFVTKQLDENVYLASRNLPNVLVLEAQQVDPYSLLRYKKVIITKDAVAQLEEQWV

SEQ ID NO: 18066 - protein, 305 aa, Neisseria meningitidis; identical to SEQ ID NO: 1198

SEQ ID NO: 18067 - protein, 177 aa, Neisseria meningitidis
MAEFATIARPYAKALFGLAQEKNQIESWLGGLEKLAAVVQEGKVASLIDRPETNASEKADILIDLVGLKDKELKNFVIVLAGQKRLSILPEVYAQYQDLTLSFNHIKSAIIYSAYPLTDKQVGELAQMLNKRFDSELKISVEIEPELIGGIKVEVGDQVLDLSVQGKLSALYTTMTN

SEQ ID NO: 18068 - protein, 382 aa, Neisseria meningitidis
MNTPPFVCWIFCKVIDNFGDIGVSWRLARVLHRELGWQVHLWTDDVSALRALCPDLPDVPCVHQDIHVRTWHSDAADIDTALVPDIVIETFACDLPENVLHIIRRHKPLWLNWEYLSAEESNERLHLMPSLQESVQKYFWFMGFSEKSGGLIRERDYRNAVRFDTEALRERLMLPEKNAPEWLLFGYRSDVWAKWLEMWRQAGSPMTLLLAGTQIIDSLKQSGVIPQDALQNDGDVFQTASVRLVKIPFVPQQDFDKLLHLADCAVIRGEDSFVRAQLAGKPFFWHIYPQDENVHLDKLHAFWDKAHGFYSPETASVHRRLSDDLNGGEALSATQRLECWQTLQQHQNGWRQGAEDWSRYLFGQPSASEKLAAFVSKHQKIR

SEQ ID NO: 18069 - protein, 376 aa, Neisseria meningitidis; identical to SEQ ID NO: 6637

SEQ ID NO: 18070 - protein, 339 aa, Neisseria meningitidis
MKKILVTGGTGFIGSHTVVSLLKSGHQVVILDNLCNSSINILPRLKTITGQEIPFYQGDIRDREILRRIFAENRIDSVIHFAGLKAVGESVAEPMKYYDNNVSGSLVLAEEMARAGVFKIVFSSSATVYGDPGKVPYTEDMPLGDTTSPYGTSKSMVERILTDIQKADPRWSVILLRYFNPIGAHESGLIGEQPNGIPNNLLPYICQVAAGKLPQLSVFGDDYPTPDGTGMRDYIHVMDLAEGHVAAMKAKGGVAGVHLFNLGSGRAYSVLEIIRAFEAASGLTIPFEIKPRRAGDLACFYADPSYTKAQIGWQTQRDLSQMMEDSWRWVSNHPNGYDD

SEQ ID NO: 18071 - protein, 86 aa, Neisseria meningitidis; identical to SEQ ID NO: 7137

SEQ ID NO: 18072 - protein, 508 aa, Neisseria meningitidis
MNTPLPYSNYLIRILTASVYDVAVETPLEPARSLSVRLKNNILLKREDLQPVFSFKIRGAYNKMSKLPKDALACGVIAASAGNHAQGVALSAQRLGCRAVIVMPETTPKIKVDAVKSRGGEVVLRGVSYNDAYDYAMELAEQEGLTYIAPFDDPDVIAGQGTVGMEIVSQHPDPIRAVFVPIGGGGLAAGVAAFIKQVRPEIKVIGVQTNDSCCMKQSVEAGEIVHLKDVGLFSDGTAVKVVGDETFRLCKELLDEIITVDTDAVCGAVKDIFDDTRSITEPAGALALAGLKAYIAREGAENQTLIAVTSGANMNFHRLRHVSERSELGEGNEGIFAVTIPEERGSFLKFVNILGNRNITEFNYRYGDDEKAHIFVGLQAAGPQDLAVIGSRLDEAGLPNVDLTDDEIAKIHIRYMVGGRTDKVENERLVSFEFPERPGALARFLNHMQGGWNITLFHYRNHGADYGRILVGIDVPPHDAAAFDGFLESLGYSYHEETQNAAYKLFLA

SEQ ID NO: 18073 - protein, 766 aa, Neisseria meningitidis
MHRPTAKQILHEVFGYPEFRGRQEAVINTLAGGGSLTVLMPTGGGKSLCYQIPALMREGVAVVVSPLIALMNDQVANLHAAGIEAAAVNSGTSADEAREIADKLAQGRLKLLYVAPERLVTDRFLRFLDQQTVSLFAIDEAHCVSQWGHDFRPEYQQLGILAERYPNVPRIALTATADAATRADIKHYLHLDNAPEFVSSFDRPNIYYQVIEKNNGKKQLLDFIRKEMTGQSGIVYCLSRKKVEDVAQFLRENGLNAIPYHAGLSMDVREENQRRFTHEDNIIVVATVAFGMGIDKPDVRFVAHLDMPQSVEHFYQESGRAGRDGLPAASWLCYGLNDWVLLHERIAEGNSDEVQKQIEMQKLDAMLAVCETAACRRVLLLKHFGEASEPCGHCDNCLHPPVRFDGTVLVQKLLSCVYRAGQRFAAGYITNLLRGKSDDWIRGNRHEQLSTFGIGTELSNKEWRSVIRQCISLGYLTVNITRYQALQLTEAAKKVLKGETEVMLRPLKRDKPAARTLKDNWLRTEREERLWQALRVWRMKQAEAEGIPAYMIFGDKTLRDLVEKMPQDLNGLHDIYGLGEAKIDRFGHGILEVCRNAADFSHDAVIRPQTEREQQLRQKLEAWRYEQARAENCALHAVLSDESLADMLAATPETETDLEGVHGLGSVRAAKYGRDILAVCRPFSDGIDEAAKHKRRLMRALIQWCGETAKHEQSEPYRILSKAALRAIAAKQPEGLAELAAVYGVGEEKAARYGAAVLAVLERNAV

SEQ ID NO: 18074 - protein, 323 aa, Neisseria meningitidis; identical to SEQ ID NO: 3380

SEQ ID NO: 18075 - protein, 281 aa, Neisseria meningitidis; identical to SEQ ID NO: 49

SEQ ID NO: 18076 - protein, 259 aa, Neisseria meningitidis; identical to SEQ ID NO: 588

SEQ ID NO: 18077 - protein, 273 aa, Neisseria meningitidis; identical to SEQ ID NO: 15186

SEQ ID NO: 18078 - protein, 241 aa, Neisseria meningitidis
MPRFHLPENLSVGQTVALPDNIVRHLNVLRVRPNENITLFNGKGKAHAARLTVLEKRRAGAEILHEETADAESPLNITLIQSISSGDRMDFTLQKSVELGVTAIQPVISERCIVRLDGERAAKRLARWQEIVISACEQSGRNTVPPVLPIIGYREALDKMPSESTKLIMSINRARKLGDIRQPSGAIVFMVGPEGGWTEQEEQQAFEAGFQAVTLGKRILRTETAPLAALAAMQTLWGDFA

SEQ ID NO: 18079 - protein, 447 aa, Neisseria meningitidis
MIKIKKGLNLPIAGRPEQVIYDGPVITEVALLGEEYAGMRPSMKVKEGDAVKKGQVLFEDKKNPGVVFTAPASGKIAAIHRGEKRVLQSVVIAVEGNDEIEFERYAPEALANLSGEEVRRNLIQSGLWTALRTRPFSKIPAVDAEPFAIFVNAMDTNPLAADPTVIIKEAAEDFKRGLLVLSRLTERKIHVCKAAGADVPSENAANIETHEFGGPHPAGLSGTHIHFIEPVGANKTVWTINYQDVIAIGRLFATGRLNTGRVIALGGSQVNKPRLLRTVLGAKVSQITAGELVDADNRVISGSVLNGAIAQGAHDYLGRYHNQISVIEEGRSKELFGWVAPQPDKYSITRTTLGHFLKNKLFKFNTAVNGGDRAMVPIGTYERVMPLDILPTLLLRDLIVGDTDSAQALGCLELDEEDLALCSFVCPGKYEYGPLLRKVLETIEKEG

SEQ ID NO: 18080 - protein, 107 aa, Neisseria meningitidis; identical to SEQ ID NO: 178

SEQ ID NO: 18081 - protein, 114 aa, Neisseria meningitidis
MLPNKVLGKYDWNVDGKTGIGAAWVVAAFVLPMSVWAIFMLARMQGWLAPTKANPIWALVWLLICLPCLLIASKCLGWKGWRRVVNIFVCLTVCAILSVPASLLIAFTLRDLLK

SEQ ID NO: 18082 - protein, 2514 aa, Neisseria meningitidis
MNKTLYRVIFNRKRGAVVAVAETTKREGKSCADSDSGSAHVKSVPFGTTHAPVCRSNIFSFSLLGFSLCLAVGTANIAFADGIIADKAAPKTQQATILQTGNGIPQVNIQTPTSAGVSVNQYAQFDVGNRGAILNNSRSNTQTQLGGWIQGNPWLARGEARVVVNQINSSHSSQMNGYIEVGGRRAEVVIANPAGIAVNGGGFINASRATLTTSQPQYQAGALTGFQVRSGHVAITGQGLDARDTDFTRILSYHSKIDAPVWGQDVRVVAGQNDVVATGNAHSPILNNAAANTSNNTANNGTHIPLFAIDTGKLGGMYANKITLISTAEQAGIRNQGQLFASSGNVAIDANGRLVNSGTMAAANAKDTDNTAEHKVNIRSQGVENSGTAVSQQGTQIHSQSIQNTGTLLSSGEILIHNSGSLKNETSGTIEAARLAIDTDTLNNQGKLSQTGSQKLHIDAQGKMDNRGRMGLQDTAPTASNGSSNQTGNSYNASSHSSTTTPTTATGTGTATVSISNITAPTFADGTIRTHGALDNSGSIIANGQTDVSAQQGLNNAGQIDIHQLNAKGSAFDNHNGTIISDAVHIQAGSLNNQNGNITTRQQLEIETGQLDNAHGKLLSAEIADLAVSGSLNNQNGEIATNQQLIIHDGQQSTAAIDNTNGTIQSGRDVAIQAKSLSNNGTLAADNKLDIALQDDFYVGRKIVAGNELSLSTRGSLKNSHTLQAGKRIRIKANNLDNAAQGNIQSGGTTDIGTQHNLTNRGLIDGQQTKIQAGQVNNIGTGRIYGDNIAIAATRLDNQDENGTGAAIAARENLNLGIGQLNNRENSLIYSGNDMAVGGALDTNGQATGKAQSIRNASATIEAAGKMRLGVEKLHNTNEHLKTQLVETGREHIVDYEAFGRHELLREGTQHELGWSVYNDESDHLRTPDRAAHENWHKYDYEQVTQKTQVTQTAPAKIISGNDLTIDGKEVFNTDSQIIAGGNLLVQTEKDGLHNEQTFGEKKVFSENGKLHSYWREKHKGRDSTGHSEQNYTLPEEITRNISLGSFAYESHRKALSHHAPSQGTELLQSNGISLPYTSNSFTPLPSSSLYIINPVNKGYLVETDPRFANYRQWLGSDYMLDSLKLDPNNLHKRLGDGYYEQRLINEQIAELTGHRRLDGYQNDEEQFKALMDNGATAARSMNLSVGIALSAEQVAQLTSDIVWLVQKEVKLPDGGTQTVLVPQVYVRVKNGDIDGKGALLSGSNTQINVSGSLKNSGTIAGRNALIINTDTLDNIGGRIHAQKSAVTATQDINNIGGILSAEQTLLLNAGNNINSQSTAASSQNTQGSSTYLDRIAGIYITGTEKGVLAAQAGKDINIIASQISNQSEQGQTQLQAGRNINLDTVQTGKHQATHFDADNHVIRGSTNEVGSSIQTKGDVALLSGNNLNAKAAEVGSANGTLAVSAKNDINISAGINTTHVDDASKHKGRSGGGNKLVITDKAQSHNETAQSSTFDGKQVVLQAGNDANIKGSNVISDNGTHIQAGNHVHIGTTLTHNQSETYHQTKKSGLMSAGIGFTIGSKTNTQENQSQSNEHTGSTVGSLKGDTTIVAGKHYEQIGSTVSSPEGNNTIHAQSIDIQAAHNQLNSNTSQTYEQKGLTVAFSSPVTDLAQQAIAVAQSGKQVGQSKNGRVNAMAAANAGWQAYQTGKSAQNLANGTTNAKQVSISITYGEQQNRQTTQVQANQAQASQIQAGGKTTLIATGAAEQSNINIAGSDIAGKAGTILIADNDITLQSAEQSNTERSQNKSSGWNAGAAVSFGQGGWSLGVTAGGNVGKGHGNGDSVTHRHSHIGDKGSQTVLQSGGDTALKGAQVIGKGVQVNAQNLHIQSVQDSETYQSKQQNASAQVTVGYGFSAGGDYSQSKIRADHVSVTEQSGIYAGEDGYQIKVGNHTDLKGGIITSTQSAEDKGKNRFQTATLTHSDIKNHSQYKGESFGLGASASISGKTLGQGAQNKPQNKHLTSVADKNSASSSVGYGSDSDSQSSITKSGINTQNIQITDEAAQIRLTGKTVAQTKADIDTNVTTDTAERHSGSLKNTFNKEAVQSELDLQRTVSQDFSKNVQQANTEINQHLDKLKADKEAAETAAAEALANGDMETAKRKVHEAQDAAAKADNWQQGKVILNMLASGLAAPTQSGAGIAAATASPAVSYAIGQHFKDLAGQNANGKLTASQETAHVLAHAVLGAAVAAAGGNNALAGALSAGGSEAAAPYISKWLYGKEKGSDLTAEEKETVTAITNVLGTATGAAVGNSATDAAQGSLNAKSAVGNNDTVEQVKFALRHPRIAIAIGSVHKDPGSTLEPNISTIASTFQLNLFPNSEFGGEGGVGNAFRHVLWQATITREFGKDIAVKVGNSHESGEKINYSIRRNLSLDKADEMIDQLNNEIGREIALNTNRLNTKELVGLILETYKNNGFYQAERNSNGNYDVVRKRLSEKDYQNTSNILIHLDNTGAGFKIQQRRKQIRAQISARQWRR

SEQ ID NO: 18083 - protein, 469 aa, Neisseria meningitidis; identical to SEQ ID NO: 9639

SEQ ID NO: 18084 - protein, 347 aa, Neisseria meningitidis
MSKKIKVGIVGATGYTGVELLRLLAAHPDVEVAAVTSRSEAGTAVADYFPSLRGVYGLAFQTPDEAGLEQCDIVFFATPNGIAMKDAPRLIEQGVRVIDLSADFRIRDIPTWEHWYGMTHAAPDLVSQAVYGLSELNREAVAQARLVANPGCYPTCVSLPLVPLLRQCRLKPGMPLIADCKSGVSGAGRKGNVGSLLCEVGDNFKAYGIAGHRHLPEIRQTIAGLQDGIAEGFVFTPHLAPMIRGMHATVYLHLSDGICPETILRDYYRDSLFVDILPAGSTPETRSVRGANLCRISIQQAAQSDVWVVLSVIDNLVKGAAGQAVQNMNIMFGLKETHGLDAIPLLP

SEQ ID NO: 18085 - protein, 172 aa, Neisseria meningitidis; identical to SEQ ID NO: 601

SEQ ID NO: 18086 - protein, 268 aa, Neisseria meningitidis; identical to SEQ ID NO: 9528

SEQ ID NO: 18087 - protein, 169 aa, Neisseria meningitidis
MTDTQNRVAMGYIKGVFGIKGWLKIAANTEYSDSLLDYPEWHLVKDGKTISVTLEAGKVVNSELQVKFEGINDRDLAFSLHGYTIEIPREAFAPTEEDEYYWTDLVGMTVVNKDHTVLGKVSNLMETGANDVLMIDGEHGQILIPFVSQYIETVDTGSKIITADWGLDY

SEQ ID NO: 18088 - protein, 507 aa, Neisseria meningitidis
VRKFSFLLSVLMKETAFKTGMCLGSNNLSRLQKAAQQILIVRGYLTSQAIIQPQNMDSGILKLRVSAGEIGDIRYEEKRDGKSAEGSISAFNNKFPLYRNKILNLRDVEQGLENLRRLSSVKTDIQIIPSEEEGKSDLQIKWQQNKPIRFSIGIDDAGGKTTGKYQGNVALSFDNPLGLSDLFYVSYGRGLAHKTDLTDATGTETASGSRSYSVHYSVPVKKWLFSFNHNGHRYHEATEGYSVNYDYNGKQYQSSLAAERMLWRNRLHKTSVGMKLWTRQTYKYIDDAEIEVQRRRSAGWEAELRHRAYLNRWQLDGKLSYKRGTGMRQSMPAPEENGGGTIPGTSRMKIITAGLDAAAPFMLGKQQFFYATAIQAQWNKTPLVAQDKLSIGSRYTVRGFDGEQSLFGERGFYWQNTLTWYFHPNHQFYLGADYGRVSGESAQYVSGKQLMGAVVGFRGGHKVGGMFAYDLFAGKPLHKPKRLSDDQHRLRLQLELQFLTSEFFTDI

SEQ ID NO: 18089 - protein, 433 aa, Neisseria meningitidis; identical to SEQ ID NO: 2952

SEQ ID NO: 18090 - protein, 257 aa, Neisseria meningitidis; identical to SEQ ID NO: 7786

SEQ ID NO: 18091 - protein, 207 aa, Neisseria meningitidis
MKKPTDTLPVNLQRRRLLCAAGALLLSPLAQAGAQREETLADDVASVMRSSVGSINPPRLVFDNPKEGERWLSAMSARLARFVPDEEERRRLLVNIQYESSRAGLDTQIVLGLIEVESAFRQYAISGVGARGLMQVMPFWKNYIGKPAHNLFDIRTNLRYGCTILRHYRNLEKGNIVRALARFNGSLGSNKYPNAVLGAWRNRWQWR

SEQ ID NO: 18092 - protein, 506 aa, Neisseria meningitidis
MQLIDYSHSFFSVVPPFLALALAVITRRVLLSLGIGILVGVAFLVGGNPVDGLTHLKDMVVGLAWSDGDWSLGKPKILVFLILLGIFTSLLTYSGSNQAFADWAKRHIKNRRGAKMLTACLVFVTFIDDYFHSLAVGAIARPVTDKFKVSRAKLAYILDSTAAPMCVLMPVSSWGASIIATLAGLLVTYKITEYTPMGTFVAMSLMNYYALFALIMVFVVAWFSFDIGSMARFEQAALNEAHDETAASDATKGRVYALIIPVLALIASTVSAMIYTGAQASETFSILGAFENTDVNTSLVFGGTCGVLAVVLCTLGTIKTADYPKAVWQGAKSMFGAIAILILAWLISTVVGEMHTGDYLSTLVAGNIHPGFLPVILFLLASVMAFATGTSWGTFGIMLPIAAAMAVKVEPALIIPCMSAVMAGAVCGDHCSPISDTTILSSTGARCNHIDHVTSQLPYALTVATAAASGYLALGLTKSALLGFGTTGIVLAVLIFLLKDKKRANA

SEQ ID NO: 18093 - protein, 193 aa, Neisseria meningitidis; identical to SEQ ID NO: 1378

SEQ ID NO: 18094 - protein, 120 aa, Neisseria meningitidis; identical to SEQ ID NO: 7043

SEQ ID NO: 18095 - protein, 103 aa, Neisseria meningitidis; identical to SEQ ID NO: 2233

SEQ ID NO: 18096 - protein, 196 aa, Neisseria meningitidis
MENDMSNKIKMVVGLGNPGKEYEQTRHNAGFWFLDELAWKWKASFKEEKKFFGEVARATLPDGDVWLLKPTTFMNRSGQAVAALAQFYKIKPEEILVVHDELDIPCGRIKFKLGGGNGGHNGLKDIQARLGTADYYRLRLGIGHPGDRNLVVGYVLNKPSTEHRRQIDDAVAKSLQAIPDILAGKWEEATRFLHSK

SEQ ID NO: 18097 - protein, 121 aa, Neisseria meningitidis; identical to SEQ ID NO: 4117

SEQ ID NO: 18098 - protein, 433 aa, Neisseria meningitidis
MPSETARPLYADTCAAHTLVWFRQNLRIRDNAALCTAVAEGLPVIGIWIDDAETDNPRRAAFYRQSAAELAQGLAGRGIPLYTAASPAELVRLAVRLNIRAVIADESHTFADKLADNALWHELDKHGIALTFVNDRAVFGKTDLIPDGGTAYADFDRYREVWLDRFSKQPPAGPDLFAAYRQPFPENLSAPQPAALSDGIFLPQNGGETAAWRQWRRFLEQADSYSVLKDFPSRKNTSLMGAYLSAGCISSRLLARESLERRLNAWADNIIRRDFFLQLALQHADDDPSDGNPEHTLRLTLWQQGQTGIPIIDAAMRCLHKTGGLHPALRRLSADFFCHVLNLPRREGEIWFARQLTDFDVAINQGNWRLAASRHTYPDIAAASYRTDPDGTFIKRHIPELAHLSADTVHTPWRFACSVDTHGYPAYPVAGIP

SEQ ID NO: 18099 - protein, 296 aa, Neisseria meningitidis
MFPVFHLSGESRRRMLQAASRFPYVFKARAEDSHKGTFGTLAVVGGSAGMSGAPVLAASAAMYLGCGKVWAGFNQDALPFAVIAGFPEIMLDTADGLTKRQGINAWMVGCGLGTDKAAVGTLAGILAEHTDKPVLLDADALNILSTDAETRNLARGCKNLILTPHPAEAARLLGTTVAQVQADRTAAVRKIGAIFGATVVLKGHKTLVAVSDTEIYVNESGNAGLATAGSGDVLGGIIGSLLAQGVPVFEAACAGAWLHGAAADVIKESAGIAAGLLAGEIAPAARWLRNRITKSM

SEQ ID NO: 18100 - protein, 436 aa, Neisseria meningitidis
MNTPHPRPKIAVIGAGWAGLSAAVTLARHADVTLFEAGRQAGGRARTLAGNTDGFGFLDNGQHILLGAYRGVLRLMKTIGSDPRAAFLRVPLHWHMHGGLQFRALPLPAPLHILGGVLLARRAPTAFKAKLLADMSDLQKSARLGQPDTTVAQWLKQRNVPRAAVMQFWQPLVWGALNTPLETASLRVLCNVLSDGVLTKKSGSDYLLPKQDLGAIVAEPALADLQRLGADIRLETRVCRLNTLPDGKVLVNGEAFDAAVPATAPYHAAALLPEGTPEHVQTAYQNLRYHAITTVYLRYAEPVRLPAPLTGLADGTVQWLLCRGRLGLPENEVSAVISVSDRVGAFANRAWADKAHADLKRILPHLGEPEAVRVITEKRATTAADAPPPDLSWLHRHRIFPAGDYLHPDYPATLEAAVQSGFAAAETCLQSLSDAV

SEQ ID NO: 18101 - protein, 100 aa, Neisseria meningitidis; identical to SEQ ID NO: 1476

SEQ ID NO: 18102 - protein, 328 aa, Neisseria meningitidis
MSSTPNKQAGYPRLVADIGGTNARFALETAPRVIEKAAVLPCKDYDTVTDAVRAYLNQSGATAVRHAAFAIANPILGDWVQMTNHHWAFSIETTRQTLGLDTLILLNDFTAQALAVTQTSSKDLMQVGGQKPVEFAPKAVIGPGTGLGVSGLVHSHAGWVALAGEGGHTSFPPFDDMEVLIWQYAKNKYGHVSAERFLSGAGLSLVYEALAAKQKAKPAKLMPSEITEKALSGTSPLCRQTLDIFCAMLGTVASNLALTLGARGGVYLCGGIIPRVLEYFKTSPFCSRFENKGRFEAYLAAIPVYVVLSEFPGISGAAAALDNHLRNV

SEQ ID NO: 18103 - protein, 44 aa, Neisseria meningitidis; identical to SEQ ID NO: 6328

SEQ ID NO: 18104 - protein, 228 aa, Neisseria meningitidis; identical to SEQ ID NO: 5838

SEQ ID NO: 18105 - protein, 181 aa, Neisseria meningitidis; identical to SEQ ID NO: 13160

SEQ ID NO: 18106 - protein, 335 aa, Neisseria meningitidis
MSTFFQQTAQAMIAKHIDRFPLLKLDRVIDWQPIEHYLNRQKTRYLRDHRGRPAYPLLSMFKAVLLGQWHSLSDPELEHSLITRIDFNLFCRFDELSIPDYSTLCRYRNWLAQDNTLSELLKLINRQLTEKGLKIEKASAAVVDATIIQTAGSKQRQAIEVDEEGQVSGQTTPSKDSDARWIKKSGLYKLGYKQHTRTDGEGYIEKLHITPANAHECKHLSPLLEGLPKGTTVYADKGYDSAENRQHLEEHQLLDGIMRKACRNRPLSEVQTKRNRYLSKTRYVVEQSFGTLHRKFRYARAAYFGLLKVSAQSHLKAMCLNLLKAANRLSAPAAA

SEQ ID NO: 18107 - protein, 303 aa, Neisseria meningitidis; identical to SEQ ID NO: 7711

SEQ ID NO: 18108 - protein, 214 aa, Neisseria meningitidis
VNKRLFCSRNGLRYYLLGGFCLSVFPFLLVFASSVWAVYRTGGQVLPPYVRADAALVLGAAAWDKRPSPVFRERINHAIALYQSRRVGKIVFTGGRTKKGYMTEAEVGRRYALKQGVPARNILFENTSRNTYENLNNIRPVLRANGIASVVIVSDPYHLARAAEMAEDLGVRVYMSATPTTRFDAGNKKKIFMLQEGYALSLYRLEKWGRDFFN

SEQ ID NO: 18109 - protein, 233 aa, Neisseria meningitidis; identical to SEQ ID NO: 4313

SEQ ID NO: 18110 - protein, 522 aa, Neisseria meningitidis; identical to SEQ ID NO: 14570

SEQ ID NO: 18111 - protein, 159 aa, Neisseria meningitidis; identical to SEQ ID NO: 6605

SEQ ID NO: 18112 - protein, 91 aa, Neisseria meningitidis
MKITHCKLKKKVQKELLRFFVLEVTARSAADILGIHPNSAALFYRKIRTVINHHLALAADEVFEGPVEPDESDFGGRRKGRRGEKWLSSAF

SEQ ID NO: 18113 - protein, 725 aa, Neisseria meningitidis
MTRFKYSLLFAALLPVYAQADVSVSDDPKPQESTELPTITVTADRTASSNDGYTVSGTHTPLGLPMTLREIPQSVSVITSQQMRDQNIKALDRALLQATGTSRQIYGSDRAGYNYLFARGSRIANYQINGIPVADALADTGNANTAAYERVEVVRGVAGLLDGTGEPSATVNLVRKRPTRKPLFEVRAEAGNRKHFGLGADVSGSLNAEGTLRGRLVSTFGRGDSWRQRERSRDAELYGILEYDIAPQTRVHAGMDYQQAKETADAPLSYAVYDSQGYATAFGPKDNPATNWANSRHRALNLFAGIEHRFNQDWKLKAEYDYTRSRFRQPYGVAGVLSIDHNTAATDLIPGYWHADPRTHSASVSLIGKYRLFGREHDLIAGINGYKYASNKYGERSIIPNAIPNAYEFSRTGAYPQPSSFAQTIPQYGTRRQIGGYLATRFRAADNLSLILGGRYSRYRTGSYDSRTQGMTYVSANRFTPYTGIVFDLTGNLSLYGSYSSLFVPQSQKDEHGSYLKPVTGNNLEAGIKGEWLEGRLNASAAVYRARKNNLATAAGRDPSGNTYYRAANQAKTHGWEIEVGGRITPEWQIQAGYSQSKTRDQDGSRLNPDSVPERSFKLFTAYHFAPEAPSGWTIGAGVRWQSETHTDPATLRIPNPAAKARAADNSRQKAYAVADIMARYRFNPRAELSLNVDNLFNKHYRTQPDRHSYGALRTVNAAFTYRFK

SEQ ID NO: 18114 - protein, 418 aa, Neisseria meningitidis
MNAAQLDHTAKVLAEMLTFKQPADAVLSAYFREHKKLGRQDRHEIAETAFAALRHYQKISTALRRPHAQPRKAALAALVLGRSTNISQIKDLLDEEETEFLGNLKARKTEFSDGLNTAAELPQWLVEQLQQHWNEEEILAFGRSINQAAPLDIRVNTLKGKRDKVLPLLQAESADAEATPYSPWGIRLKNKIALNKHELFLDGTLEVQDEGSQLLALLVGAKRGEIIVDFCAGAGGKTLAIGAQMANKGRIYAFDIAEKRLANLKPRMTRAGLTNIHPERISSEHDTRIARLAGKADRVLVDAPCSGLGTLRRNPDLKYRQSAETVANLLEQQHSILDAASKLVKPQGRLVYATCSVLPEENELQVERFLSEHPEFEPVNCAELLQSLKVDLDTGKYLRLDSARHQTDGFFAAVLQRK

SEQ ID NO: 18115 - protein, 494 aa, Neisseria meningitidis
MPYNQAPDFLCADTMHPTYSAVQARLLEANRLSPELLAKSLCIIGAHHVDYADIYCQRTAYESWHLEEGIVKSGSFQINQGVGVRAVSGDKTAFAYADSLCIDSINRSARAVRAIGAAGGKVSAKMPSETRGKPVCSASDPIAGLDSAAKVALLNKVEAIAKAADPRIVQVMAGLTCEYDMVYLARLDGKHAADIRPMVRMNVTVIAKQGERREQGSAGGGGRYDLAYFDENLVHRFVDSAVKQALTNLESRPAPAGEMTVVLGNGWPGVLLHEAVGHGLEGDFNRKGTSVFSGRIGERVAAKGVTVVDQGDIAGRRGSLNIDDEGNETRRTVLIEDGILVGYMQDETNARLMGTQSTGNGRRESYASVPMPRMTNTFMENGGYEPDEIIASIDKGIYAVNFGGGQVDITSGKFVFSASEAWWVEGGRLQYPVKGATIIGNGPEVLKHVSMIGNDTALDSGVGVCGKEGQSVPVGVGQPTLRIDAGLTVGGSAI

SEQ ID NO: 18116 - protein, 344 aa, Neisseria meningitidis
MSLPAMDAGIYLEETAPHALIEHNNILDNSVGVYLHGSSEAMVRENKIVGDATLRVNERGNGVTVWNAPGAQVVGNDISKGRDGIFSNTSTYNTYKNNRFSDLRFAVHYMYTNDSEISGNISVGNNMGYVLMFSERLKVFDNIAVGSRDQGIMLNYVNYSDIHDNIINKAGKCVFAYNANYDKLFANHFENCQIGIHFTAAIEGTSLHDNSFINNESQVKYVSTRFLDWSEGGHGNYWSDNSAFDLNGDGFGDSAYRPNGIIDQIIWRAPVSRLLMNSPAISIVKWAQAQFPAVLPGGVVDSKPLMKPYAPKIQTRYQAMKDELLKEAETRQSEWGRAENGSLN

SEQ ID NO: 18117 - protein, 375 aa, Neisseria meningitidis
MTLIKPVIAALALIGLAACSGSKTEQPKLDYQSRSHRLIKLEVPPDLNNPDQGSLYRLPAGSGAVRASDLEKRRTPAVQQPADAEVLKSVKGVRLERDGSQRWLVVDGKSPAEIWPLLKAFWQENGFDIKSEEPAIGQMETEWAENRAKIPQDSLRRLFDTVGLGGIYSTGERDKFIVRIEQGKNGVSDIFFAHKAMKEVYGGKDKDTTVWQPSPSDPNLEAAFLTRFMQYLGVDGQQAENASAKNPTLPAANEMARIEGKSLIVFGDYGRNWRRTALALDRIGLTVVGQNTERHAFLVQKAPNESNAVTEQKPGLFKRLLGKGKAEKPAEQPELIVYAEPVANGSRIVLLNKDGSAYAGKDASALLGKLHSELR

SEQ ID NO: 18118 - protein, 138 aa, Neisseria meningitidis
MKTSTVVFGGFFMADNRERIQIPVLENPGIREINHFFSVSNFEKKAGVLVFRIIPEPKFGNTELTIYFEEGCYLPMIQTILEDGDIEVKNLKTENYSGNTMEIWGDFYPIEHISKNISTIQNIISEFMIQKQTPAPII

SEQ ID NO: 18119 - protein, 63 aa, Neisseria meningitidis; identical to SEQ ID NO: 7354

SEQ ID NO: 18120 - protein, 611 aa, Neisseria meningitidis; identical to SEQ ID NO: 8062

SEQ ID NO: 18121 - protein, 269 aa, Neisseria meningitidis
MTALPRYSVFGNPVAHSKSPQIHRQFALQEGVDIEYGRICADIGGFAQAVSTFFETGGCGANVTVPFKQEAFHLADEHSDRALAAGAVNTLILLKNGKLRGDNTDGIGLANDITQVKNIAIEGKTILLLGAGGAVRGVIPVLKEHRPARIVIANRTHAKAEELAQLFGIEAVPMADVNGGFDIIINGTSGGLSGQLPAVNPEIFRDCRLAYDMVYGEAAKPFLDFARQSGAKQTADGLGMLVGQAAASYALWRGFTPNIRPVIEYMKAM

SEQ ID NO: 18122 - protein, 200 aa, Neisseria meningitidis
MFNIPAVAVSYLIGSLSFAVIVSKYYGMDDPRTYGSGNPGATNVLRSGKKKAAALTLLGDAAKGLVAVLLARVLQEPLGLSDSAIAAVALAALVGHMWPVFFGFKGGKGVATALGVLLALSPATALVCALVWLVMAFGFKVSSLAALTATIAAPLAALFFMPHTSWIFATLAIAILVLLRHKSNIVKLLEGRESKIGGSR

SEQ ID NO: 18123 - protein, 335 aa, Neisseria meningitidis
MSTFFRQTAQAMIAKHIDRFPLLKLEQVIDWQPIEHYLNRQKTRYLRDHRGRPAYPLLSMFKAVLLGQWHSLSDPELEHSLITRIDFNLFCRFDELSIPDYSTLCRYRNWLAQDDTLSELLKLINRQLTEKGLKIEKASAAVIDATIIQTAGSKQRQAIEVDEEGQVSGQTTPSKDSDARWIKKNGLYKLGYKQHTRTDAEGYIEKLHITPANAHECKHLSPLLEGLPKGTTVYADKGYDSAENRQHLEEHQLLDGIMRKACRNRPLSEVQTKRNRYLSKTRYVVEQSFGTLHRKFRYARAAYFGLIKVSAQSHLKAMCLNLLKAANRLSAPAAA

SEQ ID NO: 18124 - protein, 227 aa, Neisseria meningitidis; identical to SEQ ID NO: 1151

SEQ ID NO: 18125 - protein, 343 aa, Neisseria meningitidis; identical to SEQ ID NO: 12509

SEQ ID NO: 18126 - protein, 155 aa, Neisseria meningitidis; identical to SEQ ID NO: 6688

SEQ ID NO: 18127 - protein, 284 aa, Neisseria meningitidis
MKIVLISGLSGSGKSVALRQMEDSGYFCVDNLPLEMLPALVSYHIERADETELAVSVDVRSGIDIGQAREQIASLRGLGHRVEVLFVEAEESVLVRRFSETRRGHPLSNQDMTLLESLKKEREWLFPLKEIAYCIDTSKMNAQQLRHAVRQWLKVERTGLLVILESFGFKYGVPNNADFMFDMRSLPNPYYDPELRPYTGMDKPVWDYLDGQPLVQEMVDDIEKFLTHWLPRLEDESRSYVTVAIGCTGGQHRSVYVVEKLARRLKGRYELLIRHRQAQNLSDR

SEQ ID NO: 18128 - protein, 321 aa, Neisseria meningitidis
MLRLTALAVCTALALGACSPQNSDSAPQAKEQAVSAAQSESASVTVKTARGDVQIPQNPERIAVYDLGMLDTLSKLGVKTGLSVDKNRLPYLEEYFKTTKPAGTLFEPDYETLNAYKPQLIIIGSRAAKAFDKLNEIAPTIEMTADTANLKESAKERIDALAQIFGKQAEADKLKAEIDASFEAAKTAAQGKGKGLVILVNGGKMSAFGPSSRLGGWLHKDIGLPAVDESIKEGSHGQPISFEYLKEKNPDWLFVLDRSAAIGEEGQAAKDVLNNPLVAETTAWKKGQVVYLVPETYLAAGGAQELLNASKQVADAFNAAK

SEQ ID NO: 18129 - protein, 163 aa, Neisseria meningitidis
MNSLFVDNTVFITRLKAGHIGRLVQALFEEWHGFEPWSSVDKIHAYYGRCLKDDELPLAFAAVDDSGTLLGSATVKRHDMESFPQYEYWLGDVFVLPEYRGKGIGRRLVAHCIGAARSLGIKFLYLYTPDVQIFYESFGWAVVGRHFHNGEWVTVMRLDMDKV

SEQ ID NO: 18130 - protein, 417 aa, Neisseria meningitidis
MRKPRITYLDVWANDERIGTLEKGAMYRFTYDNPNSSLLGLHYQDRSKVYISNNMPHIFAQYFPEGFLAAHITSKYAFHDAPFEDNEMLRLAILGREALGRIHVRCNDPLFNEWIDGLEMKNPRILTERDLLGINARQVFQQYMAEIFHHGRFVSVSGIQQKMSLDAISRNTKQTASYIAKGFDASEYPCLAANEFLCMQTIKQAGIAVAQTSLSEDSSVLLVRRFDVSEQGYFLGMEDFTSLRQYSAEDKYKGSYAAIAQIIRQISGRPDEDLIHFFNQLAASCILKNGDAHLKNFSVLYHDEYDVRLAPAYDVLDTSIYRVGTQGIFDAYDDTLALNLTNHGKKTYPSKNTLLDFAEKYCDLGREDASFMIDTIVQAKEQVLVKYSDVLRENEWLAQKWHFIPDENEEGLPFTFR

SEQ ID NO: 18131 - protein, 334 aa, Neisseria meningitidis; identical to SEQ ID NO: 309

SEQ ID NO: 18132 - protein, 581 aa, Neisseria meningitidis
MERQTDEFAQAAARAAIWFLARYAGSGSEVLANCTERLFQALQNGHSFIRLSGGEADALSALAPVVGTSAAPLILEGRRLFLGRMWQLEYDLAAEIKRLAAAGTSAPDAAGARQNLAKWFQGTGSEGQRDAAALALLQSFMVITGGPGTGKTTTVAKLLALICGEDENLPNIALAAPTGKAAAHMARALHRAINGFDAPEAIRRHLLKLEGQTVHRLLKLRPPKMQAAFNPVYPLPLDVLVIDEASMLDTALMLQLLKAVKTGARVILLGDENQLPSVGIGAVLSVLSHKTVLDGETHQRLAGFLPEHGFSVSANPPVLAQNTAHLSFSHRFGDNSGIGCLARAAVSGDEGAWALFDRFPDELEHSECSPNARVERLYRAHKAYWQAVKDGNIEAAYAGISDIVVLAAWRQDAEDFNEAYCSHVRRKMNIPEHQAYFAGEPIMIRQNDYALELFNGDIGLIMEDVGRQGSLAAYFADADGFKKVAVSCLPEFEPAFAMTVHKSQGSEYREVWLLPPSAAPSDEGDDALSGLSKELLYTAITRAREKFVFFGGEEAFRQAAATVKTRQTALGSMLERVFSQE

SEQ ID NO: 18133 - protein, 1204 aa, Neisseria meningitidis
MSAPIQAFDPLTVPISGTNLIEASAGTGKTYGIAALFTRLIVLEQKNVERVLVVTFTKAATAELKTRLRARLDDVLQVLESKEIAKLGDDTLSDGIAAYCAEHHKGDTFLPALLKQALQKEGRTRLIVRLKAAIGQFDNAAIYTIHGFCQRILRDYAFLCQAPFDVELTEEDGDRLLIPAQDFWRERVSNDPVLAALAFKRKAVPQTVLAQISRYLSRPYLNFRRPQADLKQAQRNAETSWQTICRLLPELEAGFWRIHPDLNGNSYRKNSFGNLFKELAQKSAAGQLPFLDKDTHDRLLKLASDKLEAALKKGKTPDAAAFAELQKLADFGRDLNALEEAEEATMIRLQLDLIGYLNRSLAEMKKSRRERGFDDLLLDVHTALTDNPHAETLARAVAENWETALIDEFQDTDPLQYEIFQKIFIAQNRPLFLVGDPKQAIYSFRGADIYAYLQAAGDARHRYTLATNYRSHAALIGSIGALFRLKERPFVLENIGYSEVGAARAESRLSPERPAVQVRWLHENDNEKANKDVLRRRAADYCADEIAHALNEAAGGRLNFKGCPLQSGDIAVLVRTHNEAVMVSAALKKRQVQSVLLSRESVFASPEAAALSALIGFWLEPRRAGTLRFVLTSGIFGYDAQQLHDFNQNESEILHWAESARTALDNWNQYGIFAAMQQFSQTHGIETRLLSRNNGRSLTNYFQLLELLAAEDAQNRNPAALHKWLRDQISLAGNNSGDNRAIRLESDEDLVKIVTMHASKGLQYPLVYCPFAWDAQDTGPSDWQILHQSANRTELLAKAQLSEDEQKQYADEEMAERLRLLYVALTRAEEQLNIYAAYSTNTADNPLAYLIEGSPQDSRETVRRAYACEKDGIAMLKRNWRRVADNAPSGTNFAFTENAPPPAAYRSNAGQTAEFAANSIPERGFRFVRHTSFTALSRHTQTPDGGEEDACPSLDAAETSVPAMPSETPTASDGISIHDFPKGTQAGLCLHEILEDFKFGQAAAGQETLIADKLKKYGFEEIWLPAVAEMAEACRKTPLTGAYDLSDISPECRCPEMGFTLHTEDFSLKRLRDWFARDDIRLPEVCRAAAETLDFHTVNGFLNGFVDMVCQDPDGNICVIDYKSNHLGTDASAYTQQAMDEAVAHHHYYLQALIYAVAAARYFKLRGQPPAAVSVRYLFLRGLDGKGGGVWRWDIDAAALEQIK

SEQ ID NO: 18134 - protein, 528 aa, Neisseria meningitidis; identical to SEQ ID NO: 4033

SEQ ID NO: 18135 - protein, 123 aa, Neisseria meningitidis; identical to SEQ ID NO: 1296

SEQ ID NO: 18136 - protein, 292 aa, Neisseria meningitidis; identical to SEQ ID NO: 3715

SEQ ID NO: 18137 - protein, 49 aa, Neisseria meningitidis; identical to SEQ ID NO: 5144

SEQ ID NO: 18138 - protein, 275 aa, Neisseria meningitidis
MQNHVISLASAAERRAHIADTFGRHDIPFQFFDALMPSEALEQAMAELVPGLSAHPYLSGVEKACFMSHAVLWKQALDEGLPYIAVFEDDVLLGKDAEKFLAEDAWLKERFDPDSAFIVRLETMFMHVLTSPSGVADYCGRAFPLLESEHWGTAGYIISKKAIRFFLQHFVMLQPEQIKPIDLMMFSDFFDKEGMPVYQVSPALCAQELHYAKFHDQNSALGSLNEHDRLLNRKQQRRDSPANTFKRRLIRALTKISREREKRRQRREQFIVPFQ

SEQ ID NO: 18139 - protein, 613 aa, Neisseria meningitidis
MQTNYLSETDSIMKKLICLFAVFLMLCGRAFALDANDLLPPEKAFVPELAVADDGVNVRFKIADGYYMYQAKIVGKTDPADLLGQPSFSKGEEKEDEFFGRQTVYHHEAQVAFPYAKAVGEPYKLVLTYQGCAEAGVCYPPVDTEFDISGNGTYHPQTDEPASAKDRFLQPSSQNGSGALPPPKGDEGGDSRFKLSWDTLNANLLAFFLAGLGLSFTACMYPLLPIVSSIVVGDKKAGKARAFVLSVVYVQGLALTYTLVGIVAGLTGALLTVWLQQAWVVLAASALMVVLALSMFGLFNIQLPNAVQSYFQNQSSRLSGGKIVSVFIMGILSALIVGPCVAPPLAFALGYIGQTGDAVLGGLALYTLALGTGVPLIAIGTFGGHILPKAGDWMNAVKYAFGFILLAVAVYLATPHLPYYLVVALYTLLMLVPACMLLVNGRRQKRRPKAVAFALGSILLIGGAWFGWQGANGKTTALHHFLTLNPPAEAGKSSEHGKMFADTAALKAAMDTALKEHPDKPVVLDFYADWCISCKEMAAYTLNQPEVHQAVDMERFFQIDVTANTPEHQALLKEYGLFGPPGVFVVRSDGSRSEPLLGFVKADKFIEWYEQNR

SEQ ID NO: 18140 - protein, 128 aa, Neisseria meningitidis; identical to SEQ ID NO: 1074

SEQ ID NO: 18141 - protein, 213 aa, Neisseria meningitidis; identical to SEQ ID NO: 6185

SEQ ID NO: 18142 - protein, 492 aa, Neisseria meningitidis
MFSKLTPLAETGIPTLSCANAAGRLLHSDSRQIKQGDIFVACPGEYADGRSYIPAAVANGAAFVFWDDDGKFAWNPEWKVPNQGIKDLKHRAGILAAQVYGNVSDGLKVWGVTGTNGKTSITQWLAQAADLLGEKTAIVGTVGNGFWGALEETTHTTPAPVDVQTLLYRFRQQGATVAAMEVSSHGLDQSRVNGVSFRSAIFTNLTRDHLDYHGTMEAYGAIKSRLFYWHGLKHAVINVDDEYGAELAGRLKKDCPDLAVYSYGFSEHADIRITDFTASSDGIEAVFQTPWGEGKCHTRLLGRFNAQNLAACVALLCANGYPLDKVLDVLEKIRPASGRMDCIMNSGKPLVVVDYAHTPDALEKALATLQEIKPQGAALWCVFGCGGNRDRGKRPLMGAAAVQGADKVVVTSDNPRLENPHDIINDILPAVPAPECVEADRAAAIRYAVEQAAANDIILIAGKGHENYQDVQGVKHRFSDLEIVGQALLTRK

SEQ ID NO: 18143 - protein, 179 aa, Neisseria meningitidis; identical to SEQ ID NO: 403

SEQ ID NO: 18144 - protein, 449 aa, Neisseria meningitidis
MANQTNSKAKALLGWMDARFPLSKMWNEHLAQYYAPKNFNFWYYFGSLALLVLVIQIVSGIFLTMNYKPDGNLNAYHLPAAFTAVEYIMRDVSGGWIIRYMHSTGASFFFIVVYLHMFRGLIYGSYKKPRELVWIFGSLIFLALMAEAFMGYLLPWGQMSFWGAQVIINLFSAIPVIGPDLSTWIRGDFNVSDVTLNRFFALHVIAVPLVLLGLVVAHIIALHEVGSNNPDGVEIKKNKDENGIPRDGIPFHPYYTVKDVLGVVVFLIVFCAVLFFAPEGGGYFLEAPNFDAANALKTPPHIAPVWYFTPFYAILRAIPSFLGTQVWGVIGMGAAVVLIALLPWLDRGEVKSVRYRGPIFKTALVLFIISFIGLGILGAMVATDTRTLVARILSFVYFAFFLGMPFYTKLDKNKPVPERVTMSTAKQKIMFFVYVGITAVGAYLFATNI

SEQ ID NO: 18145 - protein, 812 aa, Neisseria meningitidis
MTEKSHKKTAKGRAGSPSPTSARNKKADNGARGNKVSERLKAVKELQKTETKKARPEHVVNLIGDALWLMGLAATLYLAISLISFDMGDPSWSHSSPVVEDVANWGGLFGAYVADVGYYLFGWSFWWWIAAACVVLYKNFRLHAKQTENEAYNHKIAAAALFVLTVFSPVLEYFVLGGKYADSLPVGAGGMVGIRVGAVFAWLLGKSGSLLIILVVLLLSLSLLVQISWLEFLNGAGRAVQNRLSALSGKVMALGKRRPNTKTDGVDTQNTRRMVKEAKNITAKPVALPEGSSSNRKSVAVSVAPPPKIQVSLFEDDEPRQAGEYHKPTLNLLRIPDSEPVSINPAELERTAELIESKLAEFGIGVQVVSATSGPVITRYEIEPAQGVKGSQIVALSKDLARSMSLQSVRIVETIAGKNTMGIELPNDKRQDVMLSEILSSPVFAEAKSKLTVALGKDIAGTPVVGDLAKMPHLLVAGMTGSGKSVGVNGMIMSMLFKATPDEVRFIMIDPKMLELSIYDGIPHLLCPVVTDMREAGQALNWCVAEMEKRYRLLSHAGVRNLEGFNQKVEAAKAAGKPLLNPFSLNPDEPEPLEKLPLIVVVIDELADLMMTERKAVEQQIARLAQKARAAGIHMIVATQRPSVDVVTGLIKANIPTRMAFTVQSKIDSRTILDQMGADELLKYGDSLFLQPGSAEPTRLQGAFVSDDEVHQVVNYVKSQAPADYIEGLLSGEAALETANIVNPNADSDELFDQAVAYVLESKKTSISSLQRQLRIGYNRAANLMEALENAGVVSPTDLNGSRKILAHKDHL

SEQ ID NO: 18146 - protein, 391 aa, Neisseria meningitidis; identical to SEQ ID NO: 2276

SEQ ID NO: 18147 - protein, 671 aa, Neisseria meningitidis
VGSFHGFCLSDSIGFQMPSENAKRSCFFILNEKTGAFFMTTPKKTAKTSGNEARELADLSEDIGIRFKYPNSERVYLQGSRDDIRVPLREIRQDDTYTAQGAEANPPIPVYDTSGVYGDPAAHIDLKQGLPHIRTAWLNERGDTEILPKLSSEYGIERAHDPKTAHLRFNQITRPRRAKSGSNVTQLHYARQGIITPEMEFVAIRERLKLDELSQKSEYAKLLKQHAGQSFGANIPTRPDQITPEFVRQEIAAGRAIIPANINHPELEPMIIGRNFRVKINGNLGNSAVTSSLTEEVEKMVWSLRWGADTIMDLSTGAHIHETREWIIRNAPVPIGTVPIYQALEKTGGIAEDLTWDLFRDTLIEQAEQGVDYFTIHAGVLLRYVPMTANRLTGIVSRGGSIMAKWCLAHHRENFLYTHFDEICEIMKAYDVSFSLGDGLRPGCIADANDESQFAELHTLGELTDKAWKHDVQVMIEGPGHVPLQRVKENMTEELQHCFEAPFYTLGPLVTDIAPGYDHITSGIGAANIGWYGTAMLCYVTPKEHLGLPDKEDVRTGIITYKLAAHAADLAKGWPGAQLRDNALSKARFEFRWRDQFRLSLDPERAESFHDETLPAEGAKIAHFCSMCGPKFCSMKITQEVRDYADKQKAQRQGMEEKAVEFVKRGAKIYS

SEQ ID NO: 18148 - protein, 364 aa, Neisseria meningitidis; identical to SEQ ID NO: 6346

SEQ ID NO: 18149 - protein, 197 aa, Neisseria meningitidis; identical to SEQ ID NO: 6180

SEQ ID NO: 18150 - protein, 157 aa, Neisseria meningitidis
MLSAESLKQIDIELAKYPADQRRSAIMGALRIAQTEKGWLAPETIAFVADYIGISPAQAYEVATFYNMYDLEPVGKYKLTVCTNLPCALRGGMATGEYLKQKLGISYGETTPDGKFTLVEGECMGACGDAPVMLLNNHKMCSFMTEEAIEKKLAELE

SEQ ID NO: 18151 - protein, 369 aa, Neisseria meningitidis
LEAQLGAPIEDYAPPKHWTRKQLRSMGRVSYLCVDAAEQALTDAGLLGDESITDGRMGVACGSSSGSTKDIGDVGELLLTGTSRNFSANTYVRMMPHTAAANIGIFFGLKGRIIPTSSACSSGSQGIGYAYEAIKYGLTDMMLAGGGEEFFSSEVYVFDSLYAASRRNGEPEKTPRPYDANRDGLVIGEGAGIFVLEELEHAKRRGAIIYAELVGYGANSDAYHISTPRPDAQGAILAFQTALQHAGLAPEDIGWINLHGTGTHHNDSMESRAVAAVFGNNTPCTSTKPQTGHTLGAAGAIEAAFAWGIADRQSNPEGKLPPQLWDGQNDPNLPAINLTGSGSRWETEKRIAASSSFTFGGSNCVLIIG

SEQ ID NO: 18152 - protein, 188 aa, Neisseria meningitidis
LLLPFATLALCTNAFAAPPSDASLARWLDTQNFDRDIEKNMIEGFNAGFKPYVDKALAEMPEAKKDQAAKAFNRYRENVLKDLITPEVKQAVRNTLLKNAREIYTQEEIDGMIAFYGSPVGQSVVAKNPRLIKKSMSEIAVSWTALSGKIARHHLPAFTEELRRIICGGKNPDAGCKQAGQVGKRHQK

SEQ ID NO: 18153 - protein, 333 aa, Neisseria meningitidis; identical to SEQ ID NO: 7659

SEQ ID NO: 18154 - protein, 119 aa, Neisseria meningitidis; identical to SEQ ID NO: 121

SEQ ID NO: 18155 - protein, 71 aa, Neisseria meningitidis; identical to SEQ ID NO: 3926

SEQ ID NO: 18156 - protein, 408 aa, Neisseria meningitidis
LKEDGMNQLKLAVSGAQILFVAFGAMVLVPLLTGLNPALALLGAGFGTLLFQITTKRKVPIFLGSSFAFIAPIIYSIGEWGLPSTMFGLFAAGFMYFVFAVLIRWRGLAAVHKLLPPVVIGPVIMVIGLSVAVAASSMAMGQADGKQVIDYTDSLILSGFTFAVTAIVSVFGSRMMKLIPILIGVASGYVLALLMGLVDTASIAHAPWFAVPHFETPQVNWQAALFMLPVAVAPAIEHIGGIMAIGNVTGKDYTKDPGLDKTLAGDGLGVCVAGLIGGPPVTTYGEVTGAVMITKNSNPVIMTWAAVFAVCMAFFGKFNAFLASIPMPVMGGIMLLLFGTIASLGVKTLIDAKVDLMLPKNLVIVSSVLTTGIGGMTLKLGSFSFAGVGLCAVLAIMLNSLLPDPKES

SEQ ID NO: 18157 - protein, 256 aa, Neisseria meningitidis
MRLTDTHCHLADSVLRGNLAQVLAEARQAGVWRFIVPATRPQDWQSVAELSEMPSEHGQIRIALGIHPWFSDGIAERDCVRLEAMLARYPQAWVGEIGLDFYDKTQTPPQRERQIQVFVRQLAIAQTLRRRVIIHNLKATADIAAAVKQTGFAQGGIVHAFSGSAEEARVLTKLGFKIGIGSLLLNPNARKVRDTLKALNDGDFVLETDSPFMLKKEINTPANILWIAEIAAQIRGVGVADIAAITERNADSLLRP

SEQ ID NO: 18158 - protein, 153 aa, Neisseria meningitidis; identical to SEQ ID NO: 2505

SEQ ID NO: 18159 - protein, 176 aa, Neisseria meningitidis; identical to SEQ ID NO: 3131

SEQ ID NO: 18160 - protein, 333 aa, Neisseria meningitidis; identical to SEQ ID NO: 465

SEQ ID NO: 18161 - protein, 97 aa, Neisseria meningitidis; identical to SEQ ID NO: 910

SEQ ID NO: 18162 - protein, 43 aa, Neisseria meningitidis; identical to SEQ ID NO: 3165

SEQ ID NO: 18163 - protein, 177 aa, Neisseria meningitidis; identical to SEQ ID NO: 1513

SEQ ID NO: 18164 - protein, 195 aa, Neisseria meningitidis; identical to SEQ ID NO: 653

SEQ ID NO: 18165 - protein, 240 aa, Neisseria meningitidis; identical to SEQ ID NO: 1969

SEQ ID NO: 18166 - protein, 473 aa, Neisseria meningitidis
MKIIQIQNNHNVNDDRPEFDRALIASLPASGPRYTSYPTADRFHDGFREGEYIKALHLRGMGALNKPLSLYIHIPFCNTICYYCGCNKIITKDKSRADAYIEYLEKEMELLAPHLNGRHQLAQLHFGGGTPTFLSDEQIERVFRMIRKHFELIPTGEYSIEIDPRKVSRDTVLMLGRLGFNRMSIGIQDFDPKVQAAVNRIQSYEETKEVIDAAREAGFKSVSVDLIYGLPHQTSESIKTTIDTVLSLDPDRLALYHYAHLPHVFKPQRRIDTVAVPDSEEKLDMLQYCVQTLTERGYVFIGMDHFAKPDDELSIALKEGFLQRNFQGYSTYADCDLVAIGVSSIGKIGSTYSQNERDIDAYYAAIDEGRLPIMRGYQLNQDDILRRNIIQDLMCRFALDYRIYESMFGIPFDRYFKDELADLEKLAGLGLVRLNSHGLTVTPKGRFLIRNIAMVFDYHLRHKETKAKYSQTV

SEQ ID NO: 18167 - protein, 914 aa, Neisseria meningitidis
LRYIYSIYGNERKIMQLHILNNPKDAALAADAEFLKQSLFNLLHEEASPLVVETVKLLSTSDDSAALIEKVLPQLDEQQTHDLTLACGLFAQILNIAEDVHHERRRQIHEEAGRGGAEGSLTETVRRLKAGKADGKSVQRQLDNTSVTAVLTAHPTEVQRQTVLSFNRRIRALLPQRERCTNADALARLRREIDTILLGLWQTSETRRHKLSVNDEINNGVSIFPMSFFEALPKLYRKMEHDFQTAYPDVRVPNILKIGGWIGGDRDGNPFVSAETLRFAFRRHADAVFRFYRGELDKLYRELPLSIRRVKVNDDVMALAALSPDEELARTEEPYRRAIAYIMARAMGKARALGLGMGCKFGFLEPYASAQEFLDDLKKLQRSLIDNGSRLLAEGRLADLIRSVSVFGFHMMPLDLRQHAGKHADVVAELFQHAGLEDYNSLNEEQKQAALLRELSHQRPLYSPFITYSDHTRHELAIFNEARKIKDEFGEDAVTQSIISNCEQPSDLLALALLLKESGLLVVENGKPRSRINIVPLFETIEALENACPVMETMFRLDWYDALLESRGNIQEIMLGYSDSNKDGGYVTSSWCLYQAELGLVELFKKYDVRMRLFHGRGGSVGRGGGPSYQAILAQPAGSVAGQIRITEQGEVITAKYADPGNAQRNLETLVAATLEASILPDKKDPDAKLMQALSDVSFKYYRELITHPDFIDYFLQTSPIQEIATLNLGSRPASRKTLARIQDLRAIPWVFSWMQNRLMLPAWYGFGSAVETLCEDKPETLAALREHAQSNPFFQAMLSNMEQVMAKTDITLAENYAGLSESPEKAAVIFGMIKEEYQRSRKALLDLLQTEELLRDNRSLARSLALRIPYLNALNGLQVAMLKRLRKEPDNPHALLMVHLTINGVAQGLRNTG

SEQ ID NO: 18168 - protein, 314 aa, Neisseria meningitidis
MSASKKFPIPLSYFSIALGLFALGLSWRYGASVGLLPALAAESLLAVASVVWLLLVAAYLIKMFAYRNDFLSDLRDLVQCCFISAIPITAMLEGLALKPYQAGAAAVLIYVGVAGQLAFSMYRAAGLWRGLHSLEATTPIIYLPTVATNFVSASSLAALGHHDYAALFFGAGMFSWLSLEASILGRLRTAAPVGTAARGVVGIQLAPAFVGCGAYFAVGGKVDGFALALIGYGCLQLLFLLRLTRWFWEGGFTMSFWGFSFGFAAMAGCGLHLAASGILSGLGLTLATAGSAGVALLLVGTLHRIATGRFLVRG

SEQ ID NO: 18169 - protein, 282 aa, Neisseria meningitidis; identical to SEQ ID NO: 1327

SEQ ID NO: 18170 - protein, 146 aa, Neisseria meningitidis
MMQTFRKISLYAATLWLGMQIMAGYIVAPVLFKMLPKMQAGEIAGVLFDILSWSGLAVWGAVLAAAFAALTRRQTALLLFLLSALAANRFLITPVIEALKYGHENWLLSALGGSFGMWHGISSIVFMAAALLSIYLSWRLYGKNAV

SEQ ID NO: 18171 - protein, 120 aa, Neisseria meningitidis; identical to SEQ ID NO: 1496

SEQ ID NO: 18172 - protein, 101 aa, Neisseria meningitidis
MRVSKIIGSMLLVTAVQTVFSANVYACRHNGKTSYSQTPGKHCTNAGLGRDRVYSSVRPAVKDRAEDAGVGDYSDTVRDEHVQNPKGNAQKDGSDAGIRPH

SEQ ID NO: 18173 - protein, 150 aa, Neisseria meningitidis
MQIILLEKIGGLGNLGDIVTVKNGYARNFLIPAGKAKRATEANMKEFEARRAELEAKQAEILADAQARQEKLDGQTITVAQKAGVDGRLFGSVTNADIAAAIVATGIEAVKANVRLPNGPLKAVGEYEVEVALHTDAVAKITVAVVAATE

SEQ ID NO: 18174 - protein, 90 aa, Neisseria meningitidis
MPIEDIPFYIFDLADFDVGIGDIGNIVGFAPSSSLPKSKKNALTGIAFLRGIDVYDPPVSKEKALKALEKYPEIYQKFQHFFPFVELPPL

SEQ ID NO: 18175 - protein, 134 aa, Neisseria meningitidis
MRKSRLSRYKQNKLIELFVAGVTARTTAELVGVNKSTAAYYFHRLRLLIYQNSPHLEMFDGEVEADESYFAERQNHINGIENFWNRAKRHLRKFDGIPKAHFELYLKGYERRFNNSEIKVQISILKQLVKSSLS

SEQ ID NO: 18176 - protein, 199 aa, Neisseria meningitidis; identical to SEQ ID NO: 1013

SEQ ID NO: 18177 - protein, 233 aa, Neisseria meningitidis; identical to SEQ ID NO: 3952

SEQ ID NO: 18178 - protein, 219 aa, Neisseria meningitidis
MDTWHDALGNEKRQPYFQEILNAVRQERLSGQIIYPPAEDVFNAFRLTAFDRVKVVILGQDPYHGAGQAHGLAFSVRQGVRIPPSLLNIYKELETDINGFSIPDHGCLTAWAEQGVLLLNTVLTVRAGQAHSHALLGWERFTDTVIRQLATHRKHLVFMLWGGYAQQKGRLIDSQNHLILTAPHPSPLSAYRGFFGCRHFSQANSYLSQHGIEPINWKL

SEQ ID NO: 18179 - protein, 123 aa, Neisseria meningitidis; identical to SEQ ID NO: 2701

SEQ ID NO: 18180 - protein, 54 aa, Neisseria meningitidis; identical to SEQ ID NO: 2207

SEQ ID NO: 18181 - protein, 718 aa, Neisseria meningitidis; identical to SEQ ID NO: 6011

SEQ ID NO: 18182 - protein, 275 aa, Neisseria meningitidis
MKLIEQHQIFGGLQQVWAHYAQTLQCEMKFAVYLPNNPENRPLGVIYWLSGLTCTEQNFITKSGFQRYAAEHQVIVVAPDTSPRGEQVPNDAAYDLGQGAGFYLNATEQPWVTNYQMYDYILNELPSLIEEKFPTNGKRSIMGHSMGGHGALVLALRNRERYQSVSAFSPILSPSLVPWGEKAFSAYLGKNREKWQQYDADSLIRQGCKVQGMRIDQGLEDEFLPTQLRTQDFIETCRAANQPADVRFHKGYDHSYYFIAGFIGEHIAYHAAFLK

SEQ ID NO: 18183 - protein, 401 aa, Neisseria meningitidis
LKPCDTGGKITVYPVQETGDSKDFPMIKISTRFDAGSVVVKDLTDPSNIRLALRPDNASDFAQWFYFRLQGAAYQNCIMHFENAAEAAYPKGWEGYQACASYDRRNWFRVPTSYENGVLTVNHTPLSNSVYYAYFEPYSEEQHLNLLGDAQGSGLCRIDDLGSTVQGRDINLLTIGNQVESDLKIWITARQHPGETMAEWFVEGLLGRLLDPQDPTARTLLDRATFYIVPNMNPDGSALGNLRTNAAGANLNREWENPTLEKSPEVFFVREKMLETGVDLFLDIHGDEGLPFIFVAGTEGVPNYNPRISALETQFKTALLNASPDFQDEYGYEKDAPGQANMTLATNWVGNRFNCLAYTLEMPFKDNANLPDDDFGWNGQRSLRLGEAALSAILNIIGDLR

SEQ ID NO: 18184 - protein, 740 aa, Neisseria meningitidis
MTKSTIIYTYTDEAPALATQSLLPIVQAFTRHADIDVKTSDISLSGRILAAFPEYLTEAQRVPDALAELGELVKQPDANVIKLPNISASVPQLTAAIKELQSKGFAVPDYPADPQTDEEKAVRERYDRIKGSAVNPVLREGNSDRRAPKAVKNFAKKNPHSMGAWAKDSKTHVATMQSGDFFHNEQSVTVPEATSVSIVFTDKQGNKKELRAPVALKAGEIIDATVMSKKALLAFLAEQVKDAKAKGVLFSLHMKATMMKVSDPIIFGHAVKVFFAPVFEKFGGKLAAAGVNVNNGFGNLLANLDKLDADTRAAVEAEIAAVYAANPDLAMVDSDKGITNLHVPSDVIVDASMPAMIRNSGRMWDKNGKAQDTKAVIPDSSYAGVYQATIDFCREHGAFDPTTMGTVPNVGLMAQAAEEYGSHNKTFEIEADGQVQVVDAAGKVLMQHDVEAGDIWRMCQTKDAPVKDWVQLAVNRARLSNTPAVFWLDENRPHDKSLLAKVKAYLAELDTNGLDIRVLAPEEAAKFSLGRLKNGEDTISVTGNVLRDYLTDLFPILELGTSAKMLSIVPLMNGGGMFETGAGGSAPKHVQQFLEENHLRWDSLGEFLALAVSFEHLAQKTGNTKAQVLADTLDAATEKLLLNDKSPKRKTGELDNRGSHFYLTLYWAQELAAQDKDAELKAAFAPLAKSLAENEAKIVEELSAVQGKAVDIGGYYAANPEKAAQAMRPSATFNQALSTL

SEQ ID NO: 18185 - protein, 147 aa, Neisseria meningitidis; identical to SEQ ID NO: 2466

SEQ ID NO: 18186 - protein, 616 aa, Neisseria meningitidis
MYLPSMKHSLPLLATLVLAACSSTNTLPAGKTPADNIETADLSASVPTRPAEPEGKTLADYGGYPSALDAVKQKNDAAVAAYLENAGDSAMAENVRNEWLKSLGARKQWTLFAQEYAKLEPAGRAQEVECYADSSRNDYTRAAELVKNTGKLPSGCTKLLEQAAASGLLDGNDAWRRVRGLLAGRQTTDARNLAAALGSPFDGGTQGSREYALLNVIGKEARKSPNAAALLSEMESGLSLEQRSFAWGVLGHYQSQNLNVPAALDYYGKVADRRQLTDDQIEWYARAALRARRWDELASVISHMPEKLQKSPTWLYWLARSRAATGNTQEAEKLYKQAAATGRNFYAVLAGEELGRKIDTRNNVPDADANSVLRMAEDGAIKRALVLFQNSRTAGDAKMRRQAQAEWRFATRGFDEDKLLTAAQTAFDHGFYDMAVNSAERTDRKLNYTLRYISPFKDTVIRHAQNVNVDPAWVYGLIRQESRFVIGAQSRVGAQGLMQVMPATAREIAGKIGMDAAQLYTADGNIRMGTWYMADTKRRLQNNEVLATAGYNAGPGRARRWQADTPLEGAVYAETIPFSETRDYVKKVMANAAYYASLFGAPHIPLKQRMGIVPAR

SEQ ID NO: 18187 - protein, 292 aa, Neisseria meningitidis
MNYAKEINALNNSLSDLKGDINVSFEFFPPKNEQMETMLWDSIHRLQTLHPKFVSVTYGANSGERDRTHGIVKRIKQETGLEAAPHLTGIDASPDELRQIAKDYWDSGIRRIVALRGDEPAGYEKKPFYAEDLVKLLRSVADFDISVAAYPEVHPEAKSAQADLINLKRKIDAGANHVITQFFFDVERYLRFRDRCVMLGIDVEIVPGILPVTNFKQLGKMAQVTNVKIPSWLSQMYEGLDDDQGTRNLVAASIAIDMVKVLSREGVKDFHFYTLNRSELTYAICHILGVRP

SEQ ID NO: 18188 - protein, 122 aa, Neisseria meningitidis; identical to SEQ ID NO: 2347

SEQ ID NO: 18189 - protein, 41 aa, Neisseria meningitidis; identical to SEQ ID NO: 9208

SEQ ID NO: 18190 - protein, 102 aa, Neisseria meningitidis; identical to SEQ ID NO: 1826

SEQ ID NO: 18191 - protein, 434 aa, Neisseria meningitidis
MAMAKNVVVIGAQWGDEGKGKIVDWLAEEAGGVVRFQGGHNAGHTLVVGGKKTILRLIPSGILHESLDCFIGSGVVVSPEALLGEIDELNAAGVKNVEGRLKIAPTCPLILPYHIALDQAREASRGKGKIGTTGRGIGPAYEDKVARRAIRAADLLHPEKLREKLDAILAYYNVQLQHLHNAEPVKAEDVMAVIEKVALRIAPMITDVSRVLNEKNKNGEKLLFEGAQGALLDIDYGTYPFVTSSNCLAGAASAGAGVGPQMLDYVLGIVKAYTTRVGSGPFPTELFDEVGAGLAERGHEFGSVTGRARRCGWFDAAALKRSIQINGISGMCITKLDVMDGVETINICVGYELPDGGKTDILPCGSDAVETCKPIYETMEGWKESTFGIKNYEELPDNAKAYLKRIEEVCGAPVAIVSTGPDREETIVLHHPFA

SEQ ID NO: 18192 - protein, 312 aa, Neisseria meningitidis; identical to SEQ ID NO: 1570

SEQ ID NO: 18193 - protein, 945 aa, Neisseria meningitidis
MNKKHGFQLTLTALAIATAFPAYAAQAGAAAPDAAQTQSLKEVTVRAAKVGRRSKEATGLGKIVKTSETLNKEQVLGIRDLTRYDPGVAVVEQGNGASGGYSIRGVDKNRVAVSVDGVAQIQAFTVQGSLSGYGGRGGSGAINEIEYENISTVEIDKGAGSSDHGSGALGGAVAFRTKEAADLISDGKSWGIQAKTAYGSKNRQFMKSLGAGFSKDGWEGLLIRTERQGRETRPHGDIADGVEYGIDRLDAFRLTHGIKKPSEEGEYFLAEGESEPKPVAKLAGNGNYLKNQLNRWVEERRSKGQALNSEEEAMVQEAQARHENLSAQSYTGGGRILPDPMDYRSGSWLAKLGYRFGGRHYVGGVFEDTKQRYDIRDMTEKQYYGTDESKKFSDKSGVYDGNDFRDGLYFVPNIEEWDKNKKDLVKGIGLKYSRTKFIDEHHRRRRMGLLYRYENAKYSDNWADKAVLSFDKQSVATDNNTLKLNCAVYPAVDKSCRASADKPYSYDSSDRFHYREQHNVLNASFEKSLKNKWTKHHLTLGFGYDASNAISRPEQLSHNAARISESTGFDEKNQDKYRLGKPEVVEGSVCGYIETLRSRKCVPRKINGSNIHISLNDRFSIGKYFDFSLGGRYDRKNFTTSEELVRSGRYVDRSWNSGIVFKPNRHFSLSYRASSGFRTPSFQELFGIDIYHDYPKGWQRPALKSEKAANREIGLQWKGDFGFLEISSFRNRYTDMIAVADHKTKLPNQAGQLTEIDIRDYYNAQNMSLQGVNILGKIDWNGVYGKLPEGLYTTLAYNRIKPKSVSNRPGLSLRSYALDAVQPSRYVLGFGYDQPEGKWGANIMLTYSKGKNPDELAYLAGDQKRYSTKRASSSWSTADVSAYLNLKKRLTLRAAIYNIGNYRYVTWESLRQTAESTANRHGGDSNYGRYAAPGRNFSLALEMKF

SEQ ID NO: 18194 - protein, 208 aa, Neisseria meningitidis
MNVNVINHPLVRHKLTLMREADCSTYKFRTLTTELARLMAYEASRDFEIEKYLIDGWCGQIEGDRIKGKTLTVVPILRAGLGMLDGVLDLIPTAKISVVGLQRDEETLKPVSYFEKFVDSMDERPALIIDPMLATGGSMVATIDLLKAKGCKNIKALVLVAAPEGVKAVNDAHPDVTIYTAALDSHLNENGYIIPGLGDAGDKIFGTR

SEQ ID NO: 18195 - protein, 162 aa, Neisseria meningitidis; identical to SEQ ID NO: 911

SEQ ID NO: 18196 - protein, 278 aa, Neisseria meningitidis
MIDLHCHSTVSDGMLSPAEIVRLAHQNGCTLLALTDHDHTGGIAEARAEADRLGLRLINGVEISVTWRGRTIHVVGLDFDEQDENLQNLLAQVRQGRLKRLEAIADKLEKKGIGGAYDGALELAANKEMVSRTHVAEFLIKNGYVKNKQQAFTKYLGDGKSCAVRHEWATLEDCVSAVNGAGGLAVIAHPMRYDLSATAKRNLFEEFKNLGGAGIEVHSGNCCKNDRLNYALLAERFGMLASAGSDFHRLNDFSGGILGACPELPENCRPVWAHFSRH

SEQ ID NO: 18197 - protein, 416 aa, Neisseria meningitidis
MFSKSVTLAQYDPDLAAAIAQEDQRQQDHVELIASENYVSCAVMETQGSQLTNKYAEGYPGKRYYGGCEYVDIVEQLAIDRVKKLFGAQYANVQPHSGSQANQAVYASVLKPGDTILGMSLAHGGHLTHGASVNISGKLYNAVTYGLDENEVLDYAEVERLALEHKPKMIVAGASAYALQIDWAKFREIADKVGAYLFVDMAHYAGLIAGGEYPNPVPFCDFVTTTTHKTLRGPRGGVILCRDNTHEKALNSSIFPSLQGGPLMHVIAAKAVAFKEALQPEFKQYAKQVKINAAAMAEELVKRGLRIVSGRTESHVFLVDLQPMKITGKAAEAALGKAHITVNKNAIPNDPEKPFVTSGIRIGSAAMTTRGFNEADARVLANLVADVLSNPEDEANLAKVREQVTALCNKYPVYGA

SEQ ID NO: 18198 - protein, 248 aa, Neisseria meningitidis; identical to SEQ ID NO: 14834

SEQ ID NO: 18199 - protein, 354 aa, Neisseria meningitidis
MTLLKNDTFLRALLKQPVEYTPIWMMRQAGRYLPEYKATRAKAGSFLDLCKNTELATEVTIQPLERFDLDAAILFSDILTVPDAMGLGLYFAEGEGPKFKRALQHEDDIAKLHVPDMEKLQYVFDAVSSIRKALDGRVPLIGFSGSPFTLACYMVEGGSSKEFRTIKTMMYSRPDLLHKILDTNAQAVTAYLNAQIDAGAQAVQIFDTWGGVLSDEAFKEFSLKYIRQIVAGLKRESEGRRVPVIVFAKGGGLWLESMAEIGADALGLDWTCNIGEARRRVGKQVALQGNFDPFALFGTPESIRTEVARILADYGQGSGHVFNLGHGINQHADPEHAKILVDTVHELSRQYHGG

SEQ ID NO: 18200 - protein, 582 aa, Neisseria meningitidis
MIHYKITPSPLDHEWHILLTFTQDDDLPIEISLPNWVPGSYLIRDFSRHITSIHASCNGTSMPLEQIAKNRWHAAAVRGEWQIRYTVYAFDLSVRGSFLTTERGFFDGSCLFLKVEGTETLPHRLELTGIPSEWRIATTLPETGRFVFQAASYAELIDRPVEMGLIEFLDFEAAGIPHTIALSGIYPDFDRNRLVSDIKKICETELAVFSSPAPFQKYLFLLHVGDHIYGGLEHADSTALLADRHSLPPFGMTDADDAYTTLLGLFSHEYFHAWNVKSIKPAAFAPYDLDKENYTEQLWAFEGITSYYDDLFLARSRTISPESYLNLLAQGITRVQQTRGRLRQTLAESSFTAWNKFYKPDENSPNAIVSYYQKGALAALCLDLIIRNRSNGRHSLDTIMDKLYREWRDTHSGIPEKHWQIRCQEITGLDLEDFFQKALYSTENLPLAECLATAGVGLTFLPLPRQHGGGYAEHICPVPSAGDFGARFKQNADHIVLTHVFNGGSAESAALCPQDKIIALDGYACTDFTAQWARYHVNAKINIHFFRAGILRQTVLTVQAAAADTAILHITDRNLLDNWLFG

SEQ ID NO: 18201 - protein, 143 aa, Neisseria meningitidis; identical to SEQ ID NO: 2619

SEQ ID NO: 18202 - protein, 484 aa, Neisseria meningitidis
MSIEPTPPNLENDGIENDVERVSADFDRVHSLCEILEPAFEQIENGTPLEDAPLRDKLTELTVLLSELHPADVAAVLESLPPRERNIVWILVKPEDDGEVLLEVSDAVRETLIESMDKDELLAAVDDLDADELAELADDLPHQVVYEALQTRDEEERAQVKAAMSYEDNQVGAIMDFELVSIRADVACEVVLRYLRRFDSLPDHTDKIFVVDENDVLQGVLPIRKLLVADPEDLVENVMAKDVVRFRAEDDVEEAAQAFERYDLVTAPVVDENKKLIGRITVDEMVDVIREESEADMLNMAGLQEEEDLFAPVLDSVKNRWMWLAVNLCTAFLASRVIGAFEGSIEKIVALAALMPIVAGIGGNSGNQTITMIVRAMAMGQLTGMQAGRLLKKEVGVALVNGIIWGTVMGAVSWLLYGSLGIGLVMIAAMTLNLLLAATVGVLIPVVMEKFGRDPALGSSVLITAVTDSGGFLIFLGLATLFLL

SEQ ID NO: 18203 - protein, 375 aa, Neisseria meningitidis
MYTFRPFPKLHTETHIMNIQNIRTLLDTVAVPNTARTLGGEKAVRSVEQRSDGIHIALHFGFPVAHIASETADRIQEILMPLTGDTHIHLSIDTEIGTHKVQPGVTTIKGVKNIIAVASGKGGVGKSTTTANLAAAMARMGARVGVLDADLYGPSQPTMLGVDDRKPDQKNQKLIPVESSDGIQVMSIGFLVDTDQAVVWRGPMVSQALQQLMFQSEWDEVDYLFIDLPPGTGDIQLTLSQRIPVTGSVIVTTPQDIALIDARKAVDMFRKVNIPILGVLENMSVHICSNCGHSEALFGTDGGKDFAARLNVPLLGQLPLSLPVREAMDGGTPAQLFDEHPAIARIYTDAAFQIALGIADKGKDFSSRFPKIVVE

SEQ ID NO: 18204 - protein, 308 aa, Neisseria meningitidis
MSFAFFFPGQGSQSLGMMNGFAEQAIVKATFDEASAILGQDLWAMINGSDAEIIGQTVNTQPIMLAAGVAVYRAYLEAGGKTPAAVAGHSLGEYTALVAAGALNFADAVKLVRLRAELMQSAVPQGVGAMAAILGLEDEQVRQICTESAQDEVVEAVNFNSPGQVVIAGNAAAVGRAMTAAKEAGAKRALPLPVSVPSHCSLMKPAADKLAEALKTVEIKQPQIRVIHNADVAAYDDADKIKDALVRQLYSPVRWTETVNALVSDGIAESAECGPGKVLAGLAKRINKTAACSALTDAGQVAAFIEAH

SEQ ID NO: 18205 - protein, 335 aa, Neisseria meningitidis
MSTFFQQTAQAMIAKHIDRFPLLKLDQVIDWQPIEQYLNRQKTRYLRDHRGRPAYPLLSMFKAVLLGQWHSLSDPELEHSLITRIDFNLFCRFDELSIPDYSTLCRYRNRLAQDDTLSELLKLINRQLTEKGLKVEKASAAVIDATIIQTADSKQRQAIEVDEEGQINGQTTPSKDSDARWIKKNGLYKLGYKQHTRTDAEGYIEKLHITPANAHECKHLPPLLEGLPKGTTVYADKGYDSAENRQHLEERQLLDGIMRKACRNRPLTETQTKHNRYLSKIRYVVEQSFGTLHRKFRYARAAYFGLIKVSAQSHLKAMCLNLLKAANRLSAPVAA

SEQ ID NO: 18206 - protein, 244 aa, Neisseria meningitidis
MASHNTTHQMKTLCSSCSLRELCLPVGLLPNELSQLDAVIRQSRRLKKGEYLFCVGEAFTSLFAIRSGFFKTTVASQDGRDQVTGFFMSGELIGMDGICSHVHSCDAVALEDSEVCELPFTHIEELGQNIPSLRTHFFRMMSREIVRDQGVMLLLGNMRTEERIAAFLLNLSQRLYSRGFAANDFILRMSREEIGSYLGLKLETVSRTLSKFHQEGLISVEHKHIKILNLQVLKKMVSGCSHAI

SEQ ID NO: 18207 - protein, 321 aa, Neisseria meningitidis; identical to SEQ ID NO: 4494

SEQ ID NO: 18208 - protein, 269 aa, Neisseria meningitidis
MTPLKIAIAGVNGRMGRVLVEAVNNHPDTVLSGALEHSGSEALGLDAGYAVGLKTGIAISDDVDAVLAQSDVLIDFTRPEPTLKHLQKCVEKQVNIIIGTTGFDDAGKAAIHTAAEQTGIVFAANFSVGVNLTFHILDTVARVLNEGYDIEIIEGHHRHKVDAPSGTALRMGEVIAGALGRDLKQCAVYGREGHTGPRDPSTIGFATVRAGDIVGDHTALFATDGERVEITHKASSRMTFAAGAVRAAVWVNGKTGLYDMQDVLGLNNR

SEQ ID NO: 18209 - protein, 595 aa, Neisseria meningitidis
MALVELKVPDIGGHENVDIIAVEVNVGDTIAVDDTLITLETDKATMDVPAEVAGVVKEVKVKVGDKISEGGLIVVVEAEGTAAAPKAEAPAAAPAQEAPKAAAPAPQAAQFGGSADAEYDVVVLGGGPGGYSAAFAAADEGLKVAIVERYKTLGGVCLNVGCIPSKALLHNAAVIDEVRHLAANGIKYPEPELDIDMLRAYKDGVVSRLTGGLAGMAKSRKVDVIQGDGQFLDPHHLEVSLTAGDAYEQAATTGEKKIVAFKNCIIAAGSRVTKLPFIPEDPRIIDSSGALALKEVPGKLLIIGGGIIGLEMGTVYSTLGSRLDVVEMMDGLMQGADRDLVKVWQKQNEYRFDNIMVNTKTVAVEPKEDGVYVTFEGANAPKEPQRYDAVLVAAGRAPNGKLISAEKAGVAVTDRGFIEVDKQMRTNVPHIYAIGDIVGQPMLAHKAVHEGHVAAENCAGHKAYFDARVIPGVAYTSPEVAWVGETELSAKASGRKITKANFPWAASGRAIANGCDNGFTKLIFDAETGRIIGGGIVGPNGGDMIGEVCLAIEMGCDAADIGKTIHPHPTLGESIGMAAEVALGTCTDLPPQKKK

SEQ ID NO: 18210 - protein, 163 aa, Neisseria meningitidis
MRAVIQKTVGAKVDVVSENGTETCGKIDGGFVVLLGVTHDDTEKDARYIADKIVHLRVFEDEAGKLNLSLKDVGGAVLLVSQFTLYADAASGRRPSFSQAAPAEQAQQLYLRTAELLRGHGIHVETGRFRTHMQVSLCNDGPVTILLDSFMTRISPKMKVVPD

SEQ ID NO: 18211 - protein, 457 aa, Neisseria meningitidis; identical to SEQ ID NO: 7200

SEQ ID NO: 18212 - protein, 408 aa, Neisseria meningitidis; identical to SEQ ID NO: 2386

SEQ ID NO: 18213 - protein, 188 aa, Neisseria meningitidis; identical to SEQ ID NO: 10057

SEQ ID NO: 18214 - protein, 179 aa, Neisseria meningitidis; identical to SEQ ID NO: 11525

SEQ ID NO: 18215 - protein, 354 aa, Neisseria meningitidis
MLVLGIESSCDETGVALYDTERGLRAHCLHTQMAMHAEYGGVVPELASRDHIRRLVPLTEGCLAQAGASYGDIDAVAFTQGPGLGGALLAGSSYANALALALDKPVIPVHHLEGHLLSPLLAEEKPDFPFVALLVSGGHTQIMAVRGIGDYALLGESVDDAAGEAFDKTAKLLGLPYPGGAKLSELAESGRPEAFVFPRPMIHSDDLQMSFSGLKTAVLTAVEKVREANGSETIPEQTRNDICRAFQDAVVDVLAAKVKKALLQTGFRTVVVAGGVGANRKLRETFGNMTVQIPTPKGKPKHPSEKVSVFFPPTAYCTDNGAMIAFAGAMHLGKGREVGAFNVRPRWPLSEIVR

SEQ ID NO: 18216 - protein, 172 aa, Neisseria meningitidis; identical to SEQ ID NO: 3384

SEQ ID NO: 18217 - protein, 186 aa, Neisseria meningitidis; identical to SEQ ID NO: 1228

SEQ ID NO: 18218 - protein, 468 aa, Neisseria meningitidis
VEFSTKTEILQEQQAGAQLFVCTEEAQLNHPTALALLSSLEEGQNFADTKIPTDNGLQAIAVARLAKTDRAALNKVAAEAAKWAQNQETVNVDIHAFDEAQAAAVAEAFAIAFGNAAYRFDRYKKEAKPAKFETAVFHSAHEAAVKEALRVAEAQVYGQSLCRDLGNAAPNECTPEFLARTAKAEAEKLGAHAKIIEKDYIKENMGSFWSVAKGSVEDPYLVELSYFGAADKEAAPVVLVGKGITFDTGGISLKPGLNMDEMKFDMCGAATVISTFCAAVKLQLPINLIAIVATCENMPSGAANKPGDVVKSMKGLTIEVLNTDAEGRLILCDALTYAEQFKPKAVIDVATLTGACIVALGHDVSGVMGNNQDLVDSLLAASYNVDDKAWQLPLFETYKDQLKSNFADIPNIGTPGAGTITAATFLSYFTEDYPWAHLDIAGTAWKSGAEKGATGRPVPLLLNYLRNL

SEQ ID NO: 18219 - protein, 338 aa, Neisseria meningitidis
MYRKLIALPFALLLAACGREEPPKALECANPAVLQGIRGNIQETLTQEARSFAREDGRQFVDADKIIAAAYGLAFSLEHASETQEGGRTFCIADLNITVPSETLADAKANSPLLYGETALSDIVRQKTGGNVEFKDGVLTAAVRFLPVKDGQTAFVDNTVGMAAQTLSVALLPYGVKSIVMIDGKAVKKEDAVRILSGKAREEEPSKPTPEDILEHNAAGGDAGVPQAAEGAPEPEILHPDDGERADTVTVSRGEVEEARVQNQRAESEITKLWGGLDTDVQKELVGEQRKWAQEKISNCRQAAAQADRQEYAEYLKLQCDTRMTRERIQYLRGYSID

SEQ ID NO: 18220 - protein, 252 aa, Neisseria meningitidis; identical to SEQ ID NO: 10154

SEQ ID NO: 18221 - protein, 51 aa, Neisseria meningitidis; identical to SEQ ID NO: 3530

SEQ ID NO: 18222 - protein, 136 aa, Neisseria meningitidis; identical to SEQ ID NO: 4515

SEQ ID NO: 18223 - protein, 149 aa, Neisseria meningitidis
LVIQDGKILYKQETSVSEEQLNQLIQRTYQVTEEKAEEIINSPQKPSDYQESVANYFNQQITQEIQRVLQFYYTTQTADDMTDIKHILLTGEAARQEGIAQTVASQTNADVQCVHPARYFADNLKTDKQQFELDAPTLTRAFGLAVRGL

SEQ ID NO: 18224 - protein, 130 aa, Neisseria meningitidis
MSMHDPISDMLTRIRNAQRANKAAVAMSSSKLKCAIAKVLKEEGYIEDFAVSSDVKSILEIQLKYYAGRPVIEQIKRVSRPGLRIYKASSEIPSVMNGLGIAIVSTSKGVMTDRKARSQGVGGELLCIVA

SEQ ID NO: 18225 - protein, 437 aa, Neisseria meningitidis
LPCRLKAVSDGICILIRLESIIEQAQNINKLNNGRTLRCRTDKTEESPMSKKLHPQTLAIRGGKEQTEYREHNQALFLTSSFMWDNAQHAADLFSKKIKGFTYTRTANPTTAAFEKRIAALEGAERAVATSTGMSAIQAAFFTFLQAGDHVVSSRSLFGTTVGFINNIVTKFGIEVSHVSPTDINEWKAAVKANTKLLFLETPSNPLGEVADLEALAELAHGIGAILVVDNSLLSPVGSQPLKHGADISVSSATKAIDGHGRVMGGVLAGSEELMAQAAVYCNSCGLAMSPFNAWQLLSGVETLSLRMEKQFDNALKIAQWLQAQPQVQAVYYTGLPDHPQAALIRKQQNGGGIVIGFEVADQAAAWKVVDGVELFSRTANLGDVRSTITHPWTTTHGRMQPEEKLAANIRPGLVRLSVGLEYVGDLIDDLKQALAR

SEQ ID NO: 18226 - protein, 230 aa, Neisseria meningitidis; identical to SEQ ID NO: 1058

SEQ ID NO: 18227 - protein, 150 aa, Neisseria meningitidis; identical to SEQ ID NO: 7624

SEQ ID NO: 18228 - protein, 311 aa, Neisseria meningitidis; identical to SEQ ID NO: 16480

SEQ ID NO: 18229 - protein, 95 aa, Neisseria meningitidis; identical to SEQ ID NO: 589

SEQ ID NO: 18230 - protein, 286 aa, Neisseria meningitidis; identical to SEQ ID NO: 5950

SEQ ID NO: 18231 - protein, 65 aa, Neisseria meningitidis; identical to SEQ ID NO: 127

SEQ ID NO: 18232 - protein, 168 aa, Neisseria meningitidis
MPLLDSFKVDHTRMHAPAVRVAKTMTTPKGDTITVFDLRFCVPNKEILPEKGIHTLEHLFAGFMRDHLNGNGVEIIDISPMGCRTGFYMSLIGTPSEQQVADAWLASMQDVGNVKDQSKIPELNEYQCGTYQMHSLAEAQQIAQNVLAHKVAVNKNEELTLDEGLLNA

SEQ ID NO: 18233 - protein, 316 aa, Neisseria meningitidis; identical to SEQ ID NO: 5301

SEQ ID NO: 18234 - protein, 436 aa, Neisseria meningitidis
MDTSKQTLLDGIFKLKANGTTVRTELMAGLTTFLTMCYIVIVNPLILGETGMDMGAVFVATCIASAIGCFVMGFVGNYPIALAPGMGLNAYFTFAVVKGMGVPWQVALGAVFISGLIFILFSFFKVREMLVNALPMGLKMSIAAGIGLFLALISLKGAGIIVANPATLVGLGDIHQPSALLALFGFVMVVVLGHFRVQGAIIITILTITVIASLMGLNEFHGIIGEVPSIAPTFMQMDFEGLFTVSMVSVIFVFFLVDLFDSTGTLVGISHRAGLLVDGKLPRLKRALLADSTAIVAGAALGTSSTTPYVESAAGVSAGGRTGLTAVTVGVLMLACLMFSPLAKSVPAFATAPALLYVGTQMLRSARDIDWDDMTEAAPAFLTIVFMPFTYSIADGIAFGFISYAVVKLLCRRTKDVPPMVWIVAVLWALKFWYLG

SEQ ID NO: 18235 - protein, 415 aa, Neisseria meningitidis
MQLTAVGLNHQTAPLSIREKLAFAAACLPEAVRNLARSKAATEAVILSTCNRTELYCVGDSEEIIRWLADYHSLPIEEISPYLYTLGMQETVRHAFRVACGLDSMVLGEPQILGQIKDAVRVAQEQESMGKKLNALFQKTFSVAKEVRTDTAVGENSVSMASASVKLAEQIFPDIGDLNVLFIGAGEMIELVATYFAAKSPRLMTVANRTLARAQELCDKLGVNAEPCLLSDLPAILHDYDVVVSSTASQLPIVGKGMVERALKQRQSMPLFMLDLAVPRDIEAEVGDLNDAYLYTVDDMVNIVQSGKEARQKAAAAAETLVSEKVAEFVRQQQGRQSVPLIKALRDEGEKARKQVLENAMKQLAKGATAEEVLERLSVQLTNKLLHSPTQTLNKAGEEDKDLVHAVAQIYHLDK

SEQ ID NO: 18236 - protein, 208 aa, Neisseria meningitidis
MYTGERFNTYSHLSGLILAAAGLALMLLKTIGHGDGYRIFSVSVYGISLLLLYLSSSLYHGIAAGKLKSILKKTDHCMIYVLIAGSYTPFALVSLRNGPGWTVFSLSWLLAAAGIAQELTIGRKSEKRLLSIVIYVVMGWMVLAVMKSLTASLPPAGLAWLAAGGMLYSVGIYWFVNDEKIRHGHGIWHLFVLGGSITQFVSVYGYVI

SEQ ID NO: 18237 - protein, 427 aa, Neisseria meningitidis
MTASKSGFIGQIFSRNMLVCIFTGFTSGLPLYFLINLIPAWLRSEQVDLKSIGLMALIGLPFTWKFLWSPLMDAVRLPVLGRRRGWMLLTQAGLLAALAAYAFLNPRNHLPLIAGLSVLVAFFSASQDIVLDAFRREILSDEELGLGNSVHVNAYRIAALIPGSLSLVLADRMPWSEVFVITSLFMLPGLLMTLFLAREPVLPPAVPKTLKQTVVEPFKEFFTRKGIASAVCVLLFIFLYKLGDSMATALATPFYLDMGFSKTDIGLIAKNAGLWPAVAAGILGGVWMLKIGVNKALWIFGAVQAVTVLGFVWLAGFGHFDTVGTGERLMLAAVIGAEAVGVGLGTAAFVSYMARETNPAFTATQLALFTSLSAVPRTVINSFAGYLIEWLGYVPFFQLCFILALPGMLLLLKVAPWNGEKTQDAGR

SEQ ID NO: 18238 - protein, 311 aa, Neisseria meningitidis
MSVLIIVEHDNKQLNPTTLHAVTAAAKLGKVDLLVAGSGASAVVESAKQVAGVEKVLVADAAHYAEGLAEELAPLVVKLAADYRYVAATATTFGKNLLPRVAALLDVPQISDLTEIVDNTTFVRPIYAGNAFETVQANAEKLVLTFRATAFDAAAVQGGNAEVINIETTPAQNLSRFVNRQLSHSDRPELTQAKVIVSGGRALGSAEKFNEVLTPLADVLGAAIGASRAAVDAEYAPNDAQVGQTGKVVAPQLYFAIGISGAIQHVAGMQDSKVIVAINKDADAPIFNVADYGLVGDLFEIVPQLTEALKN

SEQ ID NO: 18239 - protein, 246 aa, Neisseria meningitidis
MNPLISDFQTPQQRTPVIVALDFSNEKDTLGFVRNLDPTLCQIKIGKELFTATGRNLAESLINQGFKLFLDLKYHDIPHTVAQACKVAADMGVWMVDMHASGGRRMMEAAAEAVAGYGTKPLLIGVTVLTSMEQSDLAEIGLNTAPEEQVIRLAKLAQSSGLDGVVCSAQEAAPLRRELGQDFVLVTPGIRLDVAGNNDDQRRIMTPAEALAAASTYLVMGRPVTQAADPVAVLREVNRVANLEAN

SEQ ID NO: 18240 - protein, 182 aa, Neisseria meningitidis
LNLTEGDTVLDREGYRPNVGIILINNRDEVFWGKRVREHSWQFPQGGIKPGESPETAMYRELYEEVGLLPQHVKIIGRTRDWLRYDVPNNWVRREWRGSYRGQKQIWYLLRLTGRDCDVNLRATRHPEFDGWRWHQYWAPVDEVIDFKRDVYLGALKELSSRFLRGMESYEDFAARQSSDNR

SEQ ID NO: 18241 - protein, 423 aa, Neisseria meningitidis
MKLLVIGNGGREHALAWKLAQSPKVETVFVAPGNAGTAIEPKLQNIDLTAHQDLIEFCRKENIVFTVVGPEAPLAAGVVDDFRAAGLKIFGPTQYAAQLESSKDFAKAFMAKYNIPTAQYQTFENADAAHDYVNQKGAPIVIKADGLAAGKGVIVAMTLDEAHAAIDDMLLDNKMGNAGARVVIEDFLQGEEASFIVMVDGNNVLPMATSQDHKRLLDGDKGLNTGGMGAYSPAPVVTPVVYERAMNEIILPTVAGMKAEGHEFTGFLYAGLMIDQSGAPYTIEFNCRFGDPETQPIMSRLNSDLADLVEAAIDGKLDSVAAEWNPQTAVGVVLAAQNYPETPKKGDVISGLDAANQVGKVFHAGTTANEKGDVLTNGGRVLCVVGLGDNVAQAKAKAYGALEKISFDGMQYRKDIADKAINR

SEQ ID NO: 18242 - protein, 119 aa, Neisseria meningitidis; identical to SEQ ID NO: 3183

SEQ ID NO: 18243 - protein, 152 aa, Neisseria meningitidis; identical to SEQ ID NO: 14217

SEQ ID NO: 18244 - protein, 157 aa, Neisseria meningitidis; identical to SEQ ID NO: 8805

SEQ ID NO: 18245 - protein, 219 aa, Neisseria meningitidis; identical to SEQ ID NO: 474

SEQ ID NO: 18246 - protein, 193 aa, Neisseria meningitidis; identical to SEQ ID NO: 1322

SEQ ID NO: 18247 - protein, 305 aa, Neisseria meningitidis
MVLDGFAAHFDAYLENIVREGKSEHTVAAYRRDLEELFALLAQMPSEDAGGVPQDLSRRDFTAALRRLSQRGLNARTLARKLSSWRQYCVWLVERGLLHTDPTADIKPPKQPERVPKALPQEWLNRMLDLPVDGGDPLAVRDHALFELMYGSGLRVSEIHGLNADDVYLDEAWVHVTGKGRKQRQVSLTGKSVEALKNYLPLRQTASDGKALFTGRNGTRLSQRQIQKRLAQWAAQNGDGRHVSPHMMRHSYAGHLLQASRDIRAVQELLGHSSLSTTQIYTKLDFDHIARLYDEAHPRAKRQDE

SEQ ID NO: 18248 - protein, 151 aa, Neisseria meningitidis
MAYSADLRNKALNYSGLNLNQDKATKPQTVQIVRQGEATPYWFKFNPLYYEQCKNISQTAATFNLSRNTLYLWIRLKKQTGSLKHQVTGLNAVKSDRQKPAQYVGQHQDAYLHEIAKHFDCTAATVCYALKQMGITRKKRPPLTKNKTRPK

SEQ ID NO: 18249 - protein, 171 aa, Neisseria meningitidis
MKRAKQYPFLSLQRQRFHLNFENASSTANLPSERDFYRWAWSALKNEYRRADISLILLDEEEARAYNRDYRGKDYATNVLSFALNEGEILPCQVSEKLYGDLIICPQVVLKEAAEQGKTPERHFTHLTIHGVLHLMGYDHIEDDEAEIMEAEEIRLMLAAGFPNPYQEDEY

SEQ ID NO: 18250 - protein, 71 aa, Neisseria meningitidis; identical to SEQ ID NO: 6296

SEQ ID NO: 18251 - protein, 167 aa, Neisseria meningitidis
MSDPNLIDPEIFAAEGQNLQGSFLLEELDERVSSHDYPADRQTKISFTLTGGRDRLQRLFLDLNVKADMPLICQRCIKPMPFMLDESSRIVLFSNEESLDESMLADEELEGILIEKELDVRTLVEDQILMSLPFSPRHEDCGDNGTLEEVNRDKPNPFAVLAGLKSN

SEQ ID NO: 18252 - protein, 164 aa, Neisseria meningitidis
MNNRHFAVIALGSNLENPAQQVRAALDTLSSHPDIRLHQTSSLYATAPVGYDDQPDFVNAVCTVSTDMDSISLLSLLNRIEADFGRKRSFRNAPRTLDLDIIDFDGISSDDPRLTLPHPRAHERSFVIRPLAEILPDFVLGKHGKVAELSKQLGNQGIRLLPDR

SEQ ID NO: 18253 - protein, 92 aa, Neisseria meningitidis; identical to SEQ ID NO: 32

SEQ ID NO: 18254 - protein, 375 aa, Neisseria meningitidis
MSNWKPDIPYNDLPPLPPKQDIESKTILKRCIAARASLARLKQAAELIPNQAMLINTLPVMEARASSEIENIVTTTDKLFQSLQMDTERQDPATKEALQYRTALFAGYESLTSRPLCTQTAIMVCNAIKHPYEMAIRKTGGTALKGGNSGNVVYTPPEGEETIRGKLANWERFIHESGDLDPLIIMAAAHYQFEAIHPFTDGNGRTGRILNSLLLIEKGLLDLPILYLSRYIIENRADYYRLLLGVTERQDWESWIIYILDGVADTADWTVAKIDAIRRLFEQTRQHIRTHAQGIYTHELVNLLFEQPYTRIANLEAAGIAKRQTASKYLKELSDIGVLQEIAIGRDKLFIHPRLMELLRGEGNSFTSFQSLVKA

SEQ ID NO: 18255 - protein, 157 aa, Neisseria meningitidis
MTDFSVWETAPFGATVDYILQRYHNVHRAQFEELVPLAQKVVQVHADTFPAEIARLLADMQNELLMHMMKEERMLFPMINQGVGRGAAMPISVMMHEHEEHDRAIARLKELTDNFQPPEGACGSWTRLYALAKEMVEDLNDHIHLENDILFARVLDS

SEQ ID NO: 18256 - protein, 192 aa, Neisseria meningitidis
MSATEIEKAKAKITAYSKLVAGTASAVVGGDVNTAANAATVAVENNSLFQPQTTLEAGVRNAILRGDIQELRLLLGEANFSTADAAYAQRILASMEKIGESNSRLLAERYGVDWLNKVHHIFKGHQGSIGNTLIQKSGSMENAVVATQKAVDALKLTKTGNYPVTVTVNGITVIVRVYVNNGVSRIATILKM

SEQ ID NO: 18257 - protein, 91 aa, Neisseria meningitidis; identical to SEQ ID NO: 18112

SEQ ID NO: 18258 - protein, 249 aa, Neisseria meningitidis
LAEGQKSAVTEYYLNHGIWPANNSDAGVASSASDIKGKYVQSVIVANGVVTAEMKSTGVNKEIKGKELSLWAKRQNGSVKWFCGQPVTRANANGANNDEVTAATGNDTDKIDTKHLPSTCRDASSAVCTKTPEYYLNHGEWPGNNTSAGVASSTDIKGKYVQSVEVKNGVVTATMASSNVNNEIKGKKLSLWAKRQDGSVKWFCGQPVTRANTATGANADDVTKTGTDNEKINTKHLPSTAPTRKSTPN

SEQ ID NO: 18259 - protein, 318 aa, Neisseria meningitidis
MNIIGLDISKDTIDATLHKTNGSIHYIKFKNNDDGLKQFRLWIKGNRIRKAYIGMEATGIYYEKAADMLSSYYTVYVINPLKIKDYGKSRFNRTKTDKADSNLIADYIKRHQDTLIPYQIPKNKALQKLINLKNQLQQHQKQIKNRLHSTEEDFIRNIHQDLIDTIQDKMEQVKIAISEQIKKQTDYNHYRNLQTIPSIGKDTASVLYAQLTEKHFKTANQFVSYAGLSPAIIQSGTSVRGRGRLSRYGNRRLKSTLYMPALCAYRFNAFPKLINNLKKAGKPKMVIIVAIMRKLAKLAYYIVKTGQPYDAERHRLNQ

SEQ ID NO: 18260 - protein, 185 aa, Neisseria meningitidis
MENNKAKSDDNSVSIEFIQDFITASTDVINLSYENFRKNFYTQMSTDSTNYAAKHESLGKSVQRELQKTQSQLRQVVRKMQSKYNINNKARAAEISLLRQMQSQFSRKDVNKNLGNGNTLAQQGSYTKKDGTTAQAGDLLLAADNLHSRLTDKMLSISHVRENTISPFVLGCLKQITINAYHYLK

SEQ ID NO: 18261 - protein, 485 aa, Neisseria meningitidis; identical to SEQ ID NO: 8505

SEQ ID NO: 18262 - protein, 273 aa, Neisseria meningitidis
MDFLIVLKALMMGLVEGFTEFLPISSTGHLIVFGNLVGFHSNHKVFEIAIQLGAVLAVVFEYRQRFSNVLHGLGKDRKANRFVLNLAIAFIPAAVMGLLFGKQIKEYLFNPLSVAVMLVLGGFFILWVEKRQSRAEPKIADVDALRPIDALMIGIAQVFALIPGTSRSGSTIMGGMLWGIERKTATEFSFFLAVPMMVAATAYDVLKHYRFFTLHDVGLILIGFIAAFVSGLVAVKALLKFVSKKNYIPFAYYRIVFGIVIIILWLSGWISWE

SEQ ID NO: 18263 - protein, 286 aa, Neisseria meningitidis
MKPYSANPNLTEPRRLRVLLIAAALGFLLLMLVVPLVAVFYEALKGGWDLYLKSLNDPEAWSAIKLTLITALIVVPVNAVLGVAMAWLLTRFDFRGKQLLTTLLDLPFSVSPVVAGLMFVLLFGAHTALGGWLEAQGIQIIFAIPGIILATLFVTFPFVAREIIPLMQAQGDSEEQAALILGASGWQMFWRVTLPNIKWALLYGIILTNARAMGEFGAVSVVSGHIRGETNTVPLLVEIFYNEYNFTGAFALSGVLALLALATLAVQNIITKLQDKKLAAAERNAA

SEQ ID NO: 18264 - protein, 349 aa, Neisseria meningitidis; identical to SEQ ID NO: 328

SEQ ID NO: 18265 - protein, 402 aa, Neisseria meningitidis
MTGIIHSLLDTDLYKFTMLQVVLHQFPQTHSLYEFRCRNASTVYPLADIREDLEAELDALCQLRFTHDELDYLRSLRFIKSDFVDYLELFQLQRRFVEIGTDDKDRLNIRIEGPMIQAMFFEIFILAIVNELYFRRLETPAVIEEGERRLQAKAARLKEIAAAQNPDEPPFLISDFGTRRRYKLAWQEHVIRTLLEAAPSIVRGTSNVFLAKKLGITPIGTMAHEFLQAFQALDVRLRNFQKAALESWVHEYRGDLGVALTDVVGMDAFLRDFDLYFAKLFDGLRHDSGDPYVWGDKAYAHYQKLKIDSRTKMLTFSDGLDIERSWALHQYFKDRFKTGFGIGTNLTNDMGHTPLNIVLKLVECNGQSVAKLSDSPGKTMTNNSTFLAYLRQVFDVPEPETP

SEQ ID NO: 18266 - protein, 358 aa, Neisseria meningitidis
MQTANKKTILVTGGAGFIGSAVVRHIIRNTRDAVVNVDKLTYAGNLKSLTEVADNPRYAFEQVDICDRAELDRVFAQHRPDAVMHLAAESHVDRSIDSAGEFIQTNIIGTFNLLEAARAYRRQMPSEQREAFRFHHISTDEVYGDLHGTDDLFTETTPYAPSSPYSASKASSDHLVRAWLRTYGLPTIVTNCSNNYGPYHFPEKLIPLMILNALDGKPLPVYGDGMQIRDWLFVEDHARALYQVVTEGEIGETYNIGGHNEKANIEVVRTICALLEELVPNKPQGVARYEDLITYVKDRPGHDVRYAIDAAKIGRELGWQPQETFESGIRKTVEWYLNNQTWWSRVLDGSYNRERLGS

SEQ ID NO: 18267 - protein, 91 aa, Neisseria meningitidis; identical to SEQ ID NO: 6170

SEQ ID NO: 18268 - protein, 83 aa, Neisseria meningitidis; identical to SEQ ID NO: 3011

SEQ ID NO: 18269 - protein, 996 aa, Neisseria meningitidis
LTDKSNEREVTHTSKFIVTKKYISFSFNNTDEVVAEKKDAVVFGAATYLPPYGKVSGFDTTKLTERKNAVDQIGTTHPGLIGYSYQDSTCSSSGCPEVAYRTQFTFGNSGLAKKKTDNKLDIYEDKSRDNSPIYKVKDYPWLGVSFNLGGESSFKPKRNGSLVSSFSEDVTQQNGAGSQHKDKNLVYTTDDYKSQNNKNHQDKHHAVAFYLNAKLHLLDKKHIKNIVQGKTVNLGILKTRIEPTEAWKRRNSNFFNGNWTYEEKGTVSVKLKLPEVKADRCINKPNPNKNSKVPSPALTAPALWFGPVQNGKAEMYSASVSTYPDSSSSRIYLQNLKRKTDPGKPGRHSLETLTENDIKSREPNFTGRQTIIRLNGGVREIKLDRNNTEVVNFNGNDGNNDTFGIVKDLGVEPDTSEWKKVLLPWTVRGFADDSKFKAFNKEENNDNKPKYSQKYRSRDNNKGERNLGDIVNSPIVAVGEYLATSANDGMVHIFKQSGGDKRSYNLKLSYIPGTMPRQYFDNDTSALKDSTLAKELRTFAEKGYVGDRYGVDGGFVLRQVNNLNGQDRVFMFGAMGFGGRGAYALDLSKIDSNNPTAVSLFDVKNDDKNNNGVKLGYTVGTPQIGKTHNGKYAAFLASGYATKKIDDQTNKTALYVYDLESNNGTPIATINVPDGKGGLSSPTLVDKDLDGTVDIAYAGDRGGNMYRFDLSSQDPKQWSARAIFKGDKPITSAPAISQLKDKRVVIFGTGSDLSEEDVDKKDEQYIYGIFDDDTATTGSVNFSGSGGGLLEQHLTQEDKTLFLTDYKRSDGSGNKGWIVKLKDGQRVTVKPTVVLRTAFVTIRKYTDNGCGAETAILGINTADGGKLTKKSARPIVPEANQAVAQYSGHKQTAKGKSIPIGCMEKDNGIVCPNGYVYDKPVNVRYLDEKKTDGFSTTADGDAGGSGIDPDGKRSGKNNRCFSQKGVRTLLMNDLDSLDITGPTCGMKRISWREVFY

SEQ ID NO: 18270 - protein, 758 aa, Neisseria meningitidis
MAQTTLKPIVLSILLINTPLLAQAHETDRSVDLETVSVVGKSRPRATSGLLHTSTASDKIISGDTLRQKAVNLGDALDGVPGIHASQYGGGASAPVIRGQTGRRIKVLNHHGETGDMADFSPDHAIMVDTALSQQVEILRGPVTLLYSSGNVAGLVDVADGKIPEKMPENGVSGELGLRLSSGNLEKLTSGGINIGLGKNFVLHTEGLYRKSGDYAVPRYRNLKRLPDSHADSQTGSIGLSWVGEKGFIGAAYSDRRDQYGLPAHSHEYDDCHADIIWQKSLINKRYLQLYPHLLTEEDIDYDNPGLSCGFHDDDNAHAHAHNGKPWIDLHNKRYELRAEWKHPLPGFEALRVHLNRNDYRHDEKAGDAVENFFNNQTQNARIELRHQPIGRLKGSWGVQYLGQKSSALSAIPETVQQPMLIDNNVRHYSFFGVEQANWDNFTLEGGVRVEKQKASIQYDKALIDRENYYNQPLPDLGAHRQTARSFALSGNWYFTPQHKLSLTASHQERLPSTQELYAHGKHVATNTFEVGNKYLNKERSNNIELALGYEGDHWQYNLALYRNRFGNYIYAQTLNDGRGPKSIEDDSEMKLVRYNQSGADFYGAEGEIYFKPTPRYRIGVSGDYVRGRLKNLPSLPGREDAYGKRPFIAQADQNAPRVPAARLGVHLKASLTDLIDANLDYYRVFAQNKLARYETRTPGHHMLNLGANYRRNTRYGEWNWYVKADNLLNQSVYAHSSFLSDTPQMGRSFTGGVNVKF

SEQ ID NO: 18271 - protein, 718 aa, Neisseria meningitidis
MSVFRINMTAATVLAALSSSVFAAQTADLETVHIKGQRSYNAIATEKNGDYSSFAATVGTKIPASLREIPQSVSIITNQQVKDRNVDTFDQLARKTPGLRVLSNDDGRSSVYARGYEYSEYNIDGLPAQMQSINGTLPNLFAFDRVEVMRGPSGLFDSSGEMGGIVNLVCKRPAKAFQGHAAAGFGTHKQYKAEADVSGSLNSDGSVRGRVMAQTVGASPRPAEKNNRHETFYAAADWDINPDTVLGAGYLYQQRHLAPYNGLPADANNKLPSLPQHVFVGADWNKFKMHSHDVFADLKHYFGNGGYGKVGMRYSDRDADSNYAFAGSKLGMKTPAGRPGCNTADDKACAVGLGTEIKQKALAFDASYSRPFRLGNTANEFVIGADYNRFRSTNEQGRTTLYARGGLALNEFRSIPQVDLIANARKGVRGYSHTVATENLDEFGIYGKSTFHPADGLSLIGGGRLGHYKIESGEGKTLHKASKTKFTGYAGAVYDLNDNNSLYLSLSQLYTPQTNLDADGKLLKPRQGNQFEVGYKGSYMDDRLNARVSFYRMKDKNAAAPLNPNNKKTRYAALGKRVMEGVETEISGAVTPKWQIHAGYSYLHSQIKTASNSRDDGIFLLMPKHSANLWTTYQVTPELTIGGGVNAMSGITSSAGMHAGGYATFDAMAAYRFTPKLKLQINADNIFNRHYYARVGGANTFNIPGSERSLTANLRYSF

SEQ ID NO: 18272 - protein, 281 aa, Neisseria meningitidis
MLSYRHAFHAGNHADMLKHFTLFLVLQYFNRKDKPYWYIDTHGGAGVYNLEGSEAQKVGEYRQGIALLRQAKNLPTELNGFIAHIQKILPSPELYCGSPWLAQSLTRVGDKLRLFELHPTDFVHLQNNMGEAGLGKRGQVLREDGYKGLISLLPPPPRRATVLIDPPYEEKQDYRRVTETLKAALKRFESGCYLIWYPCLSREESRKLPEELKKLLPDNYLHAELHVHAPKADGFGMHGSGMFVINPPYLLAEQLAANLPALTRLLAQDEGARYLLDSKIR

SEQ ID NO: 18273 - protein, 222 aa, Neisseria meningitidis; identical to SEQ ID NO: 4261

SEQ ID NO: 18274 - protein, 106 aa, Neisseria meningitidis; identical to SEQ ID NO: 2510

SEQ ID NO: 18275 - protein, 286 aa, Neisseria meningitidis
MSDLSVLSPFAVPLAAVFGLLVGSFLNVVIYRVPVMMERGWTVFAKEYLNLPLTEEESRTFNLMKPDSCCPKCRVPIRAWQNIPIVSYLLLRGKCASCQTKISIRYPLIELLTGVLFGLIAWQYGWSWITLGGLVLTAFLISLTFIDADTQYLPDSMTLLLIWLGLIFNLDGGFVPLQSAVLGAVAGYGSIWLLCAVYKLIKGETGMGNGDFKLIAALGAWLGISALPVLIFVSSLIGLVAAIVMRVAKGQHFAFGPALTVSGWIIFTANDSVWRAVNWWLTHPVL

SEQ ID NO: 18276 - protein, 100 aa, Neisseria meningitidis
LGFNNLVSLAALIEKVFPIRYTPAGISVLDIILKHESWQEENGQQCLVQLEIPARILGRQAEEWQYRQGVYVHVEGFLAQKSRRSLMPMLRIQNIQEYKG

SEQ ID NO: 18277 - protein, 445 aa, Neisseria meningitidis
MTDTAGLRRRNLRQWIAEHYGGLQTRFAEAVALNTGELSALLKNKSFGEKKARKIEQAAKMPAFWLDTEHTARPPEHTGKHTMSHISPIPEILADIKAGKMVIITDAEDRENEGDLLMAAQFVTPEAINFMIKHARGLVCLPMDGEMVEKLGLPMMTQKNGAQYGTNFTVSIEAAHGITTGISAADRALTIQTAVSPTAKPEDIVQPGHIFPLRAQKGGVLVRAGHTEAGVDLAQMNGLIPASVICEIINDDGTMARMPELMKFAEEHKLKIGTIADLIEYRSRTESLLEDMGNAPVQTPWGEFQQHVYVDKLSGETHLALVKGTPSADTETLVRVHEPFSVMDFIQANPRHSWSLPKALERIQQAESGVVILLHRTEDGAALLDRTLPKGANQAYKWDSKSYGIGAQILAGLNVKKLRVLGQPSSFTGLTGFGLEVVGFEEAEK

SEQ ID NO: 18278 - protein, 503 aa, Neisseria meningitidis
MSEQNHPQTEPQLDENQIIALRREKLHNIRQQRNAYPNDFKRDSFAADLHAQYGEIGKEELDPQGIPVKVAGRMMLKRQMGKASFATIQDVSGQIQLYLNNKGVSQEILDDFNHWDLGDIVGAEGTLFKTNHGELTVRVSDIRLLSKSLRPLPDKHKGLSDQETKYRQRYVDLIANEESRNTFIKRSQIIQSVRNFMVNERYLEVETPMMHPIPGGATAKPFVTHHNALDIPLYLRIAPELYLKRLVVGGLERVFEINRSFRNEGMSVRHNPEFTMIEFYEAFSDYERMMQMAEDIIRNASRTVNGTANITYNGKEVDLESPFERLTILEAIKKYNPHYTDEQLNDAEWLKKEIVKHGESLPPSPGIGSLQLALFEGCAEGKLWNPTFIIDYPVEVSPLARASDTKQGLTERFELFVVGRELANGYSELNDPEDQAERFKSQVAQKDAGDDEAMHYDADYIRAMEFGLPPTGGCGIGIDRLVMLLTDSQTIRDVILFPQMRPE

SEQ ID NO: 18279 - protein, 522 aa, Neisseria meningitidis
MAKKNNKTKIQKPEAALQTDVAQITATGRVIAEHPSNFITPQKMRALFEDAESGDIRAQHELFADIEERDSDIAANMGTRKRALLTLNWRVAPPRNATPEEEKLSDQAYEMMDSLPTLEDLIMDLMDAVGHGFSALEVEWVFSDGLYLPRNFIHRPQSWFKWDKDNGLLLRTRENPEGEALWPLGWVVHTQKSRSVQQARNGLFRTLSWLYMFKHYAVHDFAEFLELYGMPIRIGKYGAGATKEEKNTLLRAVAEIGHNAAGIMPEGMEIELHNAASGTMATSNPFLQMADWCEKSAARLILGQTLTSGADGKSSTNALGNIHNEVRRDLLVSDAKQVAQTITSQIIGPFLQINYPNADPNRVPKFEFDTREPKDIAVFADAIPKLVDVGVQIPESWVRDKLVIPDVQEGEAVLVRQVPDNPINRTALAALSAHTVPSKATGRHQEILDGALDDALVEPDFNSQLNPMVRQAVAALNACNSYEEADAALNALYPNLDNAKLRTYMQQALFISDILGQDHARA

SEQ ID NO: 18280 - protein, 467 aa, Neisseria meningitidis
MNNPDLLYHQALERLSQEQYDFTEVRRLLTEAASAGHPAAAFELAKHLMDADSPHQDREQGMEMLRIAAEQGHPYARYNLAYIQELEGARPETLIPLYRPLAEEGLPEAQVRLMYLLYASRHFEEALKWAKTTAKNNNPHGQYLLAQYCQYGTPPDFETAHLLYREAAAQGLAAAQWQLGLQYRFGQGTPTDTTQAINHLRAAAQQGYIPAYTPLAELILPTAPDEAVYRFQQAAQENDPDAHAALADIYLQGKHLERNHKLALHHAEAAAAERHPEGLRILGDICRYSLGIAPDTEKARHYYRQAAEAGSLSAYQKLISDSALNHPNQYGGIKDSAIRRQRAERLYQKAQALHYGLQCAPEYAAALKLYTEAAELGHSKAQTNLGSMYYFGQGMTADYNEARKWFEKAAAKKDSMAFYNLACIHYSGHGVGPDNEKACRYLQEAINSGHEQKSFLQELLQQWQNAV

SEQ ID NO: 18281 - protein, 56 aa, Neisseria meningitidis
MKYGVFFAAATALLLSACGYKGDLYLPKEGDTARFGAIQTGLQLQNKPQSAPQTRK

SEQ ID NO: 18282 - protein, 363 aa, Neisseria meningitidis
MNAQTLIANVAELVKTKLKPIVDDIDRKGYYPEAFMRELGAIGGFGAVGTEAEGGNGLGLATQIAVLREIGKECGATSFSAWCQAACAWYLHQTPNQAVKDKYLADILQGKVLAGTGMSNTVKHLAGIEKHNLQAERVEGGYTVNGALPWVSNIGEEHIWANTAQIGGGYVMFITGGQWEGVSLQNCPEFCALEGTRTFSLNFKDVFIPDEDIIAAPEQFADYIQSIKAGFILLQIGIGAGVIDGSLGIIRLANVVNAEVNRYLDDGYDSLKTRLDGAWAETERLAGLAWSGTPDNLTTLKLREAAAVLTLAAAQSAALHSGAKGYLMRSPAQRRVREAMFVAIVTPAIKHLRKEIAAIEAAK

SEQ ID NO: 18283 - protein, 239 aa, Neisseria meningitidis
MLFRKTTAAVLAAALMLNGCTAMMWGMNDPFSQTTAYKHVDKDQIRAFGVVAKDNAQLEKGSLVMMGGKYWFVVNPEDSAKLTGILKAGLDKPFQIVEDTPSYARHQALPVKLESPGSQNFSTEGLCLRYDTDKPADIAKLKQLGFEAVKLDNRTIYTRCVSAKGKYYATPQKLNADYHFEQSVPADIYYTVTEKHTDKSKLFANILYTPPPFLILDAAGAVLALPVAALIAATNSSDK

SEQ ID NO: 18284 - protein, 1392 aa, Neisseria meningitidis
MNYSFTEKKRIRKSFAKRENVLEVPFLLATQIDSYAKFLQLENAFDKRTDDGLQAAFNSIFPIVSHNGYARLEFVHYTLGEPLFDIPECQLRGITYAAPLRARIRLVILDKEASKPTVKEVRENEVYMGEIPLMTPSGSFVINGTERVIVSQLHRSPGVFFEHDKGKTHSSGKLLFSARIIPYRGSWLDFEFDPKDLLYFRIDRRRKMPVTILLKALGYGNEQILDIFYDKETFYLSSNGVQTDLVAGRLKGETAKVDILDKEGNVLVAKGKRITAKNIRDITNAGLTRLDVEPESLLGKALAADLIDSETGEVLASANDEITEELLAKFDINGVKEITTLYINELDQGAYISNTLRTDETAGRQAARVAIYRMMRPGEPPTEEAVEQLFNRLFFSEDSYDLSRVGRMKFNTRTYEQKLSEAQQNSWYGRLLNETFAGAAEKGGYVLSVEDIVASIATLVELRNGHGEVDDIDHLGNRRVRSVGELTENQFRSGLARVERAVKERLNQAESENLMPHDLINAKPVSAAIKEFFGSSQLSQFMDQTNPLSEVTHKRRVSALGPGGLTRERAGFEVRDVHPTHYGRVCPIETPEGPNIGLINSLSVYARTNDYGFLETPYRRVIDGKVTKEIDYLSAIEEGRYVIAQANADLDSDGNLIGDLVTCREKGETIMATPDRVQYMDVATGQVVSVAASLIPFLEHDDANRALMGANMQRQAVPCLRPEKPMVGTGIERSVAVDSATAIVARRGGVVEYVDANRVVIRVHDDEATAGEVGVDIYNLVKFTRSNQSTNINQRPAVKAGDVLQRGDLVADGASTDLGELALGQNMTIAFMPWNGYNYEDSILISEKVAADDRYTSIHIEELNVVARDTKLGAEDITRDIPNLSERMQNRLDESGIVYIGAEVEAGDVLVGKVTPKGETQLTPEEKLLRAIFGEKASDVKDTSLRMPTGMSGTVIDVQVFTREGIQRDKRAQSIIDSELKRYRLDLNDQLRIFDNDAFDRIERMIVGQKANGGPMKLAKGSEITTEYLAGLPSRHDWFDIRLTDEDLAKQLELIKVSLQQKREEADELYEIKKKKLTQGDELQPGVQKMVKVFIAIKRRLQAGDKMAGRHGNKGVVSRILPVEDMPYMADGRPVDIVLNPLGVPSRMNIGQILEVHLGWAAKGIGERIDRMLKEQRKAGELREFLNKLYNGSGKKEDLDALTDEEIIELASNLRKGASFASPVFDGAKESEIREMLNLAYPSDDPEVEKLGFNDSKTQITLYDGRSGEAFDRKVTVGVMHYLKLHHLVDEKMHARSTGPYSLVTQQPLGGKAQFGGQRFGEMEVWALEAYGAAYTLQEMLTVKSDDVNGRTKMYENIVKGEHKIDAGMPESFNVLVKEIRSLGLDIDLERY

SEQ ID NO: 18285 - protein, 54 aa, Neisseria meningitidis
MGQVEFYEKMIELWSSKSREASERADLAAFEFAEGELANYREMLKRHLQTKSVE

SEQ ID NO: 18286 - protein, 133 aa, Neisseria meningitidis; identical to SEQ ID NO: 825

SEQ ID NO: 18287 - protein, 367 aa, Neisseria meningitidis; identical to SEQ ID NO: 1944

SEQ ID NO: 18288 - protein, 140 aa, Neisseria meningitidis
MKITKIFTFDSSHMLDGHDGKCQNLHGHTYKLEITVSDDLVRGGPKDGMVMDFTDLKAIVKQHITDPFDHAFIYHGGNGRESQIAALLEGWNMKTLRLPCRTTAENMAVEMYDRLKNAGLNVCRVKLWETPTSCAEYEGE

SEQ ID NO: 18289 - protein, 119 aa, Neisseria meningitidis; identical to SEQ ID NO: 6320

SEQ ID NO: 18290 - protein, 481 aa, Neisseria meningitidis
MTQYTLKQASVLLQSKQISAVELASAYLAAIAEKNPALNGYITIDQDKTLAEARAADERIAQGNASALTGVPVAYKDIFCQTGWRSACASKMLDNFISPYTATVVQNLLDEGMVTLGRTNMDEFAMGSTNENSFYGAAKNPWNLEHVPGGSSGGSAAVVAARLAPAALGSDTGGSIRQPASHCGITGIKPTYGTVSRFGMVAYASSFDQAGPMAQTAEDCAILLNAMAGFDPKDSTSLEREKEDYTRDLNQPLKGVKIGLPKEYFGEGNSADVQTALQNTINLLKTQGAELVEVSLPQTKLSIPAYYVLASAEASTNLSRYDGVRYGHRAAQFGDLEEMYGKTRAEGFGSEVKRRIMIGTYVLSHGYYDAYYLKAQKLRRLVADDFQTAFARCDLILAPTAPTAAPKIGADASPVETYLSDIYTIAVNLAGLPALTLPAGFSGGGLPVGVQLVGNYFAEAKILGAAHQIQLNSDWHGKRPE

SEQ ID NO: 18291 - protein, 598 aa, Neisseria meningitidis
MNKIYRIIWNSALNAWVVVSELTRNHTKRASATVATAVLATLLFATVQANATDDDDLYLEPVQRTAVVLSFRSDKEGTGEKEGTEDSNWAVYFDEKRVLKAGAITLKAGDNLKIKQNTNENTNENTNDSSFTYSLKKDLTDLTSVETEKLSFGANGNKVNITSDTKGLNFAKETAGTNGDPTVHLNGIGSTLTDTLLNTGATTNVTNDNVTDDEKKRAASVKDVLNAGWNIKGVKPGTTASDNVDFVRTYDTVEFLSADTKTTTVNVESKDNGKKTEVKIGAKTSVIKEKDGKLVTGKGKDENGSSTDEGEGLVTAKEVIDAVNKAGWRMKTTTANGQTGQADKFETVTSGTKVTFASGNGTTATVSKDDQGNITVKYDVNVGDALNVNQLQNSGWNLDSKAVAGSSGKVISGNVSPSKGKMDETVNINAGNNIEITRNGKNIDIATSMTPQFSSVSLGAGADAPTLSVDDEGALNVGSKDANKPVRITNVAPGVKEGDVTNVAQLKGVAQNLNNRIDNVDGNARAGIAQAIATAGLAQAYLPGKSMMAIGGGTYRGEAGYAIGYSSISDTGNWVIKGTASGNSRGHFGASASVGYQW

SEQ ID NO: 18292 - protein, 498 aa, Neisseria meningitidis; identical to SEQ ID NO: 2733

SEQ ID NO: 18293 - protein, 426 aa, Neisseria meningitidis
MKSLFIRLLLLGSAAGVFYHTQNQSLPAGELVYPSAPQIRDGGDALHYLNRIRAQIGLHKLAHAPVLENSARRHASYLTLNPEDGHGEHHPDNPHYTAQKLTERTRLAGYLYNGVHENISTEEEAAESSDSDIRTQQRQVDGLMSAIYHRLSLLDRHTDEAGAAFVRENGKTVLVFNQGNGRFERHCAQGRNQPEAGRKYYRNACHNGAVVYTDEAMPAQELLYTAYPVGSGALPYFHGERPDPVPEYEITGNPASIDFSEAAGKITMKSFKLYQGKNEIRPVRVLTAGNDPNGRLTAYQFALFPLKPLEYGTLYTAVFDYVRNGRRAQAKWQFRTRKPDYPYFEVNGGETLAVRKGEKYFIHWRGRWCLEACTRYTYRQRPGSRLSIGRHEAGGIVFSVDGMAGSRITLAPEGETERGVTLYLQD

SEQ ID NO: 18294 - protein, 436 aa, Neisseria meningitidis
MSAPDLFVAHFREAAPYIRQMRGKTLVAGIDDRLLEGDTLNKLAADIGLLSQLGIRLVLIHGARHFLDHHAAAQGRTPHYCRGLRVTDETSLEQAQQFAGTVRSRFEAALCGSVSGFARAPSVPLVSGNFLTARPIGVIDGTDMEYAGVIRKTDTAALRFQLDAGNIVWLPPLGHSYSGKTFYLDMLQTAASAAVSLQAEKLVYLTLSDGIARPDGTLAETLSAQEAQSLAEHAGSETQRLISSAVAALEGGVHRVQILNGAADGSLLQELFTRNGIGTSIAKEAFVSIRQAHSGDIPHIAALIRPLEEQGILLHRSREYLENHISEFSILEHDGNLYGCAALKTFAEADCGEIACLAVSPQAQDGGYGERLLAHIIDKARGIGISRLFALSTNTGEWFAERGFQTASEAELPEARRKAYRNNGRNSHILVRRLHR

SEQ ID NO: 18295 - protein, 441 aa, Neisseria meningitidis
MPAPDLGFALSLPPKKAIEWLESKKVTAESYRNLTASEIAKVYTIARMTDLDMLNDIKTSMVESAKSGQSFDDWRKGILNLLGNKGWLHPNGHNGKDIIDPATGEVFGSPRRLETIYRTNMQTAYNAGQYQGYMANIDARPYWMYDAVGDSRTRPAHSAIDGLVYRYDDPFWATFYPPNGYNCRCSVIALSERDVERQGRIVGQSTADNLVETHKIYNKKGDTYLTLAYKAPDGSLYTTDRGFDYNAGRMNYRPDLDKYDRALAHQFAKAEMGGADFKTSFKQLEKEFYEVKQRLDIDGKPDKEQKIKIRNALSRQLKFAAGVLSKETQELAGMTRATVWLSDDTLVKQVDSREGQSFGTDLYAMLPDLIHEPEYIFYDKSRGKESFVLLGKPLEGNEKYRLMAVLKYLPQYDSIFLDSFRRADEKEIVKSKKRYEMKKGY

SEQ ID NO: 18296 - protein, 427 aa, Neisseria meningitidis
MNRNEILFDRAKAVIPGGVNSPVRAFGSVGGVPRFIKKAEGAYVWDENGTRYTDYVGSWGPAIVGHAHPEVIEAVREAALGGLSFGAPTEGEIVIAEEIAKIMPSVERLRLVSSGTEATMTAIRLARGFTGRDKIIKFEGCYHGHSDSLLVKAGSGLLTFGNPSSAGVPADFTKHTLVLEYNNIAQLEEAFAQSGNDIACVILEPFVGNMNLVRPTEAFVKALRELTEKHGAVLIYDEVMTGFRVALGGAQSLHGIMPDLTTMGKVIGGGMPLAAFGGRKDIMECISPLGGVYQAGTLSGNPIAVAAGLKTLEIIRREGFYENLTARTEQLVQGFQTAADAAGIEFAADSVGGMFGLYFAAHAPRNYADMARSNIDAFKRFFHGMLDRGIAFGPSAYEAGFVSAAHTPELIDETVAVAVEVFKAMAA

SEQ ID NO: 18297 - protein, 512 aa, Neisseria meningitidis
MFHSIEKYRTPAQVLLGLIALTFVGFGVSTVSHPGADYIVQVGDEKISDHSINNAIQNEQADGGGPSRDAVFQSLLQRAYLKQGAKLLGISVSSEQIKQIIVDDPNFHDANGKFDHALLNRYLSQRHMSEDQFVEEIRDQFALQNLVNLVQNGVLVGDAQAEQLIRLTQVNRTIRSHTFNPDEFIAQVKVSEADLQKFYNANKKDYLLPQAVKLEYVALNLKDFADKQTVSETEVKNAFEERVARLPANEAKLSFEQEKAAVENELKMKKAVADFNKAKEKLSDDAFNHPASLAEAAKNSSLKVETQETWLSRQDAQMSGLPENLINAIFSDDVLKKKHNSEVLSINNEIAWVVRAKEVREEKTLPFAEAKDAVRQAYIRAEAAKLAENKAKDVLTQLNGGKAVDVKWSEVSVLGAQQARQSMPPEAYAELLKAKPTNGKPAYVRLTGLPAPVIVEVQAITPPDDIAAQLPLAKQALAQQQSANTFDLLIRYFNGKIKQTKGAQSVDNGGGQ

SEQ ID NO: 18298 - protein, 321 aa, Neisseria meningitidis; identical to SEQ ID NO: 17649

SEQ ID NO: 18299 - protein, 215 aa, Neisseria meningitidis; identical to SEQ ID NO: 4487

SEQ ID NO: 18300 - protein, 1043 aa, Neisseria meningitidis
MNLETKPIAETPNFIVLDQYEKIEQSGSYQSENQLEAELIADLQNQGYEYRKDLNSQSRLLENLRAQLQRLNDVAFSDGEWARFLTEYLDRPSENITDKTRKIHDDHIYDFAFDDGRLKNIYLLDKKNLARNHVQLINQFEQTGTHANRYDVTVLVNGLPLVQIELKKRGVAVREAFNQVHRYSKESFNSENSLFKFLQIFVISNGTDTRYFANTTKRDKNSFDFTMNWARSDNHPIKDLKDFTATFLQKSVLLGVLLHYSVFDANDTLLIMRPYQIAAAERILWKINSSAQAKNWSGPESGGYVWHTTGSGKTLTSFKAARLATESAFIDKVFFVVDRKDLDYQTMKEYQRFSTDSVNGSESTAGLKRNLEKDDNKIIVTTIQKLNNLMKSEDNLPVYHQQVVFIFDECHRSQFGEAQKNLKKKFKKFCQFGFTGTPIFHDHIVDGKLIMKGNALGSESTESVFGRQLHSYVITDAIRDEKVLKFKVDYNDVRPQFKAVEAEQDEKKLSAAENRQALLHPERIREITQYILNQFRQKTHRLNAGGKGFNAMFAVSSVDAAKCYYEAFKTQQAGSLHPLKVATIFSFAANEEQNAVGEIADETFEPEAMDSSAKEFLQAAINDYNTCFKTNFGTDSKAFQNYYRDLAKRVKNQEVDLLIVVGMFLTGFDAPTLNTLFVDKNLRYHGLMQAFSRTNRIYDATKTFGNIVCFRDLEQATIDAITLFGDKNTKNVVLEKSYEEYMNGYTDSQTGEARRGYLDVAKELHERFPDPDKIETEKDKKDFAKLFGEYLRAENVLQNYDEFAALRELQSVDAADEDAMKAFQEKYYLSDEDVQEMRQVPMPSERAVQDYRSAYNDIRDWLRRQKAGEQKEQSKIDWDDVVFEVDLLKSQEINLDYILQLIFEHHKKIKGKAELVEEIRRIIRASIGHRAKESLIVDFINDTDLDKVPDVPAILETFYTYAQEVMRNEAAELIAAEGLNETAAKRYLISSLKRGYASENGTELTETMPKMSPLNPQYLTKKQSVFQKIAAFVEKFAGIGTDI

SEQ ID NO: 18301 - protein, 233 aa, Neisseria meningitidis
MFRIVKWLIALPVGIFIFFNAYVYGNIITYRAVAPHRTAFMSMRMKQFEQEGRDVALDYRWVPYNRISVNLKKALIASEDARFAGHGGFDWGGIQNAIRRNRNSGKVKAGGSTISQQLAKNLFLNESRSYIRKGEEAAITAMMEAVTDKDRIFELYLNSIEWHYGIFGAEAASRYFYQIPAAKLSKQQAAKLTARVPAPLYYADHPKSKRLRNKTNIVLRRMGSAELPESDTD

SEQ ID NO: 18302 - protein, 166 aa, Neisseria meningitidis; identical to SEQ ID NO: 743

SEQ ID NO: 18303 - protein, 481 aa, Neisseria meningitidis; identical to SEQ ID NO: 18290

SEQ ID NO: 18304 - protein, 288 aa, Neisseria meningitidis
MWKMLKHIAQTHRKRLIGTFSLVGLENLLMLVYPVFGGRAINAVIAGGVWQALLYALVVLLMWLVGAARRIADTRTFTRIYTEIAVPVVLEQRQRQVPHSAVTARVALSREFVSFFEEHLPIAATSVVSIFGACIMLLVLEFWVGVSAVGILALFLWLLPRFAAISENLYFRLKNSLECDNHFIRKGDRRQLDRHYGLVARLRVLISNREAFGYLCVGAAMGILFGFAFVMMTLKGYSSAGHVYSVGTYLWMFAMSLDDVPRLVEQYSNLKDIGQRIEWSERNIKAGT

SEQ ID NO: 18305 - protein, 213 aa, Neisseria meningitidis
MPSEKPMNRRTFLLGAGALLLTACGRKSARTHAKIPEGSTVLALGDSLTFGYGANPGESYPAQLQKLTGWNIVNGGVSGDTSAQALSRLPALLARKPKLVIVGIGGNDFLRKVPKEQTRANIAKIIETVQKENIPAVLVGVPHITLGALFGHLNDHPLYEDLSEEYGIPLFGGAWAEILGDNNLKSDQIHANGKGYRKFAEDLNQFLRKQGFR

SEQ ID NO: 18306 - protein, 101 aa, Neisseria meningitidis; identical to SEQ ID NO: 1118

SEQ ID NO: 18307 - protein, 291 aa, Neisseria meningitidis
MAYLLISIVFSVSVSILLKMARKKKIDIAQAVAVNYVVAVILTLLVLKPDIGNIGAFLPTWPLFAALGVLLPSVFVIMGKSVEAAGIVKSDAAQRLSLFLPIVAALTLFGEKLSEGKLIGLCLAFAALFCLLWKHSGGKKSGSAWRQAALLLGVWAGYGIIDILFKQLAKSGTAFAGNLLVAFVLAGVLMFACLFAKSVRWRVESVVGGIFLGGLNFMNIVTYITAHQMMKDNPTLVFAGMNIGVIVLGTLSGALFFKEKINTINTAGIVLALCSIACLFYWGEVKVLFGI

SEQ ID NO: 18308 - protein, 41 aa, Neisseria meningitidis; identical to SEQ ID NO: 6310

SEQ ID NO: 18309 - protein, 636 aa, Neisseria meningitidis
LGISRKISLILSILAVCLPMHAHASDLANDSFIRQVLDRQHFEPDGKYHLFGSRGELAERSGHIGLGNIQSHQLGNLMIQQAAIKGNIGYIVRFSDHGHEVHSPFDNHASHSDSDEAGSPVDGFSLYRIHWDGYEHHPADGYDGPQGGGYPAPKGARDIYSYDIKGVAQNIRLNLTDNRSTGQRLADRFHNAGSMLTQGVGDGFKRATRYSPELDRSGNAAEAFNGTADIVKNIIGAAGEIVGAGDAVQGISEGSNIAVMHGLGLLSTENKMARINDLADMAQLKDYAAAAIRDWAVQNPNAAQGIEAVSNIFMAAIPIKGIGAVRGKYGLGGITAHPVKRSQMGAIALPKGKSAVSDNFADAAYAKYPSPYHSRNIRSNLEQRYGKENITSSTVPPSNGKNVKLADQRHPKTGVPFDGKGFPNFEKHVKYDTKLDIQELSGGGIPKAKPVFDAKPRWEVDRKLNKLTTREQVEKNVQEIRNGNINSNFSQHAQLEREIKKLRTSEGKANSASAALLTLDLKTAQAANQVVESLRSTGNLPSNYITKSQAISMGWRPGKALGNTIKNGQLGGDIFANSTNILPAKQGRIWYEADIGLINTMSRSNQAGTRLLYSNDGLLYITTDHYISAIQIGTWK

SEQ ID NO: 18310 - protein, 682 aa, Neisseria meningitidis
VIPAYIPLRSFGIRKIPNITQFLPEYSLNKTVFNAQTIIGWGLRPTTHQARAFAQSHGLPFVALEDGFLRSLGLGVAGYPPFALVYDDIGIYYDTTRPSRLEQLILAANMPSEMLNQAQQAIDLILTHRLSKYNHALDFSDGLVQDSKNIVLVIDQTFGDMAIQYGGADEATFRQMFQTALAENPDAEIWVKTHPDVLSGKKQGYLTDLAQQPRVRLLAEDINPISLLQAVDKVYCVTSQMGFEALLCGKPLVTFGLPWYAGWGVSDDRHPKIDSLVQTQRRAPRNLLQLFAAAYLQYSRYLNPNTGEAGSLFDVIDYLATVKRKNDKLRGELYCVGMSLWKRAVAKPFFNVPSCRLKFISSTQKLAGVKLSDDARILAWGNGKEAIVRFAEQHHIPLLRMEDGFIRSVGLGSNLVPPLSLVTDDMSIYFNAETPSRLEYILQNQNFDDQDFQTALKLQKMLTENHISKYNVGSSDFTAPSTDKTVILVPGQVEDDASIRYGSPQIYRNLDLLRTVRERNPNAYIIYKPHPDVVSGNRIGHISPEDAARYADQTAEQTDILTCLQYADEVHTMTSLTGFEALLRGKKVSCYGLPFYAGWGLTQDLLPIPRRSRRLELWQLIAGTLIHYPDYIHPETHQAINAETAAQILIRQKNMQKNNNGLHRGYFAKKLGKIKQLYRSFK

SEQ ID NO: 18311 - protein, 384 aa, Neisseria meningitidis
MKFTKHPVWAMAFRPFYSLAALYGALSVLLWGFGYTGTHELSGFYWHAHEMIWGYAGLVVVAFLLTAVATWTGQPPTRGGVLVGLTIFWLAARIVAFIPGWGASASGILGTLFFWYGAVCMALPVIRSQNQRNYVAVFALFVLGGTHAAFHVQLHNGNLGGLLSGLQSGLVMVSGFIGLIGTRIISFFTSKRLNVPQIPSPKWVAQASLWLPMLTAMLMAHGVMPWLSAAFAFAAGVIFTVQVYRWWYKPVLKEPMLWILFAGYLFTGLGLIAVGASYFKPSFLNLGVHLIGVGGIGVLTLGMMARTALGHTGNPIYPPPKAVPVAFWLMMAATAVRMVAVFSSGTAYTHSIRTSSVLFALALLVYAWKYIPWLIRPRSDGRPG

SEQ ID NO: 18312 - protein, 114 aa, Neisseria meningitidis
LRTHFVISNVPSTPAPLRGRKLTGKLILEVPAQVNPIPQSVLRAAREENVIIRDTTGRIYNRWWFSIRWLCRCTSCKKRTIDTNRENRGRCVSNCKCKHWISMDCQFVKAKRRS

SEQ ID NO: 18313 - protein, 178 aa, Neisseria meningitidis; identical to SEQ ID NO: 2084

SEQ ID NO: 18314 - protein, 92 aa, Neisseria meningitidis; identical to SEQ ID NO: 1005

SEQ ID NO: 18315 - protein, 637 aa, Neisseria meningitidis
MNPSPLLDLIDSPQDLRRLDKKQLPRLAGELRAFLLESVGQTGGHFASNLGAVELTIALHYVYNTPEDKLVWDVGHQSYPHKILTGRKNQMHTMRQYGGLAGFPKRCESEYDAFGVGHSSTSIGAALGMAAADKLLGSDRRSVAIIGDGAMTAGQAFEALNCAGDMDVDLLVVLNDNEMSISPNVGALPKYLASNVVRDMHGLLSTVKAQTGKVLDKIPGAMELAQKVEHKIKTLAEEAEHAKQSLSLFENFGFRYTGPVDGHNVENLVDVLKDLRSRKGPQLLHVITKKGNGYKLAENDPVKYHAVANLPKESAAQMPSEKEPKPAAKPTYTQVFGKWLCDRAAADSRLVAITPAMREGSGLVEFEQRFPDRYFDVGIAEQHAVTFAGGLACEGMKPVVAIYSTFLQRAYDQLVHDIALQNLPVLFAVDRAGIVGADGPTHAGLYDLSFLRCIPNMIVAAPSDENECRLLLSTCYQADAPAAVRYPRGTGTGVPVSDGMETVEIGKGIIRREGGKTAFIAFGSMVAPALAVAGKLNATVADMRFVKPIDEELIVRLARSHDRIVTLEENAEQGGAGGAVLEVLAKHGICKPVLLLGVADTVTGHGDPKKLLDDLGLSAEAVERRVRAWLSDRDAAN

SEQ ID NO: 18316 - protein, 395 aa, Neisseria meningitidis
MTEDERFAWLQLAFTPYIGAESFLLLLRRFGSASNALSAPAEQVAPAVRHKQAAEAWRNAEKRASARQAAEAALEWEMRDGCRLMLLQDEDFPEMLTQGLTAPPVLFLRGNVRLLHKPSAAIVGSRHATPQAMRIAKDFGKSLGGQNIPVVSGMASGIDTAAHQGALEAEGGTIAVWGTGIDRIYPPSNKNLAYEIAEKGLIVSEFPIGTRPYAGNFPRRNRLIAALSQVTLVVEAALESGSLITAGLAAEMGREVMAVPGSIDNPHSKGCHKLIKDGAKLVECLDDILNECPGLLQNTGASSYSINKDTPDTGSRAVQTAYAPPPAAKMPSEGAAGGTAVGGILDKMGFDPIHPDVLAGQLAMPAADLYAALLELELDGSVAAMPGGRYQRIRT

SEQ ID NO: 18317 - protein, 206 aa, Neisseria meningitidis; identical to SEQ ID NO: 1193

SEQ ID NO: 18318 - protein, 175 aa, Neisseria meningitidis; identical to SEQ ID NO: 5

SEQ ID NO: 18319 - protein, 126 aa, Neisseria meningitidis; identical to SEQ ID NO: 3371

SEQ ID NO: 18320 - protein, 237 aa, Neisseria meningitidis; identical to SEQ ID NO: 6270

SEQ ID NO: 18321 - protein, 290 aa, Neisseria meningitidis
VKGLDYCRQKAEESRSSFLSGFRFLTQKKRDAVTVLYAFCRELDDVVDECSNPDVAQATLNWWRGDLDKVFGGEMPEHPVNQALQQVKETFKLPKYELEALIDGMQMDLVQARYGSFEELKLYCHRVAGVVGCLIARILGFSDSKTLEYADKMGLALQLTNIIRDVGEDARNGRIYLPMEEMRRFDVPASVILQCRPTENFTELMAFQIKRARETYREAVSLLPDADKKAQKVGLVMAAVYYALLNEIDRDGAQNVLKYKIALPSPRKKRIALKTWLFGFKPRPGTPERA

SEQ ID NO: 18322 - protein, 183 aa, Neisseria meningitidis
MKAYLALISAAVIGLAACSQEPAAPAAEATPAAEAPASEAPAAEAAPADAAEAPAVGNCAATVESNDNMQFNTKDIQVSKACKEFTITLKHTGTQPKASMGHNLVIAKAEDMDGVFKDGVGAADTDYVKPDDARVVAHTKLIGGGEEASLTLDPAKLADGEYKFACTFPGHGALMNGKVTLVD

SEQ ID NO: 18323 - protein, 38 aa, Neisseria meningitidis; identical to SEQ ID NO: 7004

SEQ ID NO: 18324 - protein, 150 aa, Neisseria meningitidis
MAKPLKYPVSALVVLYSGDGGILLIERTHPKGFWQSVTGSLEPGETVAQTARREVWEETGILLADGQLQDWHDSTVYEIYHHWRHRYPKGVFENREHLFSAEIPRDTPIALQPEEHVSYGWFGLEEAAEKVFSPSNRRAILELGRFLGKR

SEQ ID NO: 18325 - protein, 407 aa, Neisseria meningitidis; identical to SEQ ID NO: 12938

SEQ ID NO: 18326 - protein, 72 aa, Neisseria meningitidis; identical to SEQ ID NO: 113

SEQ ID NO: 18327 - protein, 313 aa, Neisseria meningitidis
MKGFTIIEFLVAGMLSMIVLMAVGSSYFTSRKLNDAANERLAIQQDLRNAATLIVRDARMAGSFGCFNMSEHTEKDVVPDVAQKNRLFSLKGSSANKLIPITESLNIGYPGFTQRLNALIFQYGIDDVNASADTTVVSSCAKIAKPGKKISTLQEAKSALQITNDDKQNGNITRQRHVVNAYAVGRIDGEEGLFRFQLNDDGQWGNPQLLVKKINKMDIRYIYLLVESPGIQPTNSPRYIYGCPEDDDAGKEETFRYTDKFNSAQDAVTPAGVEVLLSSGTDTKIAASSDNHIYAYRIDATIRGGNICANRTL

SEQ ID NO: 18328 - protein, 195 aa, Neisseria meningitidis
MNNMFAAKLSKLVYTASDHPDSLSEMEEFDRLILLIRKLYQILDGQHILSRVTVCLHHQNRRGLIALDKAAAGCDAAMLRAQRWRIYTQIAERLSGSGGGFTVTAESVSAACPELEGRYLELVRRAAVSFGFTQGWENPAGGQEKTQAVPDAASGHSVRKPIKINIEAKVERYPAYRPTAALKVTRRRFFRLQNR

SEQ ID NO: 18329 - protein, 498 aa, Neisseria meningitidis
MSLALVYSRALSGMNAPLVEVEAHLANGLPHFNIVGLPDTEVKESRDRVRAAIIQSGFEFPAKKITVNLAPADLPKESGRFDLPIAIGILAASGQVAPEKLAEYEFAGELALSGLLRPVRGALAMAWQGMQAKRAFVLPEENAGQAAVMRGITVYGARSLGEVAAHLNGIEPLAQTECSVPQMPSEHGGQPDLCDVKGQHTARLALEIAAAGGHSLLMMGPPGTGKSMLSQRLPGILPPLTEDELVEVWALRSLLPNHQQQLDSNRPFRSPHHSASAAAMVGGGSDPRPGEISLAHHGVLFLDELPEFDRKVLEVLREPLENGEIHISRAARQAVYPAKFQLVAAMNPCPCGYLGHPIKPCRCTPESVARYRSKISGPLLDRIDLTIEVPSLSAAELMQQEAGESSASVLERVIAARDKQYARQGKVNAALSVSELDSQARIQKEAQEALGGLLEKLSLSARSFHRIMRVARTLADLAGDEEVGRSHVMKAIGFRRAL

SEQ ID NO: 18330 - protein, 131 aa, Neisseria meningitidis
VKLLANNWQPIAIIALVGTGLAVSHHQGYKAAFAKQQAVIDKMEHDKAQALLLSAQNYARELELARAEAKKYEVKAHAVGMALAKKQAEVSRLKTERDLCKIPFPPDSRNPNTGFQLFSPQIPPNFTQIPP

SEQ ID NO: 18331 - protein, 174 aa, Neisseria meningitidis; identical to SEQ ID NO: 3281

SEQ ID NO: 18332 - protein, 428 aa, Neisseria meningitidis
MSAIVDIFAREILDSRGNPTVECDVLLESGVMGRAAVPSGASTGQKEALELRDGDKSRYLGKGVLKAVDHVNNQIAQALIGIDASEQSYIDQIMIELDGTENKGNLGANATLAVSMAVARAAAEDAGLPLYRYLGGAGPMSLPVPMMNVINGGEHANNSLNIQEFMIMPVGAKSFREALRCGAEIFHALKKLCDSKGFPTTVGDEGGFAPNLNSHKEALQLMVEATEAAGYKAGEDVLFALDCASSEFYKDGKYHLEAEGRSYTNAEFAEYLEGLVNEFPIISIEDGMDENDWEGWKLLTEKLGGKVQLVGDDLFVTNPKILAEGIEKGVANALLVKVNQIGTLSETLKAVDLAKRNRYASVMSHRSGETEDSTIADLAVATNCMQIKTGSLSRSDRMAKYNQLLRIEEELAEAADYPSKAAFYQLGK

SEQ ID NO: 18333 - protein, 62 aa, Neisseria meningitidis
LPKFGECPLPSPPPRGRGVAADSGVAGRLKKNARNIDSGNVSGSLYRKAGGTNVANVFSDDL

SEQ ID NO: 18334 - protein, 611 aa, Neisseria meningitidis; identical to SEQ ID NO: 8062

SEQ ID NO: 18335 - protein, 490 aa, Neisseria meningitidis
MNQTSRDLTRISHNTKIVATLGPGSNNVELLEDMIRVGGLNVVRFNFSHGTPEFHQENARIVREAAKRAGQEIAIIADLQGPKIRVGKIAGGGIELNKGETLVLDAALEGEGTREAVGLDYRDLPDDVTAGDVLWLDDGLLTLTVESVEGSRIITRVENSHVLKSNKGINKRGGGLSAGALTEKDFRDLKTAIAIGCDYLAISFVKSAEDLHIARAKVEEEMKGSTAVRPGLVSKIERVEAIENLDEIILAGDGIMVARGDLAVEVGHAAVPALQKRMIRRARELRRFSITATQMMESMITNPVPTRAEVSDVANAVLDGTDAVMCSAETAVGAYPFETVSQMAIICAAAEKEQDSLNGVAEQAEYPEAVSTNLAVAGGAVSVARAVHAKAIVALTESGSTAFEISRHNITLPIFALTPSVSAQRRMAMYRGVRPLILATSTDHDTALNEVETMLVEHNILHSGDQYIITSGSQMRESGSTNTLEVLRVK

SEQ ID NO: 18336 - protein, 65 aa, Neisseria meningitidis; identical to SEQ ID NO: 1389

SEQ ID NO: 18337 - protein, 397 aa, Neisseria meningitidis
MYRHIEYYPGDPILSLVETFKNDPRPEKVNLSIGIYFDDEGKMPVLESVRRAETARAATPAPSPYLPMEGLDTYRSAVQHLLFGKDNPALAQGRIATVQTLGGSGALKVGADFLHRWFPEARAYVSDPTWDNHRGIFEGAGFEVGTYPYYDPATVGVKFDEMTAFFNTLPENSVLILHPCCHNPTGVDMSEQQWDEVLHIIKTRKLIPFMDIAYQGFGGDLDSDAYAVRKAVEMELPLFVSNSFSKNLSLYGERVGGLSVVCPNKEEADLVFGQLKFTVRRIYSSPPAHGAYIAADVMNSPELYALWQNEVYMMRDRIRAMRQKLYDVLTAQIPDRDFTYFIKQRGMFGYTGLSVEQVRRLRDEFAVYLLDSGRMCVAGLNTSNTDYVARAFAEVLK

SEQ ID NO: 18338 - protein, 265 aa, Neisseria meningitidis
MLKQRVITAMWLLPLMLGMLFYAPQWLWAAFCGLIALIALWEYARMGGLCKIKTNHYLAATLVFGVVAYAGGWMLPNLVWYVVLAFWLAVMPLWLRFKWRLNGGWQVYAVGWLLVMPFWFALVSLRPHPDDALPLLAVMGLVWVADICAYFSGKAFGKHKIAPAISPGKSWEGAIGGAVCVAVYMTAVRSAGWLAFDTGWFDTVLIGLVLTVVSVCGDLLESWLKRAAGIKDSSNLLPGHGGVFDRTDSLIAVISVYAAMMSVLN

SEQ ID NO: 18339 - protein, 388 aa, Neisseria meningitidis
MRKFNLTALSVMLALGLTACQPPEAEKAAPAASSEAQTANEGGSVSIAVNDNACEPMELTVPSGQVVFNIKNNSGRKLEWEILKGVMVVDERENIAPGLSDKMTVTLLPGEYEMTCGLLTNPRGKLVVTDSGFKDTANEADLEKLSQPLADYKAYVQGEVKELVAKTKTFTEAVKAGDIEKAKSLFADTRVHYERIEPIAELFSELDPVIDAREDDFKDGAKDAGFTGFHRIEYALWVEKDVSGVKEIAAKLMTDVEALQKEIDALAFPPGKVVGGASELIEEVAGSKISGEEDRYSHTDLSDFQANVDGSKKIVDLFRPLIEAKNKALLEKTDTNFKQVNEILAKYRTKDGFETYDKLGEADRKALQASINALAEDLAQLRGILGLK

SEQ ID NO: 18340 - protein, 210 aa, Neisseria meningitidis; identical to SEQ ID NO: 48

SEQ ID NO: 18341 - protein, 113 aa, Neisseria meningitidis; identical to SEQ ID NO: 6827

SEQ ID NO: 18342 - protein, 553 aa, Neisseria meningitidis
MTDNSPPPNGHAQARVRKNNTFLSAVWLVPLIALIAGGWLWVKEIRNRGPVVTLLMDSAEGIEVNNTVIKVLSIDVGRVTRIKLRDDQKGVEVTAQLNADVSGLIRSDTQFWVVKPRIDQSGVTGLGTLLSGSYIAFTPGKSDEAKDVFQVQDIPPVTAIGQSGLRLNLIGKNDRILNVNSPVLYENFMVGQVESAHFDPSDQSVHYTIFIQSPNDKLIHSASRFWLESGINIETTGSGIKLNSAPLPALLSGAISFDSPKTKNSKNVKSEDSFTLYDSRSEVANLPDDRSLYYTAFFKQSVRGLTVGSPVEYKGLNVGVVSDVPYFDRNDSLHLFENGWIPVRIRIEPSRLEINADEQSKEHWKQQFQTALNKGLTATISSNNLLTGSKMIELNDQPSASPKLRPHTVYAGDTVIATQGGGLDDLQVKLADLLDKFGKLPLDKTVAELNGSLAELKSTLKSANAALSSIDKLVGKPQTQNIPNELNQTLKELRTTLQGVSPQSPIYGDVQNTLQSLDKTLKDVQPVINTLKEKPNALIFNSSSKDPIPKGSR

SEQ ID NO: 18343 - protein, 309 aa, Neisseria meningitidis; identical to SEQ ID NO: 9408

SEQ ID NO: 18344 - protein, 116 aa, Neisseria meningitidis; identical to SEQ ID NO: 5541

SEQ ID NO: 18345 - protein, 182 aa, Neisseria meningitidis; identical to SEQ ID NO: 2877

SEQ ID NO: 18346 - protein, 45 aa, Neisseria meningitidis; identical to SEQ ID NO: 645

SEQ ID NO: 18347 - protein, 266 aa, Neisseria meningitidis; identical to SEQ ID NO: 8298

SEQ ID NO: 18348 - protein, 43 aa, Neisseria meningitidis
VKSQILCGKRRRVAFSTKFVGCAICFSEQAALCFIKIEPLSFM

SEQ ID NO: 18349 - protein, 449 aa, Neisseria meningitidis
MKLPVMSPEHSAQLQAFEAKILSNHAKIEAWFRTQWSVHRPPFYGSVDIRNAGYKISSIDMNLFPGGFNNLNPNFIPLAAVAAQDAVQRACETAKSVLIIPENHTRNTFYLQNVYALGEILRSAGYEVRLGSLNPEVTEPTEFETALGDKILLEPLLRTRDRVHLADGFSPCVVLLNNDLSAGIPDILKGISQTVLPPLHGGWTTRRKTNHFGAYNQVTAEFAKLIGIDEWQINPYFEKIGGLDFQGREGEDALAEAVERVLAKIQAKYDESGITDKPFVIVKADAGTYGMGVMSVKSADEVRGLNRKNRNKMAKVKEGLEVSEVIVQEGIYTYETLNGAVCEPVVYMMDRFVIGGFFRVHEGRGADENLNAGGMVFVPLSNSIPTGNGDNSQEAPEACKRVFEQWDSLGMPRSEKDCDVDNEHNRLYVYGVMARLSLLAASIELEETA

SEQ ID NO: 18350 - protein, 103 aa, Neisseria meningitidis; identical to SEQ ID NO: 2548

SEQ ID NO: 18351 - protein, 332 aa, Neisseria meningitidis; identical to SEQ ID NO: 6359

SEQ ID NO: 18352 - protein, 265 aa, Neisseria meningitidis
MKALHKTSFWESLAIQRRVIGALLMREIITRYGRNNIGFLWLFVEPLLMTFVIVLMWKFLKADRYSTLNIVAFAITGYPMLMMWRNASKRAVGSISSNASLLYHRNVRVLDTILARMILEIAGATIAQIVIMAVLIAIGWIEMPADMFYMLMAWLLMAFFAIGLGLVICSIAFNFEPFGKIWGTLTFVMMPLSGAFFFVHNLPPKVQEYALMIPMVHGTEMFRAGYFGDSVTTYENPWYILLCNLVLLLLGLAVVARFSKGVEPQ

SEQ ID NO: 18353 - protein, 103 aa, Neisseria meningitidis; identical to SEQ ID NO: 1510

SEQ ID NO: 18354 - protein, 82 aa, Neisseria meningitidis; identical to SEQ ID NO: 2740

SEQ ID NO: 18355 - protein, 255 aa, Neisseria meningitidis; identical to SEQ ID NO: 8663

SEQ ID NO: 18356 - protein, 394 aa, Neisseria meningitidis; identical to SEQ ID NO: 277

SEQ ID NO: 18357 - protein, 132 aa, Neisseria meningitidis
MSTFFQQTAQAMIARHIDRFPLLKLDQVIDWQPIEQYLNRQKTRYLRDHRGRPACPLLSMFKAVLLGQWHNLSDPELEHSLITRIDFNLFCRFDELSIPDYSHQPYSGLSEKDAYAVMTGYRPFKRVRPYAV

SEQ ID NO: 18358 - protein, 215 aa, Neisseria meningitidis; identical to SEQ ID NO: 2727

SEQ ID NO: 18359 - protein, 498 aa, Neisseria meningitidis
MFSNYLLSLAIWIPIAAGVLVLSTGKDSRAPLARVLAFMGALAGFLVTLPLFTGFDRLSGGYQFTEFHEWIPLLKINYALGVDGISVLFIILNAFITLLVVLAGWEVIQKRPAQYMAAFLMMSGLINGAFAAQDAILFYVFFEGMLIPLYLIIGVWGGPRRVYASVKLFLYTLMGSLLMLVAMVYLYYQTGSFSIVDFQNIKQIPLGVQQLLFAAFFLSFAVKVPMFPVHTWLPDAHVEAPTGGSMVLAAITLKLGAYGFLRFILPIMPDAARYFAPVIIVLSLIAVIYIGMVALVQTDMKKLVAYSSISHMGFVTLGMFLFVDGQLDDWALKGAIIQMISHGFVSAAMFMCIGVMYDRLHTRNIADYGGVVNVMPKFAAFMMLFGMANAGLPATSGFVGEFMVIMGAVKVNFWVGALAAMTLIYGASYTLWMYKRVIFGAIHNPHVAEMKDINCREFAILAILAVVVLGMGLYPNAFIEVVHQAANDLIAHVAQSKI

SEQ ID NO: 18360 - protein, 672 aa, Neisseria meningitidis
MNKSLSGSVEEYRELTLRGMILGALITVIFTASNVYLGLKVGLTFASSIPAAVISMAVLKFFKGSNILENNMVQTQASAAGTLSTIIFVLPGLLMAGYWSGFPFWQTTLLCIAGGILGVIFTIPLRYAMVVKSDLPYPEGVAAAEILKVGGHEEGDNRQGGSGIKELAAGGALAGLMSFCAGGLRVIADSASYWFKSGTAIFQLPMGFSLALLGAGYLVGLTGGIAILLGISIAWGIAVPYFSSHIPQPSDIEMAAFAMKLWKEKVRFIGAGTIGIAAVWTLLMLLKPMVEGMKMSFKSFGGGAPATERAEQDLSPKAMIFWVLSMMFILGVSFYHFIGDSHITGGMAWLLVVVCTLLASVIGFLVAAACGYMAGLVGSSSSPISGVGIVSIVVISLVLLLVGESGGLMADEANRKFLLALTLFCGSAVICVASISNDNLQDLKTGYLLKATPWRQQVALIIGCIVGALVISPVLELLYEAYGFTGAMPREGMDAAQALAAPQATLMTTIASGIFAHNLEWVYIFTGIAIGAVLIAADLVLKKSSGGKLALPVLAVGMGIYLPPSVNMPIVAGAVLAAVLKHIIGKKAENREGRLKNAERIGTLFSAGLIVGESLIGVIMAFIIAFSVTNGGSDAPLALNLQNWDAAASWLGLAFFVTGMFFFAQRVLKAGR

SEQ ID NO: 18361 - protein, 318 aa, Neisseria meningitidis; identical to SEQ ID NO: 18259

SEQ ID NO: 18362 - protein, 388 aa, Neisseria meningitidis
MNLHEYQAKELLASYGLPVQGGILAHNGEEAAAAYDKLGGKFAVVKAQVHAGGRGKAGGVKVVKSREEAKEVAESLIGTNLVTYQTDANGQPVNSVLVCEDMYPVQTELYLGAVVDRSTRRITFMASTEGGVEIEKVAAETPEKIFKVTVDPLVGLQPCQAREVAFQLGLKDKQINEFVKLMTGAYKAFVENDFALFEVNPLAVRENGALACVDGKIGIDSNALYRLPKIAELRDKSQENERELKASEFDLNYVALEGNIGCMVNGAGLAMATMDIIKLKGGQPANFLDVGGGATKDRVVEAFKLILEDKSVQGVLINIFGGIVRCDMIAEAIVAAVKEINVDVPVVVRLEGNNAELGAKILNESGLKLTSADGLNDAAEKIVAAVNA

SEQ ID NO: 18363 - protein, 242 aa, Neisseria meningitidis; identical to SEQ ID NO: 5100

SEQ ID NO: 18364 - protein, 69 aa, Neisseria meningitidis; identical to SEQ ID NO: 9123

SEQ ID NO: 18365 - protein, 203 aa, Neisseria meningitidis
MITTYKTITSPTQAGFKDKGSRFIAFAYPIRTLADVKKYLDPLKEEHHKARHWCYAYRLGVDGMQFRANDDGEPSGSAGRPILGQIDSVGITDVLVVVVRYFGGTLLGVSGLIHAYKEATAQALAIAEVIEKNIEKTVWLKCEYPFLNEAIRIAKQYQADILEQDLQLDCRLTVSLSLANYEVCVAAWKNTRQIEVNTEKPFE

SEQ ID NO: 18366 - protein, 229 aa, Neisseria meningitidis
MLFEGLPCLAVWCKNRLSAVLPVGGLNVSENLLEIETHPFDSVLPPKAAVMMMGTFPPKEDKRAMQFHYPNFQNDMWRVYGLVFFNDAAHFQRLSEKAFDAEKIKAFLRERGIASCPTVLKAAREHGNASDKFLKVVETVDLAAVLAKIPECRHICTTGGKATEILLDIQGGGIKMPKTGETVPFPFAGRDLTLTRLPSTSRAYPLSLAKKAAAYRAFFEMAGLCEKQL

SEQ ID NO: 18367 - protein, 106 aa, Neisseria meningitidis; identical to SEQ ID NO: 5396

SEQ ID NO: 18368 - protein, 313 aa, Neisseria meningitidis; identical to SEQ ID NO: 14013

SEQ ID NO: 18369 - protein, 167 aa, Neisseria meningitidis
MHALHFSASDKAALYREVLPQIESVVADEADWVANLANTAAVLKEAFGWFWVGFYLVDTRSDELVLAPFQGPLACTRIPFGRGVCGQAWAKGETVVVGDVNAYPDHIACSSLSRSEIVVPLFSDGRCIGVLDADSEYLAQFDETDALYLGELAKILEKRFEASRQAV

SEQ ID NO: 18370 - protein, 221 aa, Neisseria meningitidis
MDAWFEDTAMGRYVAKLEQDFFGRYLDSYRFSGMCAVQVGGPWLSLSEDVVCVPRDMSMSAENMALADVSADMLLFPHTLEGGIPSQILSEAHRILKPCGRLMLTGFNPYSLWGFSRWFDGERLPEKRFCLPLPELKRQLADVGFDIEFGKFMVYLPPVSSIGQIRFWRFMEKAGDRWWPQCAAVYALVLVKRAAGVTPLPAWDGYLGGKALAAGAARVAD

SEQ ID NO: 18371 - protein, 69 aa, Neisseria meningitidis
MPYVNIKVTGGSEAPTAAQKAELIGGVTELLARVLGKNPETTVVVIDEVDTDNWGIGGKSVSERRKEGR

SEQ ID NO: 18372 - protein, 262 aa, Neisseria meningitidis
MNPKIVFFDIDDTLYRKYTDTLRPSVKTAVAALRGKGILTALATGRSLATIPEKVRDMMAETGMDAVVTINGQFALLHGKTVHEVPMDAGLMGRVCAHLDGLGMDYAFVGGEGIAVSALSECVCRALQHIASDFFADKDYFSSKPVYQMLVFAEENEMPLWSDIVEQEGLKTVRWHEEAVDLLPAGASKTDGIRSVVEALGLEMADVMAFGDGLNDVEMLSEVGFGVAMGNGEQAAKEAAKYVCPSVDEDGVLRGLQDLGVI

SEQ ID NO: 18373 - protein, 401 aa, Neisseria meningitidis; identical to SEQ ID NO: 2387

SEQ ID NO: 18374 - protein, 864 aa, Neisseria meningitidis
MSKSAVSPMMQQYLGIKAQHTDKLVFYRMGDFYEMFFDDAVEAAKLLDITLTTRGQVDGEPVKMAGVPFHAAEQYLARLVKLGKSVAICEQVGEVGAGKGPVERKVVRIVTPGTLTDSALLEDKETNRIVAVSPDKKYIGLAWASLQSGEFKTKLTTVDKLDDELARLQAAEILLPDSKNAPQLQTASGVTRLNAWQFAADAGEKLLTEYFGCQDLRGFGLDGKEHAVAIGAAGALLNYIRLTQNLMPQHLDGLSLETDSQYIGMDAATRRNLEITQTLSGKKSPTLMSTLDLCATHMGSRLLALWLHHPLRNRAHIRARQEAVAALESQYKPLQCRLKNIADIERIAARIAVGNARPRDLASLRDSLFELAQIDLSANGSSLLETLKAVFPENLSTAEQLRQAILPEPSVWLKDGNVINHGFHPELDELRRIQNHGDEFLLDLEAKERERTGLSTLKVEFNRVHGFYIELSKTQAEQAPADYQRRQTLKNAERFITPELKAFEDKVLTAQEQALALEKQLFDGVLKNLQTALPQLQKAAKAAAALDVLSTFSALAKERNFVRPEFADYPAIHIENGRHPVVEQQVRHFTANHTNLDHKHRLMLLTGPNMGGKSTYMRQVALIVLLAHTGCFVPADAATIGPIDQIFTRIGASDDLASNRSTFMVEMSETAYILHHATEQSLVLMDEVGRGTSTFDGLALAHAVAEHLLQKNKSFSLFATHYFELTYPPEAHAAAVNMHLSALEQGQDIVFLHQIQPGPAGKSYGIAVAKLAGLPVRALKSAQKHLNELENQAAANRPQLDIFSTMPSEKGDEPNVGNFVDKAEEKHFEGILAAALEKLDPDSLTPRKALSELYRLKDLCKSVS

SEQ ID NO: 18375 - protein, 100 aa, Neisseria meningitidis; identical to SEQ ID NO: 1023

SEQ ID NO: 18376 - protein, 1992 aa, Neisseria meningitidis
MNKGLHRIIFSKKHSTMVAVAETANSQGKGKQAGSSVSVSLKTSGDLCGKLKTTLKTLVCSLVSLSMVLPAHAQITTDKSAPKNQQVVILKTNTGAPLVNIQTPNGRGLSHNRYTQFDVDNKGAVLNNDRNNNPFVVKGSAQLILNEVRGTASKLNGIVTVGGQKADVIIANPNGITVNGGGFKNVGRGILTTGAPQIGKDGALTGFDVRQGTLTVGAAGWNDKGEADYTGVLARAVALQGKLQGKNLAVSTGPQKVDYASGEISAGTAAGTKPTIALDTAALGGMYADSITLIANEKGVGVKNAGTLEAAKQLIVTSSGRIENSGRIATTADGTEASPTYLSIETTEKGAAGTFISNDGRIESKGLLVIDTGEDIGLRNGAVVQNNGNRPAATVLNAGRNLVIESKANVNNAKGSTNLSTGGRTVIKEASIQTGTTVYSSSKGNAELGNNTRITGADVTVLSNGTISSSAVIDAKDTAHIEAGKPLSLEASTVTSDIRLNGGSIKGGKQLALLADDNITAKTTNLNTPGNLYVHTGKDLNLNVDKDLSAASIHLKSDNAAHITGTSKTLTASKDMGVEAGSLNVTNTNLRTNSGNLHIQAAKGNIQLRNTKLNAAKALETTALQGNIVSDGLHAVSADGHVSLLANGNADFTGHNTLTAKADVNAGSVGKGRLKADNTNITSSSGDITLVAGNGIQLGDGKQRNSINGKHISIKNNGGNADLKNLNVHAKSGALNIHSDRALSIENTKLESTHNTHLNAQHERVTLNQVDAYAHRHLSITGSQIWQNDKLPSANKLVANGVLALNARYSQIADNTTLRAGAINLTAGTALVKRGNINWSTVSTKTLEDNAELKPLAGRLNIEAGSGTLTIEPANRISAHTDLSIKTGGKLLLSVKGGNAGAPSAQVSSLEAKGNIRLVTGETDLRGSKITAGKNLVVATTKGKLNIEAVNNSFSNYFPTQKAAELNQKSKELEQQIAQLKKSSPKSKLIPTLQEERDRLAFYIQAINKEVKGKKPKGKEYLQAKLSAQNIDLISAQGIEISGSDITASKKLNLHAAGVLPKAADSEAAAILIDGITDQYEIGKPTYKSHYDKAALNKPSRLTGRTGVSIHAAAALDDARIIIGASEIKAPSGSIDIKAHSDIVLEAGQNDAYTFLKTKGKSGKIIRKTKFTSTRDHLIMPAPVELTANGITLQAGGNIEANTTRFNAPAGKVTLVAGEELQLLAEEGIHKHELDVQKSRRFIGIKVGKSNYSKNELNETKLPVRVVAQTAATRSGWDTVLEGTEFKTTLAGADIQAGVGEKARVDAKIILKGIVNRIQSEEKLETNSTVWQKQAGRGSTIETLKLPSFESPTPPKLSAPGGYIVDIPKGNLKTEIEKLAKQPEYAYLKQLQTAKNVDWKQVQLAYDKWDYKQEGLTGAGAAIVVIIVTALTYGYGAAAAGSVTAAGSSTAAAATTTAAATTTVSTAAAMQTAALASLYSQAAVAIINNKGDVGKALKDLGTSDTVKQIVTSALTAGALNQMGADIAQLNSKVRTELFSSTGNQTIANLGGRLATNLSNAGISAGINTAVNGGSLKDNLGNAALGALVNSFQGEAASKIKTTFSDDYVAKQFAHALAGCVSGLVQGKCKDGAIGAAVGEIVAESILGGRNPATLSDAEKHKVISYSKIIAGSVAALNGGDVNTAANAAEVAVVNNALNFDSTPTNAKKHQPQKPDKTALEKIIQSIMPAHAAGAMTNPQDKDAAIWISNIRNGITGPIVITSYGVYAAGWTAPLIGTAGKLAISTCMANPSGCTVMVTQAAEAGAGIATGAVTVGNAWEAPVGALSKAKAAKQAAPKETINNLANLAKAEQQILFRIAQRDTQLDAWKTGFNNRVRKGAGLLDASNIPITINGKTIKPVQAISLKGAPVYSGVSEQEIFALYRQMTGQNPNFRVLPDGRLANGIISTGEWAGTKIALRNFSKTENSTQARWTLDLQNPPSFIKGTKLELKFQ

SEQ ID NO: 18377 - protein, 269 aa, Neisseria meningitidis
MAKIGDFAAKSMIEIRSKRMITLPSLNNLPSKWDEIRYWLETRVCECGVMPHPNLTECEAGQFDRDFWDNIGCAPEEYVRIRRAIRLLEASYPDSLNELVCAAIATPLGEMLAVFGNKGLCLLEFVGQKYMEQEITAVQKALRGRFVFREDERTQLLRQELDLYFKCRLKTFATPLEMIGTAFQKQAWDALLAIPYGETRSYKEQAQRLGNPKAVRAVAAANGQNKVSILIPCHRVIGSDGKLTGYAGGLNRKQFLLALERDEVQTALF

SEQ ID NO: 18378 - protein, 484 aa, Neisseria meningitidis; identical to SEQ ID NO: 5358

SEQ ID NO: 18379 - protein, 344 aa, Neisseria meningitidis; identical to SEQ ID NO: 2299

SEQ ID NO: 18380 - protein, 148 aa, Neisseria meningitidis; identical to SEQ ID NO: 14771

SEQ ID NO: 18381 - protein, 72 aa, Neisseria meningitidis
MCGSTTHAVPNRPKPRACLRLTPYHPTNTASVGWILVSDKTFNIPIIAIHCSNAQNVGFENPTYKIIPSIIL

SEQ ID NO: 18382 - protein, 963 aa, Neisseria meningitidis
VLQYQFSFIFQAASIMCKHHPQHSHDNDTIRIRGARTHNLKNIDLDIPRHKLVVVTGLSGSGKSSLAFDTLYAEGQRRYVESLSAYARQFLQMMDKPDVDLIEGLSPAISIEQKSTSHNPRSTVGTVTEIHDYLRLLYARVGTPYCPEHNLPLSSQTVSQMVDAVLKLPEDTRVMILAPAVRERKGEFVDFFADLQAQGFARVRVDGEVYQLDEVPKLEKNIKHNIDVVIDRVKVKADIKQRLAESFETALRHGNERALAMEMESGEEHWFSARFACPVCSYSLPELEPRLFSFNNPMGSCPTCDGLGNTNFFDPEKVVAHPELSLATGAIDGWDKRNQFYFQMIQSLARHYGFDVQAAWETLPEKVKKVVLHGSGKEVIDFTYLSERGTTFNRSHAFEGIIPNLERRYRETDSETVREKLREYQNHRACPSCGGARLRKEARYVYVSGEPLHEVSAWPLTKTHQFFETLDLDGNKKQIAEKILKEITERLGFLINVGLDYLNLSRSAETLSGGEAQRIRLASQIGSGLTGVMYVLDEPSIGLHQRDNDRLLATLKRLRDLGNSVIVVEHDEDAIREADFVVDMGPGAGEHGGNVLIADTPENVAQCENSVTGQYLSGKKSIAVPSERTPVNPDRMLVLKGARGNNLKNVTLELPLGLITCITGVSGSGKSTLINDTLAKITARELNRAQEEPAPYDDIRGLEHLDKVINVDQSPIGRTPRSNPATYTGLFTPIRELFAGVPLSRERGYNVGRFSFNVKGGRCEACQGDGVIKVEMHFLPDVYVPCEVCHGKRYNRETLEIQYKGKNISQVLDMTVEEAREFFDAVPTVSRKLQTLMDVGLGYIRLGQSATTLSGGEAQRVKLALELSKRDTGRTLYILDEPTTGLHFADIALLLEVIDRLKGKGNSIVIIEHNLDVIKTADWIVDLGPEGGDGGGRIIASGSPEEVAKVKGSYTGKYLKNIL

SEQ ID NO: 18383 - protein, 138 aa, Neisseria meningitidis; identical to SEQ ID NO: 774

SEQ ID NO: 18384 - protein, 273 aa, Neisseria meningitidis; identical to SEQ ID NO: 221

SEQ ID NO: 18385 - protein, 128 aa, Neisseria meningitidis
VVVFGILKRNGRVYTVVVDNAKSETLLPVIKKKIMPDSIVYTDSLSSCDKLDVSGFIHYRINHSKECADRQNHINGIENFWNQAKRVLRKYNGIDRKSFPLFLKECEFRFNFGTPSQQLKILRDWCGI

SEQ ID NO: 18386 - protein, 248 aa, Neisseria meningitidis
MNVLISNDDGYLSEGIAVLACVTAEFANVRVVAPERDRSGVSNSLTLERPLQLKQAQNGFYYVNGTPTDCIHIGQSVFSDFQADFVFSGINRGANMGDDTLYSGTVAAATEAYLMGIPAVAFSLNDASGRYWATAEQALWTLLAHFFKTPPQSPILWNINIPAVAPEDVRGIKIARLGRRHHGQNVIPARNPRGEQIYWIGPVGEVSDREEGTDFGECGAGFITVTPLQIDLTAYPDMAETAAFWHAD

SEQ ID NO: 18387 - protein, 90 aa, Neisseria meningitidis; identical to SEQ ID NO: 1115

SEQ ID NO: 18388 - protein, 60 aa, Neisseria meningitidis; identical to SEQ ID NO: 3237

SEQ ID NO: 18389 - protein, 360 aa, Neisseria meningitidis
MFLWLAHFSNWLTGLNIFQYTTFRAVMAALTALAFSLMFGPWTIRRLTALKCGQAVRTDGPQTHLVKNGTPTMGGSLILTAITVSTLLWGNWANPYIWILLGVLLATGALGFYDDWRKVVYKDPNGVSAKFKMVWQSSVAIIAGLALFYLAANSANNILIVPFFKQIALPLGVAGFLVLSYLTIVGTSNAVNLTDGLDGLAAFPVVLVAAGLAIFAYVSGHYQFSQYLQLPYVAGANEVVIFCTAMCGACLGFLWFNAYPAQVFMGDVGALALGAALGTVAVIVRQEFVLVIMGGLFVVEAVSVMLQVGWYKKTKKRIFLMAPIHHHYEQKGWKETQVVVRFWIITIVLVLIGLSTLKIR

SEQ ID NO: 18390 - protein, 62 aa, Neisseria meningitidis; identical to SEQ ID NO: 7678

SEQ ID NO: 18391 - protein, 161 aa, Neisseria meningitidis
MDALHTIARNLTKKRQTVSCAESCTGGLLAAAFTSVAGSSQWFDQSFVTYSNKAKEDRLGVLPETLLEHGAVSRQTVYEMARGAKAVAQADYAVGISGIAGPSGGSESKPVGTVWFGFAFPGGSCEAMRRFDGNRESVRAQAVAFALERLAGLVENGGDAV

SEQ ID NO: 18392 - protein, 475 aa, Neisseria meningitidis
MIHTEPSAQPSTMDTAAFLKHIESAFRRIFSDGIDLMRYLPEDKWLALKQAGLLLPFLDKKHGGRKGSQFEIQEVLRIAGHYGVPVTLRTGIEGALVLQPLQEFGDEAQIAQGLDMVFKGEGGGLGVTEPETSGAAIAREMQSYYEYTDGQTIYVNAAKYWQGNSQSDFLLVAAKERKNGKLAKVIDLLLVPKTYIRCETLASEGLRAVRYAVNRIDAEMPATAVMKLSQSDAAGLRAFQNIFIRSRLQLIGMTHGIMEYILENLERYVRNDIRFVDYERREIRRRHQVSEILYRYVCHSVSPVAPVAHQLMEANIVKTLATEYTYAAAQMLQKLLGAKGFERGHTAGNIAIDIRPFTIFEGPNDMLYAEIYDQFVRATAEEKEAGMKLDKNQTLLDRLQTDARFAAVARDYTLPEDIRSFLQEHTLTDACALQKVFIGKIIARLFVFVQAEHEDTAAFLLNDIRKDILDCRYCG

SEQ ID NO: 18393 - protein, 289 aa, Neisseria meningitidis; identical to SEQ ID NO: 4802

SEQ ID NO: 18394 - protein, 219 aa, Neisseria meningitidis
MSNQQALVIFSGGQDSTTCLIQAIQTYGRENVQAITFQYGQRHAVELERARWIAQDLGIKQTVLDLSLMRQITHNALMDDTAAIETAGNGVPNTFVDGRNALFLLYAAIYAKGQGIRHIIAGVCETDFSGYPDCRDVFVKSMNVTLNLAMDYDFQIHTPLMYLTKAQTWALADEMGALDYIREQTHTCYNGIVGGCRECPSCILRERGLAEYLESKKAV

SEQ ID NO: 18395 - protein, 348 aa, Neisseria meningitidis
MKMQAVVVNKNVAGDVEIVEREVRPLEYGEALVEVEYCGVCHTDLHVAAGDYGEKPGRVLGHEGIGLVKEVADGVKNLKVGDRVSIAWLFQSCGSCEYCNTGRETLCRSVLNAGYTADGGMATHCIVSADYAVKVPEGLDPAQASSITCAGVTTYKAIKVSGVRPGQWIAIYGAGGLGNLAVQYAKKVFGAHVVAIDINDEKLAFAKESGADLVINAAKEDAAKVIQEKTGGAHVAIVTAVSAAAFNSAVDCVRAGGRVVAIGLPPESMDLSIPRLVLDGIEVVGSLVGTRKDLEEAFQFGAEGLVVPKVELRALDEAPAIFQEMREGKITGRMVIDMKKECGCGHHH

SEQ ID NO: 18396 - protein, 222 aa, Neisseria meningitidis
MTTHLSNVAPDLQNYLNAIGEPEHPVLTRLREKTEHHRMGKMAIAREQAAVLVWLAKLIRAEKYLEVGVFTGYSSTALALALPEHGRITACDINVTFTDTARQVWNEAGVAHKISLHLQPALLTLDDLIVQGEAGSYDLALIDADKPPTPQYFERCLKLVRQGGIIAIDNILLNGRVMREAASDAPPSVGILKDFNQNLPNDPRIVPITLPVGDGLTLLLKK

SEQ ID NO: 18397 - protein, 150 aa, Neisseria meningitidis
MNIEVEMKVLDERMADFIPAYATEGSAGLDLRACLDEEVVLQPGETFLVPTGLAIYLANPAYAAVLLPRSGLGHKHGIVLGNLVGLIDSDYQGELKVSLWNRSSEPFTVKPFERIAQMVIVPIVQARFKRVEEFVGSSRGEGGFGSTGLH

SEQ ID NO: 18398 - protein, 91 aa, Neisseria meningitidis; identical to SEQ ID NO: 4054

SEQ ID NO: 18399 - protein, 187 aa, Neisseria meningitidis
MKLIILDRDGVINQDRDDFVKSVDEWIPVEGSMDAVAFLTQAGYTVAVATNQSGIGRKYFTVQNLTEMHAKMHRLVRQAGGEINGIWFCPHTDADNCNCRKPKPGMIEDIIGRFNAQASETWLVGDSLRDLQAIDAVGGKPALVLTGKGKKTLSQHGHELPEHTQVFDTLLDFSQYIMQENAAPQAD

SEQ ID NO: 18400 - protein, 424 aa, Neisseria meningitidis
MKTLQDWLSHLETAHSGGLIDMGLERVGEVKKRMKLTPQCPVVVVAGTNGKGSVCAYLTQIYKQAGYKTGTLTSPHLLRYNERIAINAEPVSDDTIIASFERIEAARSEISLTYFEFNTLAAVDIFMREQVDVMILEVGLGGRLDAVNAFDGDCAVVTSVDLDHQAFLGDTVEQVGFEKAGVFRSGKPAICGQNPAPKSLLSHAEAIGAKLLMVQRDFEFHALENIQWNYRFRPQHSDSPARNRNSLPFPALRGAYQLSNAACALTVLECLNDKLPVDIGAIKRGLLLVENPGRFQVLPGRPLTVLDVGHNPHAARALRRSLINLAFAQKRTAVFSMLSDKDIDGVLEIVKDQFDEWYIAPLDMPRGMTLESLQNKLHEHSIENIQTFAAVREAYRAAASKAGENDRIVVFGSFHTVADVMSVL

SEQ ID NO: 18401 - protein, 96 aa, Neisseria meningitidis; identical to SEQ ID NO: 11797

SEQ ID NO: 18402 - protein, 251 aa, Neisseria meningitidis; identical to SEQ ID NO: 4289

SEQ ID NO: 18403 - protein, 591 aa, Neisseria meningitidis
MSIVLHGVAAGKGIAVGCAHLIARGTEEVPQYDVAEADTDAEAERFDAAVKATRKELEQLRSAIPENAPTELGAFISLHLMLLTDVTLSREPVDILREQKINAEWALKQQSDKLAAQFDNMDDAYLRERKQDMLQVVRRIHNNLIGQGNELEVADNLFDETVLIANDLSPADTVLFKEQRIAAFVTDAGGPTGHTAILGRSLDIPSVVGLHNARKLITEGETVIVDGINGVLIIAPDESVLNEYRRRAREYRSHKRDLNKLKKTAAATADGVCIELVGNIESAEDVKPLHNLGADGIGLFRSEFLYLNRDTMPSEDEQYEVYSAIVKKMKGKSVTIRTVDLGVDKNPRWFGKNSTPNGSLNPALGMTGIRLCLAEPVMFRTQMRAILRAAAHGPVRMMWPMITSVSEVRQCLIHLDTAQRQLAERGDAFGKVGIGCMIEIPSAALTVGSILKLVDFISVGTNDLIQYILSVDRGDDSVSHLYQPGHPAVLKMLQHVIRTANRMDKDVSVCGEMAGDTAFTRVLLGMGLRRFSMNPNNILPVKNIILHSNVGQLESDIVKVIRCEDEEKSEKLIKQINSVSVEEEADFKGRK

SEQ ID NO: 18404 - protein, 572 aa, Neisseria meningitidis
MNLHQTVEHEAAAAFAAAGIAGSPVVLQPTKNAEHGDFQINGVMGAAKKAKQNPRELAQKVADALAGNAVIESAEVAGPGFINLRLRPEFLAQNIQTALNDARFGIAKTDKPQTVVIDYSSPNLAKEMHVGHLRSSIIGDSISRVLAFMGNTVVRQNHVGDWGTQFGMLVAYLVEQQKDNAAFELADLEQFYRAAKVRFDEDPAFADTAREYVVKLQGGDETVLALWKQFVDISLSHAQAVYDTLGLKLRPEDMAGESKYNDDLQPVVDDLVQKGLAVEDDGAKVVFLDEFKNKEGEPAAFIVQKQGGGFLYASTDLACLRYRVGTLHADRLLYVVDHRQALHFEQLFTTSRKAGYLPENVGAAFVGFGTMMGKDGKPFKTRSGDTVKLVDLLTEAVERAAALVKEKNPELGADEAAKIGKTVGIGAVKYADLSKNRTSNYVFDWDAMLSFEGNTAPYLQYAYTRVQSVFRKAGEWDATAPTVLSEPLEKQLAAELLKFEDVLQSVADTAYPHYLAAYLYQIATLFSRFYEACPILKAESASRNSRLQLAKLTGDTLKQGLDLLGIDVLDVM

SEQ ID NO: 18405 - protein, 229 aa, Neisseria meningitidis; identical to SEQ ID NO: 524

SEQ ID NO: 18406 - protein, 385 aa, Neisseria meningitidis; identical to SEQ ID NO: 10504

SEQ ID NO: 18407 - protein, 1031 aa, Neisseria meningitidis
MNKTLKRQVFRHTALYAAILMFSHTGGGAQAETHNYAIVMNEQNQLKVKQKGLYSTLREKDRERKFIYNKSWQGGGSVFFDNTDTLVSRQSGTAVFGTATYLPPYGKVSGFDANALKERNNAVDWIHTTRAGLAGYAYTNVICRSHQCPQLVYKTRFSFDNPDLAKRGGGLDRHTEPSRDNSLIYKLKDHPWLGVSFNLGSENTVKNSQSSSRLISSFSEDNNNQTIVSTTENHPISLGDRQREHTAVAYYLNAKLHLLDKKGIKDITGKTVRLGVLKPSIDVKTQRTGLGGLLGFHAKWDIKDTGQIPVELGLPQIKAGRCINKPNPNPKAQALSPALTAPALWFGPVQNGKVQMYSASVSTYPDSSSSQIFLQNLSRKDDTSKPGRYSLKPLSTSEIKSKEPTFTGRQTVIRLDGGVQQIKLQGNEVTSFNVNNGNNTFGIVKDLGVDPDASEWKKVLLPWTVRASNDDNQFKTINQQLNQQKIQYSQRYRIRDNGNRDLGDIVNSPIVAVGEYLATSANDGMVHIFKQSGGDKRSYNLKLSYIPGTMPRQYFDNDTSALKDSTLAKELRTFAEKGYVGDRYGVDGGFVLRQVNNLNGQDRVFMFGAMGFGGRGAYALDLSKIDSNNPTAVSLFDVKNDDKNNNGVKLGYTVGTPQIGKTHNGKYAAFLASGYATKKIDDQTNKTALYVYDLESNNGTPIATINVPDGKGGLSSPTLVDKDLDGTVDIAYAGDRGGNMYRFDLSSQDPKQWSARAIFKGDKPITSAPAISQLKDKRVVIFGTGSDLSEEDVDKKDEQYIYGIFDDDTATTGSVNFSGSGGGLLEQHLTQEDKTLFLTDYKRSDGSGNKGWIVKLKDGQRVTVKPTVVLRTAFVTIRKYTDNGCGAETAILGINTADGGKLTKKSARPIVPEANQAVAQYSGHKQTAKGKSIPIGCMEKDNGIVCPNGYVYDKPVNVRYLDEKKTDGFSTTADGDAGGSGTFKEGKKPARNNRCFSGKGVRTLLMNDLDSLDITGPTCGMKRISWREVFY

SEQ ID NO: 18408 - protein, 595 aa, Neisseria meningitidis
MKLPLSYLPNIRFLSWCCLLAGIIAPATLLASPNPAEIRMQQDIQQRQREEQLRQTMQPESDVRLHQKNTGETVNQLMGDDSSQPCFAINEVVLEGEHHARFQFALKRALRETGFQAGKCLHAGNINQIMSLAQNALIGRGYTTTRILAAPQDLNSGKLQLTLIPSYLRSIRIDRSNDDQTHAGRIAAFQNKFPTRSNDLLNLRDLEQGLENLKRLPTAEADLQIVPVEGEPNQSDVVVQWRQRLLPYRVSVGMDNSGSEATGKYQGNITFSADNPFGLSDMFYVNYGRSIGGTPDEESFDGHRKEGGSNNYAVHYSAPFGKWTWAFNHNGYRYHQAVSGLSEVYDYNGKSYNTDFGFNRLLYRDAKRKTYLGVKLWTRETKSYIDDAELTVQRRKTAGWLAELSHKEYIGRSTADFKLKYKRGTGMKDALRAPEEAFGEGTSRMKIWTASADVNTPFQIGKQLFAYDTSVHAQWNKTPLTSQDKLAIGGHHTVRGFDGEMSLSAERGWYWRNDLSWQFKPGHQLYLGADVGHVSGQSAKWLLGQTLAGTAIGIRGQIKLGGNLHYDIFTGRALKKPEFFQSRKWASGFQVGYTF

SEQ ID NO: 18409 - protein, 153 aa, Neisseria meningitidis; identical to SEQ ID NO: 7521

SEQ ID NO: 18410 - protein, 293 aa, Neisseria meningitidis
MPSENTLFSLPDTLLRPIVEQALSEDLGRRGDITSAAVIAPDKTAKLFLVSREDGVIAGMDLARLAFQTMDPSVRFQAEIRDGQVVRAGQTLAAVEGNACALLAAERTALNYLTHLSGIATATARAVAEVAKYGTDIVCSRKTIPLLRVLQKYAVRAGGGVNHRMGLDDAILVKDNHLAYCGSIAQAVRQAKQAVGPLTCVEIEVDTLAQLDEAIAAGAERILLDNMDDETLKEAANRCHTQTAHPHTVYCEASGGIGFDRLKRVAQTGVDGIALGYLTHSSRSLDIGLDFLA

SEQ ID NO: 18411 - protein, 191 aa, Neisseria meningitidis
MLLLSAFVLAACNAQNRQSCVRHQDFARVAVDLFRSACVLTQGSFEPVSKFAAVGHFVPVGKEDLSRLPPAVAEPDVQALWTLERDGGIYYLSLPRDCCSVKAERADSAVLLEHFDGLVRQPPKNTNIELRAEQSVQALFETRQISYAWRESGSPEETVLTAQTADSPDLPVQAVLNLTHRSHNGKPLILP

SEQ ID NO: 18412 - protein, 232 aa, Neisseria meningitidis
MKSRQLALGVAALFALAACDSKVQTSVPADSAPAASAAAAPAGLVEGQNYTVLANPIPQQQAGKVEVLEFFGYFCPHCAHLEPVLSKHAKSFKDDMYLRTEHVVWQKEMLPLARLAAAVDMAAADSKDVANSHIFDAMVNQKIKLQEPEVLKKWLGEQTAFDGKKVLAAYESPESQARADKMQELTETFQIDGTPTVIVGGKYKVEFADWESGMNTIDLLADKVREEQKAAQ

SEQ ID NO: 18413 - protein, 110 aa, Neisseria meningitidis; identical to SEQ ID NO: 14608

SEQ ID NO: 18414 - protein, 122 aa, Neisseria meningitidis; identical to SEQ ID NO: 3130

SEQ ID NO: 18415 - protein, 210 aa, Neisseria meningitidis; identical to SEQ ID NO: 14345

SEQ ID NO: 18416 - protein, 339 aa, Neisseria meningitidis
MNTMLMSGAAAALLAGIILYFKSDKKRQENGEWSSGLEYAYILTAVGVFAALSLFMSFTAVFLIFVVLCGTAWGVYKYRLKTHPEISESSHFGDYFGSFFPTVLVLFLIRSFIAEPFQIPSSSMRPGLIKGDFILVGKFSYGLRVPVLNNVFIPTGKIERGDVVVFNYPLQPEMTYIKRIVGIPGDVVEYRNKVLTVNGKPASDIPDGTYRYPDDTDPSEIHNTDMFHSGLDGKSFNILKKEGQPAVSLPVLGKYTSDIMSENGYSIEQSGLEHCQYADDGSGFVCKVPEGRYFAMGDNRDNSADSRYWGFVDDKLVVGKAMFILMNFGDFGRAGTAIR

SEQ ID NO: 18417 - protein, 146 aa, Neisseria meningitidis; identical to SEQ ID NO: 5620

SEQ ID NO: 18418 - protein, 47 aa, Neisseria meningitidis; identical to SEQ ID NO: 17316

SEQ ID NO: 18419 - protein, 214 aa, Neisseria meningitidis
MIVLVGLGNKKMKNNDCFRLKNPQSGMALIEVLVAMLVLTIGILALLSVQLRTVASVREAETQTIVSQITQNLMEGMLMNPTIDSDSNKKNYNLYMGNHHTLSVVDGDFAIDAMKTKGQLAEAQLKRFSYELKNALPDATAIHYTVCKDSSGNAPTLSGNAFSSNCDNKANGDTLIKVLWVNDSAGDSDISRTNLEVSGDNIVYTYQARVGGRE

SEQ ID NO: 18420 - protein, 147 aa, Neisseria meningitidis
MPFRLFLGILCGLSMVAPVYAQGQPDAINAYIQKKKVIVDTSKAELCFADDRQCHPVLIGVATPKGTFGLTLNSTDKPGYGGEVIGFKQEGDFLFALHRVWNQIPSERRNERIASPSVSDRIMTNGCINVSDAVYEKLRHYFVLEVI

SEQ ID NO: 18421 - protein, 145 aa, Neisseria meningitidis; identical to SEQ ID NO: 1775

SEQ ID NO: 18422 - protein, 414 aa, Neisseria meningitidis
MSNENRTCSFCGKSKSHVKHLIEGENAFICDECVSNCIEILHEDGNDGTSSESVGQTSEEPGKLPTPAEIVANLNDHVIGQEQAKKALAVSVYNHYKRLRHPKAGANVELSKSNILLIGPTGSGKTLLAQSLARKLDVPFVMADATTLTEAGYVGEDVEQIITKLLGKCDFDVEKAQRGIVYIDEIDKISRKSDNPSITRDVSGEGVQQALLKLIEGTVASVPPQGGRKHPNQEFINVDTTNILFICGGAFAGLEKVIRQRTEKGGIGFGASVHSKDENADVTKLFGIVEPEDLIKFGLIPELIGRLPVIATLEELDEDALINILTEPKNALVKQYQALFGMENVELEFEEGALRSIARQAMERKTGARGLRSIVERCLLDTMYRLPDLKGLKKVVVGKAVIEEGREPELVFEP

SEQ ID NO: 18423 - protein, 125 aa, Neisseria meningitidis; identical to SEQ ID NO: 348

SEQ ID NO: 18424 - protein, 261 aa, Neisseria meningitidis; identical to SEQ ID NO: 8388

SEQ ID NO: 18425 - protein, 238 aa, Neisseria meningitidis; identical to SEQ ID NO: 3469

SEQ ID NO: 18426 - protein, 126 aa, Neisseria meningitidis; identical to SEQ ID NO: 10049

SEQ ID NO: 18427 - protein, 181 aa, Neisseria meningitidis
MSKIICLTAGHSNTDPGAVNGSDREADLAQDMRNIVASILRNDYGLTVRTDGEGKGNMPLRDAVKLIRGSDVAIEFHTNAAANKTATGIEALSTPKNKRWCQVLGKAVAKKTGWKLRGEDGFKPDNAGQHSRLAYAQAGGIVFEPFFISNDTDLALFKTTKWGICRAIADAIAMELGATKV

SEQ ID NO: 18428 - protein, 382 aa, Neisseria meningitidis
MPLPLPSPEARQFSLKLQTLIAEKIGKHGNWIPFSRFMELVLYAPQYGYYTGGSHKIGNTGDFITAPTLTSLFAQTLARQLQELLSQTAGNIYEFGAGTGQLAADLLGSISDGISRYYIIEISPELAARQKNLIQARAPEASQKVVHLTALPEAFDGIIIGNEVLDAMPVEIVRKDEGGSFEHVGVCTDNGRFAYSARPLHDPSLSTSASLYFPQTDYPYTSELHPQQYAFIRTLASRLEHGCMIFIDYGFDAAQYYHPQRNQGTLIGHYRHHVIHNPFDFIGLADLTAHVNFTDIAQAGTDAGLDLIGYLPQSHFLLNLGITELLAQTGKTNSAAYIREAAAVQKLIDQHEMGELFKVIAFGKNIGIDWAGFRFGDICHKL

SEQ ID NO: 18429 - protein, 134 aa, Neisseria meningitidis; identical to SEQ ID NO: 2143

SEQ ID NO: 18430 - protein, 349 aa, Neisseria meningitidis
MSKQPTSKRQWRDGVAPSAKKTAKPFKSKARPKDETDKTASQPYGQKASDGIKPQNLPKQRAAKAKKLVVRNPNQKIMEHARDLKERRSDLSRMEPERLQKVLAASGVGSRREMEEWINNGWVTVNGKTAQLGDKVTPDDHVTVKGSIIKLKWADRLPRIILYYKQEGEIVSRDDPQGRVSIFDRLPQAASSRWVAIGRLDINTSGLLILTTSGELVQRFAHPSFEVEREYAVRVLGGLTGEQMRVLTEEGVMLEDGLAKVERIREQGGEGANKWYNVVIKEGRNREVRRIFESQGLTVSRLVRVGFGPIGLPNRLKRGQFYELNPAEVANIIKWADMLLPGERRRKKA

SEQ ID NO: 18431 - protein, 444 aa, Neisseria meningitidis; identical to SEQ ID NO: 2522

SEQ ID NO: 18432 - protein, 158 aa, Neisseria meningitidis; identical to SEQ ID NO: 6684

SEQ ID NO: 18433 - protein, 321 aa, Neisseria meningitidis; identical to SEQ ID NO: 7205

SEQ ID NO: 18434 - protein, 223 aa, Neisseria meningitidis
VFPDKYKLSLKENIFLAKKVLVAQIHNLSRFENCQTTLLQTEQIIHGKNVASASLEDIQTILNLKRAYQYVISHISNGEPVDISLLKKINNTVAKDDSLAPGDFRTGSVGVTLLDGSRHAPNPVKEIEVARVLQNIGLQSGSTTEAAVRFMLYCMRQQVFWDGNKRTATLFANGLMMERGRGILEISEMQMPQFNEKLSAFYRSGDDTDISKFVYQNCISGID

SEQ ID NO: 18435 - protein, 319 aa, Neisseria meningitidis
MSKKTKQELENNKLSKRLRHAVGDAINDFNMIEPDDKIMVCLSGGKDSYALLDILRQLQASAPIDFQLVAVNLDQKQPGFPEEVLPTYLESIGVPYKIVEEDTYSTVKRVLDEGKTTCSLCSRLRRGILYRTAKELGCTKIALGHHRDDILATLFLNMFYGGKLKAMPPKLVSDNGEHIVIRPLAYVKEKDLIKYAELKQFPIIPCNLCGSQPNLQRQVIGDMLRDWDKRFPGRIESMFSALQNVVPSHLADTELFDFVGLERGQTLKHGGDLAFDSEKMPERFSDGSEEDESEIKIEPQKAERKVINILANKPKTCGA

SEQ ID NO: 18436 - protein, 218 aa, Neisseria meningitidis
MTIKIILIDDHTLFRSGIKALLSRQHGFEVIGEAADGLSGIKMISRLQPDVVLLDLDMPGMNGREALSQIISINPQQAVIMLTVSEDSDDLTECIRIGARGYLLKNINADFLLESIRKAAEGDNVFSPEMTAKLVKSLISPQSTQGTQALSSLTPRELEILGYLAAGHSNKIIARHLDLAESTVKVHVQNLLRKLNLSSRVQAAVYAIRHNVPQPVPE

SEQ ID NO: 18437 - protein, 127 aa, Neisseria meningitidis
MMTEPHGYPSNNLPVKIINDIIYATQLVEDLVLGKIKIVDFLKSYNNFYYWLGFDELPQSEKIKFLNYLNILSIHKEIQDKTVNRVYTDCFDIDKLHSLGRITTNECINGIKKIYQKNKLEFDNILK

SEQ ID NO: 18438 - protein, 116 aa, Neisseria meningitidis; identical to SEQ ID NO: 4624

SEQ ID NO: 18439 - protein, 96 aa, Neisseria meningitidis; identical to SEQ ID NO: 2317

SEQ ID NO: 18440 - protein, 204 aa, Neisseria meningitidis; identical to SEQ ID NO: 15732

SEQ ID NO: 18441 - protein, 268 aa, Neisseria meningitidis
MWHWDIILILLAVGSAAGFIAGLFGVGGGTLIVPVVLWVLDLQGLAQHPYAQHLAVGTSFAVMVFTAFSSMLGQHKKQAVDWKTVFTMMPGMVFGVFAGALSAKYIPAFGLQIFFILFLTAVAFKTLHTDPQTASRPLPGLPGLTAVSTLFGTMSSWVGIGGGSLSVPFLIHCGFPAHKAIGTSSGLAWPIALSGAISYLLNGLNIAGLPEGSLGFLYLPAVAVLSAATIAFAPLGVKTAHKLSSAKLKKSFGIMLLLIAGKMLYNLL

SEQ ID NO: 18442 - protein, 321 aa, Neisseria meningitidis; identical to SEQ ID NO: 4056

SEQ ID NO: 18443 - protein, 158 aa, Neisseria meningitidis
MEHLFGKWLPDLPAAVSDGIDLPMSRLLKARSLTAALRALPHTFSVELLKLGELETECGGRLVREVLLKLDGIPVVAARSECRIGSAFWQNILDCGTRPLGERLFQADLEGARSAFEFAVSGEGCGRYFAARRSRFSRHGEEMLLTEYFLPELKRFIG

SEQ ID NO: 18444 - protein, 155 aa, Neisseria meningitidis
MTELQHPVLVVDDETDILDLMEMTLMKMGLRVHTASGVAEAKNKLDSQRYSLVLTDMRMPDGSGLEVVQHINSRLLDTPVAVITAFGNADQAQEALRCGAFDPDTMQIQDYLDQIERDIIEQTLKQTEGNRTQADKRLGISFRSMRYRMERLNIG

SEQ ID NO: 18445 - protein, 415 aa, Neisseria meningitidis
VKENFSDEAWASFVERFAYLKVDVTQPDDFAALGDLVKARKETDNVVIYLSTAPKFFAQTCENLAKIGLNADNVRVVLEKPLGTDLASSQQINTDVARYFKEGQIYRIDHYLGKESLQNLLALRFANVMFEPLWNNKYIESVQLTIAEQLGVEERGEFYDITGALRDMVQNHLMQMLCMTAMEAPASLDADAVRDEKVKVIKSLKPLTVESVNENVVRGQYTAAKGMNGYLEEINVPQDSFTETYVAIKAEIENERWKGVPFYLRTGKRMAGKVAEIVLNFKDLNSHIFEGSRTAPNRLVIELQPYESVRLYTQMKTPGAGNKVETVPLATDLGKALESRRAEAYERLLLDVINGKLALFNRRDELEAAWEYVMPILENWTNNTTPPHGYGAHSWGPEAARELLARDGHKWHEEQ

SEQ ID NO: 18446 - protein, 269 aa, Neisseria meningitidis; identical to SEQ ID NO: 1709

SEQ ID NO: 18447 - protein, 94 aa, Neisseria meningitidis
LKLALKRSGKYNVYDPLALDLDGDSIETVATKGLAGALFDHRSQGIRTATGWIAAYDGFPVRKLNSNGGIISTTDTIFQSLHTWLDHQPNDTCH

SEQ ID NO: 18448 - protein, 502 aa, Neisseria meningitidis
MTTTPANILASVDLGSNSFRLQICENNNGQLKVIDSFKQMVRFAAGLDEQKNLSAASQEQALDCLAKFGERLRGFRPEQVRAVATNTFRVAKNIADFLPKAEAALGFPIEIIAGREEARLIYTGVIHTLPPGGGKMLVIDIGGGSTEFVIGSTLNPDITESLPLGCVTYSLRFFQNKITAKDFQSAISAARNEIQRISKNMRREGWDFAVGTSGSAKSIRDVLAAEMPQEADITYKGMRALAERIIEAGSVKKAKFENLKPERIEVFAGGLAVMMAAFEEMKLDSMTVTEAALRDGVFYDLIGRGLNEDMRGQTVAEFQHRYHVSLNQAKRTAETAQTFMDSLCHAKNVTVQELALWQQYLGRAAALHEIGLDIAHTGYHKHSAYILENADMPGFSRKEQTILAQLVIGHRGDMKKMSGIIGTNEMLWYAVLSLRLAALFCRSRQDLSFPKNMQLRTDTESCGFILRIDREWLERHPLIADALEYESVQWQKINMPFKVEAV

SEQ ID NO: 18449 - protein, 89 aa, Neisseria meningitidis
MMTESHGYLSNNLPVKIINDIIYATQLVEDLVLGKIKIVDFLKSYNNFYCWLGFDELPQSEKIKFLSYLNILSIHKEIQDETVNRVYTD

SEQ ID NO: 18450 - protein, 280 aa, Neisseria meningitidis
MLVCNPYEVVIHGTTSSGKIFRPSDWAERLCGILSSFTKDHRLSYSKWVRPILVDNIRCVAVDKKLETDNPQMFRFLMDFAADNDLRVIDCKALLEEREQGGQNDPADERVLLAQAIEEKHAAEKAQEQTASGASYVLREIGADDTATAFAALSVLRSALTDINRFTEQINKVQRPQGYRLLGIFEEGKHNAVAVCGFREACTLASGRHIHIDDIVTLPQSRRKGYASRLLEEVRKIGAETGVTKIHLNVHVNHDRADAHRLYFKNGFEICAYHFRCDPK

SEQ ID NO: 18451 - protein, 92 aa, Neisseria meningitidis; identical to SEQ ID NO: 3407

SEQ ID NO: 18452 - protein, 229 aa, Neisseria meningitidis
MTSLIHTLSDGMELTIEIKRRAKKNLIIRPIGTHTVRISVPPCFSVSALNRWLYENEAVLRRTLAKTPPQTAENRLPESILFHGRQLALTAHQDTQILLMPSEIRVPEGAPEKQLALLQDFLERQAHSYLIPRLERHARTTQLFPASSSLTSAKTFWGVCRKTTGIRLNRRLVGAPEYVADYVCIHELCHLAHPDHSPAFWELTRRFAPYTPEAKQWLKIHGRELFALG

SEQ ID NO: 18453 - protein, 485 aa, Neisseria meningitidis; identical to SEQ ID NO: 10955

SEQ ID NO: 18454 - protein, 399 aa, Neisseria meningitidis
MSDQLILVLNCGSSSLKGAVIDRKSGSVVLSCLGERLTTPEAVITFSKDGNKRQVPLSGRNCHAGAVGMLLNELEKHGLHDRIKAVGHRIAHGGEKYSESVLIDQAVMDELNACIPLAPLHNPANISGILAAQEHFPGLPNVGVMDTSFHQTMPERAYTYAVPRELRKKYAFRRYGFHGTSMRYVAPEAARILGKPLEDIRMIIAHLGNGASITAIKNGKSVDTSMGFTPIEGLVMGTRCGDIDPGVYSYLTSHAGMDVAQVDEMLNKKSGLLGISELSNDCRTLEIAADEGHEGARLALEVMTYRLAKYIASMAVGCGGVDALVFTGGIGENSRNIRAKTVSYLDFLGLHIDTKANMEKRYGNSGIISPTDSSPAVLVVPTNEELMIACDTAELAGIL

SEQ ID NO: 18455 - protein, 46 aa, Neisseria meningitidis
MDTLLKIIIALSFSGAEALVVWLFITAADAVLRRFQKPSHYRRVKK

SEQ ID NO: 18456 - protein, 365 aa, Neisseria meningitidis
LRYNSNHLPKPSNTMPSETRLPNFIRVLIFALGFIFLNACSEQTAQTVTLQGETMGTTYTVKYLSNNRDKLPSPAEIQKRIDDALKEVNRQMSTYQPDSEISRFNQHTAGKPLRISSDFAHVTAEAVRLNRLTHGALDVTVGPLVNLWGFGPDKSVTREPSPEQIKQAASYTGIDKIILKQGKDYASLSKTHPKAYLDLSSIAKGFGVDKVAGELEKYGIQNYLVEIGGELHGKGKNVRGEPWRIGIEQPNIVQGGNTQIIVPLNNRSLATSGDYRIFHVDKSGKRLSHIINPNNKRPISHNLASISVVADSAMTADGLSTGLFVLGETEALKLAEREKLAVFLIVRDKGGYRTAMSSEFEKLLR

SEQ ID NO: 18457 - protein, 366 aa, Neisseria meningitidis
MITLKTTPFHQAHQDAGAKPVDFAGWELPIHYGSQIAEHEAVRTDAGMFDVSHMLVTDVAGANAKAFFRKLIANDVAKLAFVGKALYSALLNDNGGVIDDLIVYRTNEAETQYRIVSNGATREKDTAQFHKVGQEFGVAFNPRYDLGMLAVQGPKAIEKLLTVKPEWADVIHGLKPFQGADLGNDWFVARTGYTGEDGVEVILPGTEAVAFFKALQAAGVQPCGLGARDTLRMEAGMNLYGNDMDDDTSPLEAGMGWTVDLKDESRDFVGKAALLALKEKGVAVKQVGLLLGKGGILRAHMEVLTDKGKGETTSGVFSPSLKQSIAIARVPKDFDGDTAKVLMRGKEVDVRVLKLPFVRNGQKQFD

SEQ ID NO: 18458 - protein, 74 aa, Neisseria meningitidis; identical to SEQ ID NO: 2464

SEQ ID NO: 18459 - protein, 317 aa, Neisseria meningitidis; identical to SEQ ID NO: 4876

SEQ ID NO: 18460 - protein, 272 aa, Neisseria meningitidis
MVLWQLTFVNNAVSGLSRVESARKGIEGKNMTAYRIAPSILSADFARLGEEVESVIAAGADLIHFDVMDNHYVPNLTFGPMVCAALKPYASVPIDVHLMVEPVDDLIQSFAKAGASIITFHPEASRHIDRSLSLIRDMGCQAGLVLNPATPVYLLENVLDRLDMVLLMSVNPGFGGQSFIPHTLEKIRRVRAMLDRYEAQSGRHIAIEVDGGIKTDNIAAVARAGADTFVAGSAIFGKPDYKAVIDAMRAELEKSGRLNLAPMIEIEMPSEN

SEQ ID NO: 18461 - protein, 66 aa, Neisseria meningitidis; identical to SEQ ID NO: 2062

SEQ ID NO: 18462 - protein, 241 aa, Neisseria meningitidis
MDFLSRWRRIADAPTIRRCVLCHGSSGVSDGICAGCRDDLAAYRTDAANSCPLCFRHIQGGAVCGGCQKKPPAFDRMWASLHYEPPVSNMIRTLKHLADLGMVRPLANLMVQNPPDRLADECFDFVLPVPLSRERLLQRGFNQSESIVGLLAQRYGWQILPRHTVFRHHRPPQSTLKGSERRRNIKNAFEIRTPIPENCNILLIDDVFTTGATLDELAKTLKKSGANRICCWTLARTPMKK

SEQ ID NO: 18463 - protein, 104 aa, Neisseria meningitidis
MKLIYTVIKIIILLLFLLLAVINTDAVTFSYLPGQKVDLPLIVVLFGAFVVGIVFGMFALFGRLLSLRGENGRLRAEVKKNARLTGKELTAPPAQNAPESAKQP

SEQ ID NO: 18464 - protein, 131 aa, Neisseria meningitidis; identical to SEQ ID NO: 12068

SEQ ID NO: 18465 - protein, 469 aa, Neisseria meningitidis
MTAQTLYDKLWNSHVVREEEDGTVLLYIDRHLVHEVTSPQAFEGLKMAGRKLWRIDSVVSTADHNTPTGDWDKGIQDPISKLQVDTLDKNIKEFGALAYFPFMDKGQGIVHVMGPEQGATLPGMTVVCGDSHTSTHGAFGALAHGIGTSEVEHTMATQCITAKKSKSMLISVDGKLKAGVTAKDVALYIIGQIGTAGGTGYAIEFGGEAIRSLSMESRMTLCNMAIEAGARSGMVAVDQTTIDYVKDKPFAPEGEAWDKAVEYWRTLVSDEGAVFDKEYRFNAEDIEPQVTWGTSPEMVLDISSKVPNPAEETDPVKRSGMERALEYMGLEAGTPLNEIPVDIVFIGSCTNSRIEDLREAAAIAKDRKKAANVQRVLIVPGSGLVKEQAEKEGLDKIFIEAGFEWREPGCSMCLAMNADRLTPGQRCASTSNRNFEGRQGNGGRTHLVSPAMAAAAAVTGRFTDIRMMA

SEQ ID NO: 18466 - protein, 346 aa, Neisseria meningitidis
MDISDFDFTLPEKLIAQHPPEVRGSSRLLVALPDMPLQDRVFGDLPDYVEAGDVLVFNNTKVMKARLFGQKDSGGRIEALIERVLDNHTALAHIRSSKSPKPGMGLVFEGGIRAVMVGREGELFCLRFEGGQTVYELLEQNGHLPLPPYIERAADADDDSRYQTVYAKYQGAVAAPTAGLHFTEELLRRLKDKGAVTAEVTLHVGAGTFQPVRVEKIEEHKMHSEWFEVPSETAAAVEAAKARGNKVWAVGTTSMRALESAARATGRLKAGQGDTDIFITPGYRFNVVDRLVTNFHLPKSTLLMLVSAFSGMGHIRAAYRYAVEREYRFFSYGDAMVLGRNEGVVR

SEQ ID NO: 18467 - protein, 182 aa, Neisseria meningitidis; identical to SEQ ID NO: 6504

SEQ ID NO: 18468 - protein, 258 aa, Neisseria meningitidis
MRAVPPPHISITGLGYLGLPLAQKFYQHGSRVAAIKRSLTSDDINLPIHLDTFDLGSTDAFQTALWRHHADKPVWFFLLPPSSLTHYADTVKQWAELARACNVQHLIFTSSTSVYGDTARECDEIALPDPQTESARQILAAEQHLLDSGVPNIDILRLGGLYCAERHPVSRLVQKQNIPGGNRPINIVHHNIAVESLFQTAFNPGGRRLKNIIESRHPTRREFYTEEAAKLGLPAPDFAPDDSMGKIIRTVCDNSLSL

SEQ ID NO: 18469 - protein, 97 aa, Neisseria meningitidis; identical to SEQ ID NO: 177

SEQ ID NO: 18470 - protein, 201 aa, Neisseria meningitidis; identical to SEQ ID NO: 2273

SEQ ID NO: 18471 - protein, 324 aa, Neisseria meningitidis; identical to SEQ ID NO: 9440

SEQ ID NO: 18472 - protein, 244 aa, Neisseria meningitidis; identical to SEQ ID NO: 7175

SEQ ID NO: 18473 - protein, 144 aa, Neisseria meningitidis; identical to SEQ ID NO: 4312

SEQ ID NO: 18474 - protein, 462 aa, Neisseria meningitidis; identical to SEQ ID NO: 10292

SEQ ID NO: 18475 - protein, 852 aa, Neisseria meningitidis
MPANLSSALETFKRQRDAAEAHYLKANRVSVFFREYTAAVETLLAALWVEHFQNSALCLMAVGGFGRGELYPCSDVDLAVVSPAPLSDGIQEQIARFVQTLWDCKLMPSVKSGSVDELCESVRNDITGDTAFLEARFLFGNRQTVDKLAEKMNAQRNVAAFVEAKLVEMEHRHAKSQGSGAVLEPNIKSCPGGLRDIHTLLWIAKAQGLATDLPDLLKQRILTRAEAGMLSHGYRRLAHIRIHLHLNANRAEDRLLFDLQPQVAESMGYEGLNLRRQSEELMRVFYRAIKTVKQLGGILTPMLQSRVSSTPLRVTLRIDDDYIQVNNQIAARHTDIFFRRPEHIFKIVEIMQQRNDITALEPQTLRAWWGATRKINRSFYQNPENRRRFAGFFRNGNGLTQTLRFLNLYGVLGRYLPAWEKIIGLLQHDLFHIYPVDDHILTVVRNVRRLALDMHSHELPYASALMQSFEKQDILYLAAFFHDIAKGRGGDHAIQGIADARQFAADHFLTGEESDLLAWLVENHLLMSAVAQKEDIQDPDVLDAFCKRVQTHERLSALYLLTISDIRGTNPKLWNAWRASLLESLFHAAGRYLTGNGGNPHTLFGRRRQEAADLLTRAAVPEKQQKKLWNALGSAYFARHQSREILWHAANLVHDFETPIVRSRILPQSDSFQVMVFMPNGPRLFARLCRIFSRHGFDILAARAFITEHDYILDTFIVQIPSQHAPEDYPDIQSALEAELNSFIHGHTVAEISSHSRRISRRSRYMPIAPSITITPEEDYPDWYSVEITAVNRPFLLADMAEVFFAHNVSLRYAKISTLDERAEDSFTVFSLDLKNPKIQSSLKQTLLEQLS

SEQ ID NO: 18476 - protein, 201 aa, Neisseria meningitidis; identical to SEQ ID NO: 291

SEQ ID NO: 18477 - protein, 384 aa, Neisseria meningitidis; identical to SEQ ID NO: 3177

SEQ ID NO: 18478 - protein, 205 aa, Neisseria meningitidis; identical to SEQ ID NO: 8342

SEQ ID NO: 18479 - protein, 183 aa, Neisseria meningitidis
LSGININLKNGDSLLIRGPSGCGKTSLLRALAGLWPFGSSGKVSRPPHQDILSLPQRPYTAQGSLRDAVCYPDIDKQHPELAEAMNTCRLGYLVDKLDKTDDWQHKLSPGELQRVAFVRALLSKPKIVLLDEATAALDEPTEALLYRALKQKLPDSIIISIGHRSTLNAFHNMHLDVGNAACG

SEQ ID NO: 18480 - protein, 253 aa, Neisseria meningitidis
MTEFVVLIPARLDSSRLPGKALADIHGKPMVVRVAEQAAKSKAARVVVATDHPDIQTVCQAHGVEVVMTSNRHESGTTRLAEAAAALKLPQHLVVVNVQGDEPLIAPELIDRTAEVLVENNVQMATAAHELHDFDELMNPNAVKVVLDKNRNAIYFSRAPIPYLRDAMRAGKREMPFETAVLRHIGIYAYRVGFLQRYTEMSVSPLETIESLEQLRVLWHGYPIAVETAKEAPAAGVDTQEDLDRIRAVFQTI

SEQ ID NO: 18481 - protein, 263 aa, Neisseria meningitidis
LHRLQKVVRHIAQTEIMPRFLNTPSHRKEDGSMLSEADIAAQTAFAAALPLLIDCPMLGEEMSRQEQSALWEQYSGEKGLWIVDPIDGTNNFVNGLPHFAVSVAFVRNGRAELGVIYNPVSGECFYAERGQGAFLNGTRLPLRLVDKKLNEAIAGVEIKYLRSGKLSSRMSTLAPFGTIRSMGSSTLDWCYLACGRYDVYVHGGQKLWDYAAGALIFEEAGGRLTTLEGDGFWSGEHVFKRSVVAALEPKLFERWVGWIRENQ

SEQ ID NO: 18482 - protein, 224 aa, Neisseria meningitidis
MPAALIKDFLLTQGLKLPLDEVRTAYLTAQTVMDMGTTSIERSVLWLEHEDWRLADYLEQNSGNEEGLKRLFMALDSVFSRCKGVRAAAVYALMPSENAAFRLVCLSRQGEVLENLWDLDEAAGKVSLACRSAQSGWMNVASDVRRWLDLGELSGERNHASAAQISIPVCTESGGVLGVVHVEFECAECAGTAAQVEWVALALALSEPLKQLLGITAAEGDENV

SEQ ID NO: 18483 - protein, 233 aa, Neisseria meningitidis
LNPTYDLSHLNKIPHSTRRTEMSKLTPREILTAGAVVPVMAIDDLSTAIDLSHALVEGGIPTLEITLRTPVGLDAIRLIAKEVPNAIVGAGTVTNPEQLKAVEDAGAVFAISPGLHESLAKAGRNSGIPLIPGVATPGEIQLALEHGIDTLKLFPAEVVGGKAMLKALYGPYADVRFCPTGGISLATAPDYLALPNVLCVGGSWLTPKEAVKNKDWDTITRLAKEAAALKPKA

SEQ ID NO: 18484 - protein, 60 aa, Neisseria meningitidis
MEKKFLDILVCPVTKGRLEYHQDKQELWSRQAKLAYPIKDGIPYMLENEARTLSEEELKA

SEQ ID NO: 18485 - protein, 436 aa, Neisseria meningitidis
MSVTVETLENLERKVVLSLPWSEINAETDKKLKQTQRRAKIDGFRPGKAPLKMIAQMYGASAQNDVINELVQRRFYDVAVAQELKVAGFPRFEGVEEQDDKESFKVAAIFEVFPEVVIGDLSAQEVEKVTASVGDAEVDQTVEILRKQRTRFNHVEREAQNGDRVIIDFEGKIDGEPFAGGASKNYAFVLGASQMLPEFEAGVVGMKAGESKDVTVNFPEDYHGKDVAGKTAMFTITLNNVSEATLPEVDADFAKALGIADGDVAKMREEVKKNVSREVERRVNEQTKESVMNALLKAVELKAPVALVNEEAARLANEMKQNFVNQGMADAANLDLPLDMFKEQAERRVSLGLILAKLVDENKLEPTEEQIKAVVANFAESYEDPQEVIDWYYAEPSRLQAPTSLAIESNVVDFVLGKAKVNEKALSFDEVMGAQA

SEQ ID NO: 18486 - protein, 464 aa, Neisseria meningitidis; identical to SEQ ID NO: 8899

SEQ ID NO: 18487 - protein, 152 aa, Neisseria meningitidis; identical to SEQ ID NO: 2635

SEQ ID NO: 18488 - protein, 93 aa, Neisseria meningitidis; identical to SEQ ID NO: 2125

SEQ ID NO: 18489 - protein, 370 aa, Neisseria meningitidis
MSTFFQQTAQAMIARHIDRFPLLKLDQVIDWQPIEQYLNRQKTRYLRDHRGRPACPLLSMFKAVLLGQWHNLSDPELEHSLITRIDFNLFCRFDELSIPDYSTLCRYRNWLAQDDTLSELLKLINRQLTEKGLKIEKASAAVVDATIIQTAGSEQRQAIEVDEEGQVSGQTTLSKDKNARWTKKNSLYKLGYKQHTRTDAEGYIEKLYITPTNAHECTHLSPLLEGLPKGTTVYADKGYDSKENRQHLKEHRLQNGIMRKACRNRPLTETQTKRNRYLSKTRYSGLNLNQDKATKPQTVQIVRQGEATPYWFKFNPLYVVEQSFGTLHRKFRYARAAYFGLSKVSAQSHLKAMCLNLLKAANRLSAPAAA

SEQ ID NO: 18490 - protein, 478 aa, Neisseria meningitidis; identical to SEQ ID NO: 13942

SEQ ID NO: 18491 - protein, 315 aa, Neisseria meningitidis
MAIPVLLWGAAAALAATGIVKGAAALSDIDDAKEIGERAERRYKRRKRELNSTKDETNLAFEELGQFKVDIFNNQIRHIVQVLNNTSNKHAKSELSGFNSTFDIAELKEMETMVQTSLELSTNLGSSAITGALAGFGVYGAVPMIATASTGTAISTLSGAAATNATLAWLGGGSLAAGGFGMAGGMVALGGIVAGPALAIGGFMLASKAEEALTEARAYSAEIDEAIDEMDLITEGLEGLKENAREIRHTLEEMVKRFEKVRVDHADHPDFHTMLVIGKAIKNLLNTPIMEEDGSPVANIRHQCEGCLNIELGTV

SEQ ID NO: 18492 - protein, 238 aa, Neisseria meningitidis
MTDTAENQTQNNWQAEHPRSIRSFVLRQSHMTSAQQRAIDTLWGSFGIDYQATPADLDARFGSSRPKILEIGFGMGTATAEIARRLPETDFLAIDVHGPGVGNLLKLIEENHLENIRVMRHDAVEVVENMLQDGSLDGIHIFFPDPWHKKRHHKRRLIQAPFIAKLLPKLKTGGYIHLATDWEEYAQQMLEVLSSFDSLQNTAADYAPTPDYRPETKFEARGKRLGHGVWDLVFKRIG

SEQ ID NO: 18493 - protein, 152 aa, Neisseria meningitidis; identical to SEQ ID NO: 1697

SEQ ID NO: 18494 - protein, 310 aa, Neisseria meningitidis
MLSQLEYGIAKENRPNRQADRFAGSVLPLAASLTHKPNIMKPIPTDTFQPAILPQAFETEIKSTCTGRIYRIQTATLGEMPSEGYPVLFVLDGEAFFPALFNIMQSLMPNPVTRSNAPCLIVGIGYTTGSVRDLAQRAADYTPPLGDNATADERQQFGQADRFSAFIDSELTAFLESRYTLNRNETAVFGHSFGALFGLYSLLSHRRFRRHWLVSPSIWWHNRRILDFMPSENRLNGIDVCLNIGALERGSGCKRREERDMAGLSERMAAELDRHGAAVFFREYPNADHGNVSFYSLTDCVEYLRKAWQR

SEQ ID NO: 18495 - protein, 430 aa, Neisseria meningitidis
MQFSAFGEKFTQHSGILQLMDNLGDALKSDKPVNMLGGGNPARIPEIDRAFADIFSKLAAEHAVENIGNYSNPQGDAVLIDALTAFLNREYSWNLTADNIALTNGSQNAFFYLFNLFGGKFKLSDGTSAEKAILLPLAPEYIGYADVHVEGQHFVSVKPKIENVEHEGEAGFFKYRVDFDALENLPELKAGKIGAICCSRPTNPTGNVLTDGEMARLDALAREHGIPLIIDNAYGMPFPNIIYSDVTLNWHENIILCFSLSKVGLPGVRTGIIVAAPEVVKAVSSLNAIVNLAPTRFGAAIAAPLLESGEMKRLADQVIRPFYRNQAQTAVSLLKRELGAYPMKIHKPEGAIFLWLWFENLPVSSQTLYEMLKAEGTLIIPGEHFFVGIDTQDYPHAGECIRMSIAQDAQTLEKGIAAIGKTVRKLYDNV

SEQ ID NO: 18496 - protein, 259 aa, Neisseria meningitidis
MHIIDSHCHLNFEGLKERLPEVLSNMEANGVGQVLAISVSRESFSEVFAIAEAHEHIYCTIGVHPDSKEAEEFSIAEMVAAAAHPKVVGIGETGLDYYWCKGDLSWQHKRFADHIEAANQTGLPVIVHTRDAAADTLSILKECRVNSGVIHCFSEDTAFARAAMDLGLYISFSGIVTFKNAPLVQEAAKYVPDDRILVETDAPFLAPVPKRGRQNEPAFVRYTAEHIAKLRNQTLEQVAAYTTENFYRLFKKVPDMRVV

SEQ ID NO: 18497 - protein, 197 aa, Neisseria meningitidis; identical to SEQ ID NO: 3523

SEQ ID NO: 18498 - protein, 182 aa, Neisseria meningitidis
VSQNTPIKPWYKHVWPWILMAGPIFVVIASVAMFFVAQQHATDLVTDDYYKDGKHIDIQLHRDEEAIRRHIGVQVLISPDMNAAKVFVGGEFDGKQPLNLLLMHPTRKADDQTVALKPVGSAQNGRAEYEAVFKTLPPTNHWYVRVEDAAGVWRVENKWITSQGNAVDLTPMDKLFNNTESK

SEQ ID NO: 18499 - protein, 263 aa, Neisseria meningitidis
MITVNTLQKMKAAGEKIAMLTAYGSSFAALMDDAGVEMLLVGDSLGMAVQGRQSTLPVSLRDMCYHTECVARGAKNAMIVSDLPFGAYQQSKEQAFAAAAELMAAGAHMVKLEGGVWMAETTEFLQMRGIPVCAHIGLTPQSVFAFGGYKVQGRGSKAQALLNDAKAHDDAGAAVVLMECVPAELAKKVTESVSCPTIGIGAGVDCDGQVLVMHDMLGIFPGKTAKFVKNFMQGHNSVQAAVRAYVEEVKAKTFPAAEHIFTD

SEQ ID NO: 18500 - protein, 268 aa, Neisseria meningitidis; identical to SEQ ID NO: 10730

SEQ ID NO: 18501 - protein, 394 aa, Neisseria meningitidis; identical to SEQ ID NO: 1253

SEQ ID NO: 18502 - protein, 752 aa, Neisseria meningitidis; identical to SEQ ID NO: 901

SEQ ID NO: 18503 - protein, 145 aa, Neisseria meningitidis; identical to SEQ ID NO: 3684

SEQ ID NO: 18504 - protein, 297 aa, Neisseria meningitidis
MPHPCQTVHTLTARVPKCRLKLNAARRQRYNRPQLFFPNIIMTTTEHDNDDELLLRYSRHILLDEIGIEGQQKLSGAHILVVGCGGLGAAALPYLAASGIGTLTIADSDTVELHNLQRQVAFDESDVGKLKTEALADRLRHINHTVDVRTVNEKLDGCRLTGLVQTADIVLDCCDNYATRQAVNRVCVQTKTPLVSGAAVRFEGQLAVYRPDLPDSPCYACLFDGGSASDGICSLFGVFSPLVGIIGSTQAAEALKILLDAGEPSHGRLAVYRALEGGWQYFDLPRNPECPICGAER

SEQ ID NO: 18505 - protein, 98 aa, Neisseria meningitidis
MFRILLLLFPCAILAACARNIPASPAVSNCAHLQNRTILYFDAHGKPADGAVKGGFYKIIEIQGANCILIQDFNSTGNALGGSYVPDCRKSSLFPKNI

SEQ ID NO: 18506 - protein, 174 aa, Neisseria meningitidis
MQTRILSAVLLAFSTAAFAGGAFTLQFDNPSEDGGFTQNQLLSAPYGFGCSGGNASPALSWKNPPAGTKSFVLTVYDKDAPTGLGWMHRVVADIPADVHRRNATSLQLSRCTSIADDQSAAISAVISLRICRIRLTPSYTAKPMPSCCNHANTPQSAASAALCGTSSSASTAAS

SEQ ID NO: 18507 - protein, 317 aa, Neisseria meningitidis
MHQYYDAVILSVGNGLLKRFFKQNAQLNIASRPLIITLFPGVVFGDQASILSRMGADIVLYNNKHDFRIAEEYKKQYKLSCQNILYGYPIFRHASKGRHGEKIYFIDQVKIPFKKEERIYTLKKLIALAEKYPEKEFTILLRVADKDITVHQDKHSYIELAKQFQLPSNLTIERKSTAQAFQEMGYCLSYSSTMLFEAECKGIPVGVVADLGFSKSYANQHFLGSGVLVYFDQIDFTSPKIADPDWLDCYATKKVITTDEFNKLLKQVVPLQHDYQEYLSAVNSIESTKTIFLRKFKKLIRDPKKFFYDSKWLRKVI

SEQ ID NO: 18508 - protein, 302 aa, Neisseria meningitidis
MNQTAINRADVRTRFIFDDMPVRGLHVRLENVWQHIVKQKNYPAAIRRALGELLAAGVLLSGNLKNEGTLIVQVQGQGRLKMLVAEATSDRTVRATARWDEAAEIADDESLGDLLGGNGVFVLTLQPKDGEPWQGVVPLEGDGIAQMLMNYMKRSEQLDTHIVLSASDEAAGGLLVQRLPEEVLDEEAWEHVSTLARTLTAGELAELDAQHVLYRLFHETPPRVFEPETFEFSCTCSRGKVSDMLLMLGGEEVGGVVAEQGSIEVDCDFCHSKYVFDETDVNALFGEDVVGVAKGLPRHTVQ

SEQ ID NO: 18509 - protein, 178 aa, Neisseria meningitidis; identical to SEQ ID NO: 1654

SEQ ID NO: 18510 - protein, 187 aa, Neisseria meningitidis; identical to SEQ ID NO: 1325

SEQ ID NO: 18511 - protein, 136 aa, Neisseria meningitidis; identical to SEQ ID NO: 1774

SEQ ID NO: 18512 - protein, 258 aa, Neisseria meningitidis; identical to SEQ ID NO: 2774

SEQ ID NO: 18513 - protein, 280 aa, Neisseria meningitidis
MSGGVMPELPEVETTLRGIAPHIEGKTVEAVVLRQLKLRWQVNPDLGEILSGRQVLSCGRRAKYLIVRFQTGILLIHLGMSGSLRIFTPSDGRIGKPDRHDHVDIVFSDGTVMRYRDPRKFGAILWYEGIEEHHPLLEKLGPEPLSEVFCADYLYVRLKAQKRAVKLALMDNAVVVGVGNIYANESLFRAGISPHRPANRLKKKECALLVETVKAVLRRAIETGGSTLRDFVDSDGKSGYFQQEYTVYGRHNQPCPQCGGLVVKETLGQRGTFYCPNCQK

SEQ ID NO: 18514 - protein, 313 aa, Neisseria meningitidis; identical to SEQ ID NO: 1650

SEQ ID NO: 18515 - protein, 398 aa, Neisseria meningitidis
MQNYLTPNFAFAPMIPERASGSRVWDTEGREYIDFSGGIAVNALGHCHPALADALNTQMHKLWHISNIYTTRPAQELAQKLVKNSFADKVFFCNSGSEANEAALKLARKYARDRFGGGKSEIVACINSFHGRTLFTVSVGGQPKYSKDYAPLPQGITHVPFNDIAALEAAVGEQTCAVIIEPIQGESGILPATAEYLQTARRLCDRHNALLILDEVQTGMGHTGRLFAYEHYGIVPDILSSAKALGCGFPIGAMLATEKIAAAFQPGTHGSTFGGNPMACAVGSRAFDIINTPETLNHVRSQGQKLQTALLDLGRKTGLFSQVRGMGLLLGCVLDAPYRGRASEITAAALKHGVMILVAGADVLRFAPSLLLDDEDTAEGLRRLEHALTEFAATSDNP

SEQ ID NO: 18516 - protein, 284 aa, Neisseria meningitidis
MFYQILALIIWSSSFIAAKYVYGGIDPALMVGVRLLIAALPALPACRRHVGKIPREEWKPLLIVSFVNYVLTLLLQFVGLKYTSAASASVIVGLEPLLMVFVGHFFFNDKARAYHWICGAAAFAGVALLMAGGAEEGGEVGWFGCLLVLLAGAGFCAAMRPTQRLIARIGAPAFTSVSIAAASLMCLPFSLALAQSYTVDWNVGMVLSLLYLGLGCGWYAYWLWNKGMSRVPANVSGLLISLEPVVGVLLAVLILGEHLSPVSALGVFVVIAATLVAGRLSHQK

SEQ ID NO: 18517 - protein, 115 aa, Neisseria meningitidis
MYIPDKGDIFHLNFDPSGGKEIKGGRFALALSPKAFNRATGLVFACPISQGNAAAARSGGMISTLLGAGTETQGNVHCHQLKSLDWQIRKASFKETVPDYVLDDVLARIGAVLFD

SEQ ID NO: 18518 - protein, 389 aa, Neisseria meningitidis
MTAHKILPVLLSIILGISHATAASPVPNRPTAHAAPTLQTPETLTAAHIVIDLQSKQILSAKNINTPVEPAALTQLMTAYLVFKNMKSGNIRSEENLKIPESAWASEGSRMFVRPGDTVSTDKLLKGMIALSANDAALTLAGRLGNGSIENFVQQMNKEARRLGMKNTVFKNPTGLSREGQVSTAKDLAQLSEALMRDFPEYYPLFSIKSFKFKNIEQNNRNILLYRDNNVNGLKAGHTESGGYNLAVSYSGNGRHILAITLGSESAETRASDNSKLLNWALQAFDTPKIYPKGKTVAQIQISGGSKKTVRAGFLKEAYITLPHKEAKMAEQILETIQPIPAPVKKGQILGKIKIRQNGYTIAEKEIVALEDVEKKNWWKKLWARLTGQ

SEQ ID NO: 18519 - protein, 96 aa, Neisseria meningitidis; identical to SEQ ID NO: 4410

SEQ ID NO: 18520 - protein, 470 aa, Neisseria meningitidis
MLLLPLLASAAYAEETPREPDLRSRPEFRLHEAEVKPIDREKVPGQVREKGKVLQIDGETLLKSPELLSRAMYSAVVSNNIAGIRVILPIYLQQAQQDKMLALYAQGILAQADGRVKEAISHYRELIAAQPDAPAVRMRLAAALFEDRQNEAAADQFDRLKAENLPPQLMEQVELYRKALRERDAWKVNGGFSVTREHNINQAPKRQQYGKWTFPKQVDGTAVNYRLGAEKKWSLKNGWYTTAGGDVSGRVYPGNKKFNDMTAGVSGGIGFADRRKDAGLAVFHERRTYGNDAYSYTNGARLYFNRWQTPKWQTLSSAEWGRLKNTRRARSDNTHLQISNSLVFYRNARQYWMGGLDFYRERNPADRGDNFNRYGLRFAWGQEWGGSGLSSLLRLGAAKRHYEKPGFFSGFKGERRRDKELNTSLSLWHRALHFKGITPRLTLSHRETWSNDVFNEYEKNRAFVEFNKTF

SEQ ID NO: 18521 - protein, 349 aa, Neisseria meningitidis; identical to SEQ ID NO: 6547

SEQ ID NO: 18522 - protein, 102 aa, Neisseria meningitidis; identical to SEQ ID NO: 254

SEQ ID NO: 18523 - protein, 198 aa, Neisseria meningitidis; identical to SEQ ID NO: 1998

SEQ ID NO: 18524 - protein, 92 aa, Neisseria meningitidis; identical to SEQ ID NO: 419

SEQ ID NO: 18525 - protein, 311 aa, Neisseria meningitidis; identical to SEQ ID NO: 13934

SEQ ID NO: 18526 - protein, 95 aa, Neisseria meningitidis; identical to SEQ ID NO: 3028

SEQ ID NO: 18527 - protein, 220 aa, Neisseria meningitidis
MIQAVLFDLDGTLADTALDLGGALNTLLARHGLPAKSMDEIRTQASHGAAGLIKLGAGITPDHTDYTRWRAEYLDEYDSRYAQDTTLFGGVNELIAELGKRGIKWGIITNKPMRFTDKLVPKLGFIVPPAVVVSGDTCGEPKPSVKPMLYACGQIHADPQHTLYVGDAERDIQAGRNAGMKTVLAEWGYIAPEDDTGSWQADFHIRTPLDLLECLDKIQS

SEQ ID NO: 18528 - protein, 117 aa, Neisseria meningitidis; identical to SEQ ID NO: 4861

SEQ ID NO: 18529 - protein, 230 aa, Neisseria meningitidis; identical to SEQ ID NO: 1269

SEQ ID NO: 18530 - protein, 259 aa, Neisseria meningitidis; identical to SEQ ID NO: 1423

SEQ ID NO: 18531 - protein, 601 aa, Neisseria meningitidis
MRYKPLLLALMLVFSTPAVAAHDAAHNRSAEVKKQTKNKKEQPEAAEGKKEKGKNGAVKDKKTGGKEAAKEGKESKKTAKNRKEAEKEATSRQSVRKGHEGDKKSKAEHKKAHGKPVSGSKEKNAKTQPENKQGKKEAKGQGNPRKGGKAEKDTVSANKKVRSDKNGKAVKQDKKYREEKNAKTDSDELKAAVAAATNDVENKKALLKQSEGMLLHVSNSLKQLQEERIRQERIRQERIRQARGNLASVNRKQREAWDKFQKLNTELNRLKTEVAATKAQISRFVSGNYKNSQPNAVALFLKNAEPGQKNRFLRYTRYVNASNREVVKDLEKQQKALAVQEQKINNELARLKKIQANVQSLLKKQGVTDAAEQTESRRQNAKIAKDARKLLEQKGNEQQLNKLLSNLEKKKAEHRIQDAEAKRKLAEARLAAAEKARKEAAQQKAEARRAEMSNLTAEDRNIQAPSVMGIGSADGFSRMQGRLKKPVDGVPTGLFGQNRSGGDVWKGVFYSTAPATVESIAPGTVSYADELDGYGKVVVVDHGENYISIYAGLSEISVGKGYMVAAGSKIGSSGSLPDGEEGLYLQIRYQGQVLNPSSWIR

SEQ ID NO: 18532 - protein, 252 aa, Neisseria meningitidis; identical to SEQ ID NO: 1597

SEQ ID NO: 18533 - protein, 253 aa, Neisseria meningitidis
MMGDSVIYYVEQADEPVNRAGERARKTFKYFWRELFWERRRIIPALDFAMVKAPFFQDGEDGEICEHMWIDDIYFDGLYIYGVLNNKPGELTNVEQGESICVPVDDISDWMFVCNGIPYGGFTIQAMRGQMTEEERTEHDAAWGIDFGDPGQVLLVYEEKEHPENLEEHPMCRNCIDDFRQQLSQNPDFLHEQDEDGYTPLHHEAIAGNALMVQAMLEYGANPASKTSEGYTALDFARLTGWQNVADLLEPRH

SEQ ID NO: 18534 - protein, 264 aa, Neisseria meningitidis
MNTILAFDIETVPDVQGIRTLYELPSSLPDDEVVLFAQQKRRAQTGGDFMQHHLHQVVAISCCMRWGQDKVHVGTIGEMDDGEEVVIAKFFELIEKHTPQLVSWNGGGFDLPVLHYRSLIYGINAARYWDMGDGDFGDSRDFKWNNYISRYHQRHCDLMDLLALYQPRANVPLDDMAKLCGFPGKLGMDGSKVWDAFHAGRLKEIRNYCETDAVNTYLMYLRFCLVSGRFDADEYEMEIKRIRNYLSAQTEDKPHWSEFAQAWK

SEQ ID NO: 18535 - protein, 431 aa, Neisseria meningitidis
VIAMIYIVLFLAAVLAVVAYNMYQENQYRKKVCDQFGHSDKDALLNSKTSHVRDGKPSGGSVMMPKPQPAVKKTAKPQDPAMRNLQEQDAVYIAKQKQAKASPFKTEIETALEESGIIGNSAHTVSEPQTGHSAPKPADAPAKPAPVPQTPAKPLITLKELSKVELPWFDVRFDFISYIALTEAKELHALPRLSNRCRYQIVGCTMDDHFQIAEPIPGIRYQAFIVGIQAVSRNGLASQEELSAFNRQVDAFAQSMGGQTLHTDLAAFIEVASALDAFCARVDQTIAIHLVSPTSISGVELRSAVTGVGFVLEDDGAFHYTDTSGSTMFSICSLNNEPFTNALLDNQSYKGFSMLLDIPHSPAGEKTFDDLFMDLAVRLSGQLNLNLVNDKMEEVSTQWLKDVRTYVLARQSEMLKVGIEPGGKTALRLFS

SEQ ID NO: 18536 - protein, 170 aa, Neisseria meningitidis; identical to SEQ ID NO: 1267

SEQ ID NO: 18537 - protein, 797 aa, Neisseria meningitidis
MKLKQIASALMVLGISPLALADFTIQDIRVEGLQRTEPSTVFNYLPVKVGDTYNDTHGSAIIKSLYATGFFDDVRVETADGQLLLTVIERPTIGSLNITGAKMLQNDAIKKNLESFGLAQSQYFNQATLNQAVAGLKEEYLGRGKLNIQITPKVTKLARNRVDIDITIDEGKSAKITDIEFEGNQVYSDRKLMRQMSLTEGGIWTWLTRSNQFNEQKFAQDMEKVTDFYQNNGYFDFRILDTDIQTNEDKTKQTIKITVHEGGRFRWGKVSIEGDTNEVPKAELEKLLTMKPGKWYERQQMTAVLGEIQNRMGSAGYAYSEISVQPLPNAETKTVDFVLHIEPGRKIYVNEIHITGNNKTRDEVVRRELRQMESAPYDTSKLQRSKERVELLGYFDNVQFDAVPLAGTPDKVDLNMSLTERSTGSLDLSAGWVQDTGLVMSAGVSQDNLFGTGKSAALRASRSKTTLNGSLSFTDPYFTADGVSLGYDVYGKAFDPRKASTSIKQYKTTTAGAGIRMSVPVTEYDRVNFGLVAEHLTVNTYNKAPKHYADFIKKYGKTDGTDGSFKGWLYKGTVGWGRNKTDSALWPTRGYLTGVNAEIALPGSKLQYYSATHNQTWFFPLSKTFTLMFGGEVGIAGGYGKTKEIPFFENFYGGGLGSVRGYESGTLGPKVYDEYGEKISYGGNKKANVSAELLFPMPGAKDARTVRLSLFADAGSVWDGKTYDDNSSSATGGRVQNIYGAGNTHKSTFTNELRYSAGGAVTWLSPLGPMKFSYAYPLKKKPEDEIQRFQFQLGTTF

SEQ ID NO: 18538 - protein, 194 aa, Neisseria meningitidis; identical to SEQ ID NO: 6623

SEQ ID NO: 18539 - protein, 135 aa, Neisseria meningitidis; identical to SEQ ID NO: 1686

SEQ ID NO: 18540 - protein, 929 aa, Neisseria meningitidis
MTDYSKTVNLLESPFPMRGNLAKREPAWLKSWYEQKRYQKLREIAKGRPKFILHDGPPYANGDIHIGHAVNKILKDIIIRSKTQAGFDAPYVPGWDCHGLPIEVMVEKLHGKDMPKARFRELCREYAAEQIARQKKDFIRLGVLGDWDNPYLTMDFKTEADTVRMLGEIYKSGYLYRGAKPVQFCLDCGSSLAEAEVEYKDKVSPAIDVGYPFKDTAALAAAFGLAGIEGKAFAVIWTTTPWTLPASQAVSAGADVVYQLIDTPKGKLVLAKDLAEDALKRYGFSDGIAILAETTGDKLENLHMNHPFLERDIPMLNGEHVTTDAGTGLVHTAPAHGLEDYAVCNKYGIELYNPVNAEGKYISETPRVAGMRVWEANSVILQWLEETGNLLASSKIEHSYAHCWRHKTPLIYRATGQWFVGMDKAGADGKTLRDKAIKAVDDTEFFPSWGRARLEAMIEGRPDWVVSRQRYWGTPMTFFVHKETGELHPNSAELLEKVAQRIEEKGIEAWFSLDKGELLSAEDCEHYDKLSDTMDVWFDSGSTHYSVLKQREELDWPADLYLEGSDQHRGWFQSSMLTGCASSMGRAPYKQLLTHGFVVDGEGKKMSKSIGNVVAPQEVYNEFGADILRLWAASTDYSGELAISKEILKRVTESYRRIRNTLSFLFANLSDFNPIEDAVQQADMVEIDRYALVLARRLQERLAGDYYPRYAFHFAVKEMVSFCSEDLGAFYLDILKDRLYTTKADSRARRSAQTALYHITRSLVLLIAPILCFTGEEAWDIIGGGEEDSVLFHTWHEFPTINEKTEAELVKKWTAIREAREAVTAAIEPLRADKTVGSSLQAEAEITAPEEMAGYLNALGEELRFAMLVSKAEVKVGSELAVAAKASDGEKCERCWHYTRDVGAVAGYETVCKRCAENVGGEGETRHYA

SEQ ID NO: 18541 - protein, 84 aa, Neisseria meningitidis; identical to SEQ ID NO: 3171

SEQ ID NO: 18542 - protein, 926 aa, Neisseria meningitidis
MANNKTLFEVIENRKAVYLEDGDDEKYRLPKFVSNNLKYPFFEWQKSALENFVIFDRTSKLKDFPDIKNRPTHLLFNMATGAGKTIMMAALILYYFEKGYRHFLFFVNQNNIVDKTENNFIDPTHAKFLFTEKILQGDTVIPIRKVETFSPHSDGIEIKFTSIQKLYNDIHTERENQTTLADLHELNLVMLGDEAHHLNAQTKGKKQGELDLEVELKANAGNAEIERKGWEHMVLELLLNKNGNPSQNVLLEFTATLPENADVQQKYADKIITKFGLKEFLQKGYTKEINLVSSTLGKKERVLHALLFAWYRHQIALKYGIANFKPVMLFRSKTIDESKADYLAFLNWAENVQAVDFSFLTTFSTSLNDSDSDNANEQGKTRTEQALKFMQEKGVEFAHLADWVKQNYQKHNVIITNSETNKTKTEKTDSETEKLLNNLEAADNPIRAIFTVDRLTEGWDVLNLFDIVRLYEGQNGGGSNKKSGKTAAATVSEKQLIGRGVRYFPFAFEGKQPNKRKFDNDMQHELRILEELFYYTHDEQSRYISELKNELRKDGYLPEKDDDKVLATFKLKSEFAANKDFRELLIWANKKIPNPNAKTNNANSLQANPQTLSFQVHGNQLLQETQFTADENDEKVKQLGTQNNFTQTIKMSEMERHIFNKALHIKGKNSQSLFHFDRLQSKLNIQNRNELQNKLLKDWQIEFLGLGQDKQVCPDDKLAGCLKILEMVEKHLNESDKPFIGTKEFTPKKLWEIFGTPKQKWVKKDDVKTTIATQNDWYVMNNFAGTGLEEALIQFISARLGDLKSQYDIHLIRNEEVFKLNNFANGEGFMPDFILLLKDKQKSSSNGVNDFLHYQIFIEPKGEHLVETDGWKEEFLEAITVEYGMDKILQKDTPHYRLIGLPFFTDHQKNGQFTESFPLGAASLEK

SEQ ID NO: 18543 - protein, 201 aa, Neisseria meningitidis; identical to SEQ ID NO: 2304

SEQ ID NO: 18544 - protein, 525 aa, Neisseria meningitidis
MRANPKTQAMPSETISLMKTRSLISLLCLLLCSCSSWLPPLEERTESRHFNTSKPVRLDNILQIRHTPHTNGLSDIYLLNDPHEAFAARAALIESAEHSLDLQYYIWRNDISGRLLFNLMYLAAERGVRVRLLLDDNNTRGLDDLLLALDSHPNIEVRLFNPFVFRKWRALGYLTDFPRLNRRMHNKSFTADNRATILGGRNIGDEYFKVGEDTVFADLDILATGSVVGEVSHDFDRYWASHSAHNATRIIRSGNIGKGLQALGYNDETSRHALLRYRETVEQSPLYQKIQAGRIDWQSVQTRLISDDPAKGLDRDRRKPPIAGRLQDALKQPEKSVYLVSPYFVPTKSGTDALAKLVQDGIDVTVLTNSLQATDVAAVHSGYVKYRKPLLKAGIKLYELQPNHAVPATKDKGLTGSSVTSLHAKTFIVDGKRIFIGSFNLDPRSARLNTEMGVVIESPKIAEQMERTLADTTPEYAYRVTLDRHNRLQWHDPATRKTYPNEPEAKLWKRIAAKILSLLPIESLL

SEQ ID NO: 18545 - protein, 305 aa, Neisseria meningitidis
MEKAEHLNSSRFVNLVKSGGGSYVEGSYRFDTLSNGISIHGGTVTARCDFCSSRLAEPYVSFVLLLEGSLDFGINRRRFQIDADGGKIVLIAVGEEVLFSRYLYRGGKTVKMTIKGMEQWLLRPEYARFAPLLYREPVRIWNLSPNLRGLAASCLKAVPKGHLGETLRREADVLRLLSDLWDTVSDGIGPAAGQTAEADAMPSEDFNRTLNAAFADGAHQVNRLTDALNISERTLQRRMRDHFGITASEWLHHKQMQHALYLLQNGGKSIGETAYLCGYRHVSSFTQAFRQYFGSTPAETKKENR

SEQ ID NO: 18546 - protein, 240 aa, Neisseria meningitidis
MKPAYFISDLHLSEKQPELTALLLRFLRSSAAGQARTIYILGDLFDFWVGDDEVSELNTSVAREIRKLSDKGVAVFFVRGNRDFLIGQDFCRQAGMTLLPDYSVLDLFGCKTLICHGDTLCTDDKAYQRFRKIVHRKRLQKLFLMLPLKWRTRLAAKIRRVSKMEKQVKPADIMDVNAAFTARQVRAFNAERLIHGHTHREHIHHENGFTRIVLGDWHNDYASILRVDGDGAVFMPLEKC

SEQ ID NO: 18547 - protein, 485 aa, Neisseria meningitidis
LNTLKTDGIYSLPTAVGSSNLPVENTACHIQVIAGTKHGWCRQLGYPAYTSDVYERHQVSSANDNWSAWKKLNSDGIPVGAIVSFPKAVRNPAGYLKANGTTFAQNTFPDLYRALGNSNRLPDLSRTDIGITAWFPSDQIPTGWLAFDDIRTRVTETAYPELYRLLTGKYGSIQNVPQAEDRFIRNAGNSLAVGTKQEDEIKRHVHKVFSHWTNHTDTAAVGYEDRNERQRSALVSTWTDENLNDNGFLTPRPDSKMATGGDENRPKALVLKLCIKAADTLGEAVFWIKSHGETINAGALDAGTLAQGLQDKADRDHTHTAAQIQGLDEKISTAVAAQFTRQTIGGVDIVRFPDGTMIQTGSYRFTRSGGPIENEVVFPVAFADGNVKCFVSERHSERVTGDRRQHNWLFIRAKNHAAAIITNWYEGSCDWMAIGKAASGNAASSPIGPEIPETNEEPQRESGRTSTGPRNRRRHRDGLLEALQD

SEQ ID NO: 18548 - protein, 236 aa, Neisseria meningitidis; identical to SEQ ID NO: 2130

SEQ ID NO: 18549 - protein, 163 aa, Neisseria meningitidis
MFWQLTVVSVTAVIALGTIFINKKTSKQKATLDVILNDYQDAQFVEADNHISPYIRGTAVDDNNARIDLYEIYQNKGGQWEKERGHLLTVINRHEFYACEINSGVLDEDLFKRLHCTNFIKLWNAVSPLVMKIREEERKDTIFRELEILVALWKANPLKASDL

SEQ ID NO: 18550 - protein, 249 aa, Neisseria meningitidis
MKALVAVKRVVDYNVKVRVKADGSDVDIGNVKMSMNPFDEIAVEEAVRLKEAGKVSEIVAVSLGEKKCEETLRTALAMGADRAIHVETDAKLEPLAVAKLLKAVADKENPQIFFLGKQAIDDDANQVAQMLAALLNAAQGTFASKVQIEGDEVQIVREIDGGEETIALKLPAVISADLRLNEPRFVKLPNIMAAKKKPLEKLAPADLATDILPRLKTVKFAEPKARQAGVKVASVAELVEKLKNEAKVI

SEQ ID NO: 18551 - protein, 701 aa, Neisseria meningitidis; identical to SEQ ID NO: 1407

SEQ ID NO: 18552 - protein, 434 aa, Neisseria meningitidis; identical to SEQ ID NO: 2219

SEQ ID NO: 18553 - protein, 183 aa, Neisseria meningitidis
VNYCEFAASLPENTDNPNKHYHDTQYGFPIDSDNGLFERLVLEINQAGLSWTLMLKKRQAFQTAFEGFDINTVAAFDDTDRERLLADAGIVRNRLKIDAAIFNARQIQALQQEYGSFKNWLDAHHPRSKDEWVKLFKKHFKFVGGEIVGEFLMSTGYLKGAHAESCPVYRETLKYHPKWLDAI

SEQ ID NO: 18554 - protein, 451 aa, Neisseria meningitidis; identical to SEQ ID NO: 5920

SEQ ID NO: 18555 - protein, 489 aa, Neisseria meningitidis
MPSETDMFCVGNVSDENGRTKIMKKIQADVVVIGGGTAGMGAFRNARLHSDNVYLIENNVFGTTCARVGCMPSKLLIAAAEARHHALHTDPFGVHLDKDSIVVNGEEVMQRVKSERDRFVGFVVADVEEWPADKRIMGSAKFIDEHTVQIDEHTQITAKSFVIATGSRPVILPQWQSLGNRLIINDDVFSWDTLPKRVAVFGPGVIGLELGQALHRLGVKVEIFGLGGIIGGISDPVVSDEANAVFGEELKLHLDAKTEVKLDADGNVEVHWEQDGEKGVFVAEYMLAAVGRRPNVDNIGLENINIEKDARGVPVADPLTMQTSIPHIFIAGDASNQLPLLHEAADQGKIAGDNAGRYPNIGGGLRRSTIGVVFTSPQIGFVGLKYAQVAAQYQADEFVIGEVSFKNQGRSRVMLVNKGHMRLYAEKATGRFIGAEIVGPAAEHLAHLLAWAHQMKMTVPQMLDMPFYHPVIEEGLRTALRDADAKLKA

SEQ ID NO: 18556 - protein, 87 aa, Neisseria meningitidis; identical to SEQ ID NO: 205

SEQ ID NO: 18557 - protein, 492 aa, Neisseria meningitidis
MKYKDLRDFIAMLEQQGKLKRIAHPVSPHLEMTEIADRVLRAEGPALLFENPIKPDGTRYGYPVLANLFGTPERVAMGMGADSVSKLREIGQTLAYLKEPEPPKGIKDAFSKLPLLKDIWSMAPNVVKNAPCQEIVWEGENVDLYKLPIQHCWPEDVAPLVTWGLTVTRGPHKKRQNLGIYRQQLIGKNKLIMRWLSHRGGALDYQEFRKLNPDTPYPVAVVLGCDPATILGAVTPVPDTLSEYQFAGLLRGSRTELVKCIGNDLQVPARAEIVLEGVIHPNETALEGPYGDHTGYYNEQDYFPVFTVERITMRENPIYHSTYTGKPPDEPAVLGVALNEVFVPLLQKQFPEITDFYLPPEGCSYRMAVVSMKKQYAGHAKRVMMGCWSFLRQFMYTKFIIVVDDDVNVRDWKEVIWAVTTRMDPVRDTVLVENTPIDYLDFASPVSGLGGKMGLDATNKWPGETDREWGSVIKKDPAVTAKIDGIWEELGL

SEQ ID NO: 18558 - protein, 385 aa, Neisseria meningitidis; identical to SEQ ID NO: 6747

SEQ ID NO: 18559 - protein, 275 aa, Neisseria meningitidis; identical to SEQ ID NO: 67

SEQ ID NO: 18560 - protein, 213 aa, Neisseria meningitidis
MKLYIYDHCPFCVRARMAAGLFGADVEEAVLANDDEATPIGMIGAKQVPVLQKEDGSFMGESLDIVRHFDREDRLKDEVRPEIRAWLDKVGGYNDKLVQPRVIKIGLPEFATPEAVKYFTDKKEKSIGSFSANLNKTAQYLERINADLQELENLMDGASDGINGGIGMEDILVFPVLRNLTVVRGIAFPRKTMDYLIGMSEKSGVPLYFDRAL

SEQ ID NO: 18561 - protein, 124 aa, Neisseria meningitidis; identical to SEQ ID NO: 215

SEQ ID NO: 18562 - protein, 65 aa, Neisseria meningitidis; identical to SEQ ID NO: 926

SEQ ID NO: 18563 - protein, 493 aa, Neisseria meningitidis
LATDIPIPDLKRLAGHIAERLDVLAQCESPVYIADILESVLSVIKNVDTGGKRARENFKQILKTEFIYAAAAVLKNKTKWEIPENTRNLDSDIICTYICEVFLKSHLLGNSFPMMRPREVKQMPEPVFDKVLFAEQRARQLEVIRTSKYIFAIAPYYTDDIPFSLRRFLSEDKLYTSYNRYYTAIHIPVRNITQNDALRFANGLKQILSLQSGVSWEIIDMMDRIEENYDKKALPLLFSPFPAQVERTQAIAARLDQFERLLGDTVLDPFYYCLTRMAKGEEDLKYIYIAFRQSFGGIFNSFENFRLLPALWMSRDAENMSDRMNAYISAMEDRRREILSIRQGKPEEEFSRKMVVCLIDLENCLEKHLEQFKPVSESIEACTAKLQEQPSFFNRLMKTNDKLNRQIDVLQKQSAAIHNEAYIEMNTLLYRHREVVSVHNRKADYAEKGKEQIALFPRGLNGITKLPAAVLLPERPYHFDMKEVLHIFSWIPR

SEQ ID NO: 18564 - protein, 125 aa, Neisseria meningitidis; identical to SEQ ID NO: 17297

SEQ ID NO: 18565 - protein, 311 aa, Neisseria meningitidis
MGHNMMTTQKWYEHITNVIIGNTANFNSGCLDSIDYVDERKGVPLAAMQHIFMDVRAAASHAYLFEHDLKKFKQYAYVAGKLGVLLSVNSTDPEPFFFPCDMLNIQNPMFLMLMSDSPQLREFLVRNIDNIANDTEAFINRYDLNRHMIYNTLLMVEGKQLDRLKQRSEKVLAHPTPSKWLQKRLYDYRFFLAFAEQDAEAMKAALEPLFDKKTARMAAKETLSYFDFYLQPQIVTYAKIASMHGFDLGIDQEIAPRDLTVYDPLPADEYQDIFDFMKQYDLSYPYEYLQDWIDYYTFKTDKLVFGNAKRE

SEQ ID NO: 18566 - protein, 215 aa, Neisseria meningitidis; identical to SEQ ID NO: 1509

SEQ ID NO: 18567 - protein, 447 aa, Neisseria meningitidis
MEDKQGMTKAVAGVMTDAPADGRKPATASNLPPLSNRGGTETETAGRVQEVFECYETYITDGKGNLLGVPLRRGVSDSAFIDQISFSFHEKPFFDKYGVRVSLLEDEDFIRAASMLAEEVFGFGIYKESKGSGGRFYERCWLMGSEDVLYGRVHFGGQNNTILFELTGTGCGVAKEGWESRLFAFLTNAIRPKITRVDIAKDFFNGEYSPNQAREDRNKGMFTCHHVKPKGECLGSDWEEDDEAKMTKGKTYGIGSRESSKYVRVYEKGKQLGDKTSTWTRFEIEFKAKDIVIPFEVLQNPGEYFGGAYPICERFVQKATRIHAVKEDKVISADRYLEWVKKQFGRAANGLKFIFPELDKAKLFELIEPSHHKLPKSLAPEAYDCAFLKAQAIHEQPAFKPYNDPYYMYEYYENLEKQLEQQKHVNNEESYNNFIYDKFARLPISWA

SEQ ID NO: 18568 - protein, 129 aa, Neisseria meningitidis; identical to SEQ ID NO: 322

SEQ ID NO: 18569 - protein, 377 aa, Neisseria meningitidis
MFKKFKPVLLSFFALVFAFWLGTGIAYEINPRWFLSDTATEIPENPNAFVAKLARLFRNADRAVVIVKESIRTEESLAETVDDGPLQSEKDYLALAIRLSRLKEKAKWFHVTEQEHGEEVWLDYYIGEGGLVAVSLLQRSPEAFVNAEYLYRNDRPFSVNVYGGTAHGENYETTGEYRVVWQPDGSVFDAAGRGKIGEDVYEHCLGCYQMAQVYLAKYRDVANDEQKVWDFREESNRIASDSRNSVFYQNMRELMPRGMKANSLVVGYDADGLPQKVYWSFDNGKKRQSFEYYLKNGNLFIAQSSTVALKADGVTADIQTYHAQQTWYLDGGRIVREEKQGDRLPDFPLNLENLEKEVSRYTEAAARRSGGRRGLSY

SEQ ID NO: 18570 - protein, 100 aa, Neisseria meningitidis; identical to SEQ ID NO: 3450

SEQ ID NO: 18571 - protein, 89 aa, Neisseria meningitidis; identical to SEQ ID NO: 9425

SEQ ID NO: 18572 - protein, 83 aa, Neisseria meningitidis; identical to SEQ ID NO: 1057

SEQ ID NO: 18573 - protein, 212 aa, Neisseria meningitidis
MQIAIIDYGMGNLHSVLKSVWTAGQLAGKNTEIFLSGDPERVSRADKVIFPGQGAMPDCIAALTRGGLDEAVKDALKNKPFFGICVGAQLLFDHSEEGNTDGLGWFGGKVRRFERDLRDRQGCRLKVPHMGWNTVRQTQNHPLFKDIPQNTRFYFVHSYYFDPENPETILGESDYPSPFACIVGKDNVFATQFHTEKSHDAGLTMLKNFLNW

SEQ ID NO: 18574 - protein, 472 aa, Neisseria meningitidis; identical to SEQ ID NO: 12055

SEQ ID NO: 18575 - protein, 417 aa, Neisseria meningitidis; identical to SEQ ID NO: 4662

SEQ ID NO: 18576 - protein, 461 aa, Neisseria meningitidis; identical to SEQ ID NO: 8177

SEQ ID NO: 18577 - protein, 524 aa, Neisseria meningitidis; identical to SEQ ID NO: 2756

SEQ ID NO: 18578 - protein, 412 aa, Neisseria meningitidis; identical to SEQ ID NO: 2406

SEQ ID NO: 18579 - protein, 123 aa, Neisseria meningitidis; identical to SEQ ID NO: 616

SEQ ID NO: 18580 - protein, 205 aa, Neisseria meningitidis
MSHKKQDAFQGLIDALKVLPNVGPKSAQRIAYHLLQHKRKEAEKLVDALQTALKQVHHCAMCNTFCEGGLCDICADETRDGRRLMVVHMPADVSNMEVANCHDGLYFVLMGQINTALGMDVSAIALDRLAQRLGGGEVEEIIIATAFTAEGNATAYVLSEFFKNLPYKVSRLSQGIPLGGELEYVDAGTLAQAVYERRLIKEGGA

SEQ ID NO: 18581 - protein, 245 aa, Neisseria meningitidis; identical to SEQ ID NO: 3123

SEQ ID NO: 18582 - protein, 270 aa, Neisseria meningitidis
VPSETVSDGTDKPPPLNPAVLACIIRHSIRNSQQVSNMSLKTVAVIGAMEQEIELLREMMENVKAVSFGKFAAYEGELAGKRMVLALSGIGKVNAAVATAWLIHQFAPDCVINTGSAGGLGKGLKVGDVVVGTEIAHHDVDVTAFGYVWGQVPQLPAVFVSDGLLVGKAKQAAEVFEGAAVEQGLIVSGDRFVHSSEGVAEIRKHFPKVKAVEMEAAAIAQTCHQLETPFVIIRAVSDSADEKADISFDEFLKTAAASSAKMVAEIVKSL

SEQ ID NO: 18583 - protein, 329 aa, Neisseria meningitidis; identical to SEQ ID NO: 247

SEQ ID NO: 18584 - protein, 409 aa, Neisseria meningitidis; identical to SEQ ID NO: 2282

SEQ ID NO: 18585 - protein, 706 aa, Neisseria meningitidis
MRRFLPIAAICAVVLLYGLTAATGSTSSLADYFWWIVAFSAMLLLVLSAVLARYVILLLKDRRDGVFGSQIAKRLSGMFTLVAVLPGVFLFGVSAQFINGTINSWFGNDTHEALERSLNLSKSALNLAADNALGNAVPVQIDLIGAASLPGDMGRVLEHYAGSGFAQLALYNAASGKIEKSINPHKLDQPFPGKARWEKIQRAGSVRDLESIGGVLYAQGWLSAGTHNGRDYALFFRQPVPKGVAEDAVLIEKARAKYAELSYSKKGLQTFFLATLLIASLLSIFLALVMALYFARRFVEPVLSLAEGAKAVAQGDFSQTRPVLRNDEFGRLTKLFNHMTEQLSIAKEADERNRRREEAARHYLECVLEGLTTGVVVFDEQGCLKTFNKAAEQILGMPLTPLWGSSRHGWHGVSAQQSLLAEVFAAIGAAAGTDKPVHVKYAAPDDAKILLGKATILPEDNGNGVVMVIDDITVLIHAQKEAAWGEVAKRLAHEIRNPLTPIQLSAERLAWKLGGKLDEQDAQILTRSTDTIVKQVAALKEMVEAFRNYARSPSLKLENQDLNALIGDVLALYEAGPCRFAAELAGEPLMVAADTTAMRQVLHNIFKNAAEAAEEADVPEVRVKSEVGRDGRIVLTVCDNGKGFGREMLHNAFEPYVTDKPAGTGLGLPVVKKIIEEHGGRISLSNQDAGGACVRIILPKTVKTYA

SEQ ID NO: 18586 - protein, 64 aa, Neisseria meningitidis; identical to SEQ ID NO: 2003

SEQ ID NO: 18587 - protein, 145 aa, Neisseria meningitidis
MPVKKVEKNILVLHGADKMFELVDKVEDYPHFLPWYSKTEVIGRSGNELKARLFMDYMHVRQSFATHNRNIPGREIRMELLEGPFKTLRGTWKFIDLGDDMCKIEFNLEYDFSNAVLSALISPVFNHLSTTLVEAFVKEADRRYA

SEQ ID NO: 18588 - protein, 53 aa, Neisseria meningitidis
MAYFGGFVRTLFDLGVFERGGVKGREKWFSRVWRRSEVLCLMCGGIFSVKLIL

SEQ ID NO: 18589 - protein, 297 aa, Neisseria meningitidis
MVTFSKIRPLLAIAAAALLAACGTAGNNAARKPVQTAKPAAVVGLALGGGASKGFAHVGIIKVLKENGIPVKVVTGTSAGSIVGSLFASGMSPDRLELEAEILGKTDLVDLTLSTSGFIKGEKLQNYINRKVGGRRIQQFPIKFAAVATDFETGKAVAFNQGNAGQAVRASAAIPNVFQPVIIGRHTYVDGGLSQPVPVSAARRQGANFVIAVDISARPGKNISQGFFSYFDQTLNVMSVSALQNELGQADVVIKPQVLDLGAVGGFDQKKRAIRLGEEAARAALPEIKRKLAAYRY

SEQ ID NO: 18590 - protein, 665 aa, Neisseria meningitidis
MKKITPQNLRPLLSESLGHTDFVNVLNALIKFLRRGGKKCAGERFDLIIDTFKQDRELLSRFSRCFYIWLAQIHIYPALIKLGIFSRHSFAREMGIRIYERFSPSYKDFANLGEVFLYLFHSENDDKWLQTLNIRQWLVLYELIRSHAEPSKLQTAGIRLADARLRAIEMLSVWTASEAIEPDLIRIAPRLLEADSSFVALQRETAKLVEHYRNGTAPYDTAHLEVMFDQCFSQIDYLRRKGTGAGSGSSVKVAHLLERLRQTVGRLKLLTDIQTGVGNSNRLTIALMNSLIYAAVEQYSTRHLRRSSIRMLARSITENKSHHGEHYITRNRKEYFKMFYSAAGGGIIIALMALLKIRIGSLGLSPFLTSLSAGFNYGIGFMIIHMLHCTVATKQPAMTAASFAEQVDLNEGGKAVDNKLAKLLIDVCRSQSVAVFGNVSIAILLACAISFGYAHLYRLPILDAHTAAYQFKSIDIIAYPTLWYAAIAGLWLFCSGIIAGFFDNRADYLNLRQRLPFNPLLRKIMRPGPRRVLAAYIHKHYGSLVGNFIFGMLLGMTGYFGHLLGLPLDIRHVAFSSANLGYAAVSGNVGLGTFVLGIFSVLTIGLVNLCVSFSLALFVALRSRGTKIGSIRNLIKSFWNQIKSNPCILFLPPAKEQGHPPSDKP

SEQ ID NO: 18591 - protein, 277 aa, Neisseria meningitidis
MAIVKMKPTSAGRRGMVRVVTEGLHKGAPYAPLLEKKNSTAGRNNNGHITTRHKGGGHKHHYRVVDFKRNKDGIPAKVERIEYDPNRTAFIALLCYADGERRYIIAPRGIQVGAVLVSGAEAAIKVGNTLPIRNIPVGTTIHCIEMKPGKGAQIARSAGASAVLLAKEGAYAQVRLRSGEVRKINVDCRATIGEVGNEEQSLKKIGKAGANRWRGIRPTVRGVVMNPVDHPHGGGEGRTGEAREPVSPWGTPAKGYRTRNNKRTDNMIVRRRYSNKG

SEQ ID NO: 18592 - protein, 355 aa, Neisseria meningitidis
MSTFFQQTAQAMIAKHIDRFPLLKLDRVIDWQPIEQYLNRQRTRYLRDHRGRPAYPLLSMFKAVLLGQWHSLSDPELEHSLITRIDFNLFCRFDELSIPDYSTLCRYRNWLAQDDTLSELLKLINRQLTEKGLKIEKASAAVVDATIIQTAGSKQRQTIEVDEEGQVSGQTTPSKDSDARWIKKNGLYKLGYKQHARTDAEGYIEKLHITPANAHECKHLSPLLEGLPKGTTVYADKGYDSAENRQHLEERQLLDGIMRKACRNRPLTETQTKRNRYLSKTRYVVEQSFGTLHRKFRYARSTYFGLIKVSAQSHLKAMCLNLLKAANRLSAPAAAQKATGCLIIGYPGRIKGVFG

SEQ ID NO: 18593 - protein, 168 aa, Neisseria meningitidis
MNTLQKGFTLIELMIVIAIVGILAAVALPAYQDYTARAQVSEAILLAEGQKSAVTEYYLNHGEWPGNNSDAGVASSTDIKGKYVQSVEVKNGVVTATMASSNVNNEIKGKKLSLWAKRQAGSVKWFCGQPVTRANTATDAAITADTDTNGKIDTKHLPSTCRDAASAG

SEQ ID NO: 18594 - protein, 133 aa, Neisseria meningitidis
MKDKHDSSAMRLDKWLWAARFFKTRSLAQKHIELGRVQVNGSKVKNSKTIDIGDIIDLTLNSLPYKIKVKGLNHQRRPASEARLLYEEDAKTAALREERKQLDQFSRITSAHPDGRPTKRDRRQLDRLKKGDW

SEQ ID NO: 18595 - protein, 757 aa, Neisseria meningitidis
MNITQILSQELSATAAQITAAVELLDDGATVPFIARYRKEATGGLDDTQLRRLAERLQYLRELEERKAVVLKSIEEQGKLSDGLRAQIEAADNKTALEDLYLPYKPKRRTKAQIAREHGLQPLADVLLAEQSQDVEAAAQGYLNENVPDAKAALDGARAILMEQFAEDAELIGTLRDKLWNEAEIHAQVVGGKETEGEKFSDYFDHREPIRAMPSHRALAVLRGRNEGVLNIALKYQPDDTPITQQSEYEQIIARRFKVSDGHKWLRDTVRLTWRAKIFLSLELEALNRLKEAADTDAITVFARNLKDLLLAAPAGRLTTLGLDPGYRNGVKCAVVDDTGKLLDTVIVYLHQENNMLATLSRLIKQHGVKLIAIGNGTASRETDKIAGELVRGMPEMGLHKIVVSEAGASIYSASELAAREFPDLDVSLRGAVSIARRLQDPLAELVKIDPKSIGVGQYQHDVNQSQLAKSLDAVVEDCVNAVGVDVNTASAPLLARISGLNQTLAQNIVAYRNENGAFDSRKKLLKVPRLGEKTFEQAAGFLRINGGTEPLDASAVHPEAYPVVAKMLAQQGISAAELIGNRERVKQIKASDFTDERFGLPTILDILSELEKPGRDPRGAFQTASFAEGIHEIGDLQVGMILEGVVSNVANFGAFVDIGVHQDGLVHISALSNKFVQDPREVVKAGDVVKVKVLEVDAARKRIALTMRLDDEPGGAKHKMPSENRSRERTAGRKPQRNDRAPANSAMADAFAKLKR

SEQ ID NO: 18596 - protein, 138 aa, Neisseria meningitidis; identical to SEQ ID NO: 6327

SEQ ID NO: 18597 - protein, 121 aa, Neisseria meningitidis; identical to SEQ ID NO: 5618

SEQ ID NO: 18598 - protein, 214 aa, Neisseria meningitidis
VTRPAKINTYTRIIDASLALFNEEGERNISTNHIAAHLGISPGNLYYHFRNKDEIIVQLFKRYSEALLEYLNEAVLPSDVEDSINYMAGIYDVMWEYRFLFSDVNTLLARSAELLGEHNTFTQAKVSPLLVNLLTQLNGLNIIQADQTAMNDLAVNMWMVTKYWFDFDSSLRGRTKLTEDSKARGIRRTLSLLRPYLLPEHREKYDRKIGNGNP

SEQ ID NO: 18599 - protein, 303 aa, Neisseria meningitidis; identical to SEQ ID NO: 3216

SEQ ID NO: 18600 - protein, 318 aa, Neisseria meningitidis
MILTPPDTPFFLRNGNADTIAAKFLQRPAPTYRRELLPDSTGKTKVAYDFSDGISPDAPLVVLFHGLEGSSRSHYAVELMLAVRSRGWHGAVVHFRSCGGIANTAPVFYHLGDTAEIAFTLDTLAARYREIYAVGVSLGGNALAKYLGEQGENALPQAAAVISAPVDAEAAGRRFDSGITRLLYTRYFLRTLIPKARTVPGFQTAFAAGCKTLGEFDDRFTAPLHGFADRHDYYRRTSCKPLLKHVAKPLLLLNAANDPFLPPEALPRTDEVSEAVTLFQPAHGGHVGFVGSTGGRLHLQWLPQTVLSYFDSFRTNSR

SEQ ID NO: 18601 - protein, 306 aa, Neisseria meningitidis
MRIRLGRHNAPDFPHGAAVTIGNFDGVHLGHKHILQKLRLEADTRGLPVVTVVFEPQPKEFFALRTGRMPPCRISPLRTKLELLEGTGCVDAVWVLRFDQNFSEISAQGFIDRLLRQTLNTRYLLVGDDFRFGAGREGCFELLAQQPDMQTERTPSVIVEDIRTSSTAVRQALSDGNLAYAKKLLGHDYVLSGRVVHGRKLGRTLNAPTANIRLPGHRYALGGVFVVEADGAFGTRRGVASFGFNPTVDSGCSQKLEVHLFDFQGDLYGQRLNVRFLHKLRDEEKFDGMEELKRQIAADMEAAKCW

SEQ ID NO: 18602 - protein, 365 aa, Neisseria meningitidis
LPHAVFLHYNPLDYPAKRTKGIRHNNLPPFRRHKPFRNEQTMDTLTRFLPEHLQQNQLPEALGGVLLSVVSACTEINAKVRLGALAGVLGMAGTGNIQGEDQKKLDVIANNIMIDTLKANPAVAGLASEEEDSFVSAGENGRYLVLFDPLDGSSNIDVNISVGTIFSILEKPEGALATESFLQTGRQQLAAGYILYGPQTQLVFTFGHGVYMFTLNAENEFVLTKEKPKVPESTKEFAINMSNRRHWLPPVQQYIDELLAGETGTRGKNYNMRWVASMVAEIHRILMRGGVFMYPQDKRDPSKPGKLRLMYEANPMSLILEQAGASASNAYQAMLDIQPENLHQRVAVFMGSSEEVAYLDRLHAK

SEQ ID NO: 18603 - protein, 309 aa, Neisseria meningitidis; identical to SEQ ID NO: 568

SEQ ID NO: 18604 - protein, 262 aa, Neisseria meningitidis
MKQSMKNWFAALLLAVPMGAAFASGGHAHYEKVDIDLRDQVSLQRGAQIFTNYCLSCHSASGMRFNRLKDIGLTDEEIKKNLMFTTDNVGDVMHSAMNPKDAAKWFGAAPPDLTLIARSKGADYLYAYMRGFYKDPTRPSGWNNTVFDKVGMPHPLWEQQGVQAVELDAKGQPVMVKDEHGEMKPKLYWESTGLHSRRLPNGKVIQKEYDAYVRDLVNYLVYMGEPAQLQRKRIGYVVMIFLFAVMLPLAYFLKKEYWKDVH

SEQ ID NO: 18605 - protein, 349 aa, Neisseria meningitidis; identical to SEQ ID NO: 18430

SEQ ID NO: 18606 - protein, 135 aa, Neisseria meningitidis
MKRQAFFKLMACAAFLSAVSLRLPVLGACYAILSLYAFALYGIDKRRAVRGKRRIPEHRLLLPALFGGWAGAYLGSRIFRHKTAKKRFVVLFRLTVSGNVLATLILIYSGLNLNQYGVASPCRTICTVCGFVALS

SEQ ID NO: 18607 - protein, 160 aa, Neisseria meningitidis
MKYLNLAAITLAATFAAHTASADELAGWKDNTPQSLQSLKAPVRIVNLWATWCGPCRKEMPAMSKWYKAQKKGSVDMVGIALDTSDNIGNFLKQTPVSYPIWRYTGANSRNFMKSYGNNVGVLPFTVVEAPKCGYKQTITGEVNEKSLTEAVKLAHSKCR

SEQ ID NO: 18608 - protein, 518 aa, Neisseria meningitidis; identical to SEQ ID NO: 672

SEQ ID NO: 18609 - protein, 426 aa, Neisseria meningitidis
MENSLKEAALKFHELPVPGKISVTPTKSLATDKDLALAYSPGVAAPCMEIHADPQNAYKYTAKGNLVAVISNGTAVLGLGDIGALAGKPVMEGKGVLFKKFAGVDVFDIEIDEKDPQKLVDIIAALEPTFGGINLEDIKAPECFYIERELRKRCKIPVFHDDQHGTAIITAAAVLNALRFTGRKIEEATLVCSGAGAAAIACLNQLLDLGLKRENVTVCDSKGVIYQTREDKDRMDESKKFYAVEDNGQRVLADAVKGKDIFLGLSGANLLTPEMLNTMNEKPIVFAMANPNPEILPLLAKETRPDVVIGTGRSDFPNQVNNVLCFPFIFRGALDVGATTINEEMKRSCVYALADLAMEEVTEEVVAAYGKKFEFGAEYLIPTPFDSRLLPRVATAAAKAAMESGVATRPIADFEAYAAKLGEWKL

SEQ ID NO: 18610 - protein, 169 aa, Neisseria meningitidis
MDILLKYWKPVGVLLLIVLIFTAWHFDRAEKYRMGREAAAAEISNRLKDGYIEQAKQARSAEQKAAAAFAERQTKLEEEKQNAEKTVAAMRLELNRLRHYAAAQNRSRNLPATTTAATASDGASDSQGWLLFGQCAEKYAGLAETADGHAADLREWQAYGHAVSSQRAE

SEQ ID NO: 18611 - protein, 288 aa, Neisseria meningitidis; identical to SEQ ID NO: 2832

SEQ ID NO: 18612 - protein, 462 aa, Neisseria meningitidis
LGCIVCSDGIVCRLKFLPFAAGANRMTGGFLKISEVLVKVGDGVHTLLLDRQIVRDGRKFDAPLLWMVVLMTAFSLLMIYSASVYLASKEGGDQFFYLTRQAGFVVAGLIASGFLWFLCRMRTWRRLVPWIFALSGLLLVVVLIAGREINGATRWIPLGPLNFQPTELFKLAVILYLASLFTRREEVLRSMESLGWQSIWRGTANLIMSATNPQARRETLEMYGRFRAIILPIMLVAFGLVLIMVQPDFGSFVVITVIAVGMLFLAGLPWKYFFVLVGSVLGGMVLMITAAPYRVQRVVAFLDPWKDPQGAGYQLTHSLMAIGRGEWFGMGLGASLSKRGFLPEAHTDFIFAIIAEEFGFFGMCVLIFCYGWLVVRAFSIGKQSRDLGLTFNAYIASGIGIWIGIQSFFNIGVNIGALPTKGLTLPLMSYGGSSVFFMLISMMLLLRIDYENRRKMRGYRVE

SEQ ID NO: 18613 - protein, 94 aa, Neisseria meningitidis; identical to SEQ ID NO: 1124

SEQ ID NO: 18614 - protein, 270 aa, Neisseria meningitidis
MSVGHYENFPVGSLILPRRLRKPVHAVYAFARTADDMADEGSMPSEARLAGLEGLRRELDVLASGGRSAHPLIARLDAEAVVPFGLDLQPFYDLLSAFSQDVVKTRYGNFGELADYCRRSANPVGRIMLALYGKTDAVCVAQSDGICTALQLVNFWQDVAVDWQKGRVYIPQDDLLKFGVSEGQIAEGRADAAFQRLMAYECRRAFRMLKAGSPLARELKGRIGLELRMIVLGAQLILQKLDACRYDVFAQRPVLDKKDWLIMLKRALWK

SEQ ID NO: 18615 - protein, 791 aa, Neisseria meningitidis
MNKNIKSLNLREKDPFLSREKQRYEHPLPSREWIIELLERKGVPSKIEALVRELSIKEEEYEFFERRLKAMARDGQVLINRRGAVCAADKLDLVKCRVEAHKDGFGFAVPLTPAKDGDFVLYERQMRGIMHGDIVTVRPAGMDRRGRREGTVLDIVERAQSKVVGRFYMDRGVAILEPEDKRLNQSIVLEPDGVARFKPESGQVIVGEIEVYPEQNRPAVAKIIEVLGDYADSGMEIEIAVRKHHLPHQFSEACAKAAKKIPDHVRKSDLKGRVDLRDLPLVTIDGETARDFDDAVFAEKIGRNYRLVVAIADVSHYVRPDDAIDTDAQERSTSVYFPRRVIPMLPENLSNGICSLNPNVERLCMVCDMVITYAGNIKEYRFYPAVMRSHARLTYNQVWKWLLDGIGHPFKAQIDTLYKLFKILQKKRFERGAVEFDSIETQMLFDDNGKIEKIVPVVRNDAHKLIEECMLAANVCAADFLLKNKHTALFRNHLGPTPEKLAALREQLGLLGLQLGGGDNPSPKDYAALAGQFKGRPDAELLQVMMLRSMQQAVYEPHCDGHFGLAYEAYAHFTSPIRRYPDLTVHRAIKAVLNQQTYTPKKSWQALGVHTSFCERRADDASRDVENWLKTYYMRDKVGEVFEGKISGMTSFGIFVTLDGIHIDGLVHISDLGEDYFNFRPEIMAIEGERSGIRFNMGDRVAVRVARADLDDGKIDFVLIAEGSGRGRKVKSSASAKPAGTAGKGKPKTAAEKKTARGGKVRGRGASAAAESGKKAKKPVPIKVKKRKGKS

SEQ ID NO: 18616 - protein, 289 aa, Neisseria meningitidis; identical to SEQ ID NO: 10050

SEQ ID NO: 18617 - protein, 157 aa, Neisseria meningitidis; identical to SEQ ID NO: 7285

SEQ ID NO: 18618 - protein, 299 aa, Neisseria meningitidis; identical to SEQ ID NO: 167

SEQ ID NO: 18619 - protein, 160 aa, Neisseria meningitidis; identical to SEQ ID NO: 1608

SEQ ID NO: 18620 - protein, 436 aa, Neisseria meningitidis; identical to SEQ ID NO: 1523

SEQ ID NO: 18621 - protein, 508 aa, Neisseria meningitidis; identical to SEQ ID NO: 8621

SEQ ID NO: 18622 - protein, 482 aa, Neisseria meningitidis
MKGDIGVIGLAVMGQNLILNMNDCGFKVVAYNRTIGKVDEFLNGAAKGTDIIGAYSLQDLVDKLANPRKIMMMVRAGSVVDGFIEQLLPLLEEGDIIIDGGNANYPDTTRRTHYLAEKGILFVGAGVSGGEEGARRGPSIMPGGDKRAWEAVKPIFQAIAAKTPQGEPCCDWVGRDGAGHFVKMVHNGIEYGDMQLICEAYQFMKDGLGLSYDEMHRVFAEWNKTELDSYLIEITAAILGYKDEGGEPLVEKILDTAGQKGTGKWTGINALDLGIPLTLISEAVFARCVSSFKEQRVQTGKLFARTVTPVEGGKQEWVEALRQALLASKIISYAQGFMLIREAGESYGWDLDYGNTALLWREGCIIRSAFLSNIRDAYENNPDLVFLGADPYFKNILENCLPTWRKVVAKAVECGIPMPCMASAITFLDGYTTERLPANLLQAQRDYFGAHTYERTDKPRGEFFHTNWTGKGGDTASTTYDI

SEQ ID NO: 18623 - protein, 1389 aa, Neisseria meningitidis
MTDTAPTDTDPTENGTRKMPSEHRPTPPAKKRRPLLKLSAALLSVLILAVCFLGWLAGTEAGLRFGLYQIPSWFGVNISSQNLKGTLLDGFDGDNWSIETEGADLKISRFRFAWKPSELMRRSLHITEISAGDIAIVTKPTPPKEERPPLSLPDSIDLPAAVYLDRFETGKISMGKAFDKQTVYLERLDASYRYDRKGHRLDLKAADTPWSSSSGSASVGLKKPFALDTAIYTKGGLEGKTIHSTARLSGSLKDVRAELAIDGGNIRLSGKSVIHPFAESLDKTLEEVLVKGFNINPAAFVPSLPDAGLNFDLTAIPSFSDGIALEGSLDLENTKAGFADRNGIPVRQVLGGFVIRQDGTVHIGNTSAALLGRGGIRLSGKIDTEKDILDLNIGINSVGAEDVLQTAFKGRLDGSIGIGGTTASPKISWQLGIGTARTDGSLAIASDPANGQRKLVLDTVNIAAGQGSLTAQGYLELFKDRLLKLDIRSRAFDPSRINPQLPAGNINGSINLAGELAKEKFTGKMRFLPGTFNGVPIAGSADIVYESRHLPRAAVDLRLGRNIIKTDGGFGKKGDRLNLNITAPDLSRFGFGLAGSLNVRGHLSGDLDGGIRTFETDLSGAARNLHIGKAADIRSLDFTLKGSPDTSRPIRADIKGSRLSLSGGAAVVDTADLMLDGTGVQHRIRTHAAMTLDGKPFKFDLDASGGINRELTLWKGSIGILDIGGAFNLKLQNRMTLEAGAERVAASAANWQAMGGSLNLQHFSWDRKTGISAKGGARGLHIAELHNFFKPPFEHNLVLNGDWDVAYGRNARGYLNINRQSGDAVLPGGQALGLNAFSLKTRFQNDRIGILLDGGARFGRINADLDIGNAFGGNMANAPLGGRITASLPDLGTLKPFLPAAAQNITGSLNAAAQIGGRVGSPSVNAAVNGSSNYGKINGNITVGQSRSFDTAPLGGRLNLTVADAEVFRNFLPVGQTVKGSLNAAVTLGGSIADPHLGGSINGDKLYYRNQTQGIILDNGSLRSHIAGRKWVIDSLKFRHEGTAELSGTVGMENSGPDVDIGAVFDKYRILSRPNRRLTVSGNTRLRYSPQKGISVTGMIKTDQGLFGSQKSSMPSVGDDVVVLGEVKKEAAAPLPVNMNLTLDLNDGIRFAGYGADVTIGGKLTLTAQSGGSVRGVGTVRVIKGRYKAYGQDLDITKGTVSFVGPLNDPNLNIRAERRLSPVGAGVEILGSLNSPRITLTANEPMSEKDKLSWLILNRAGSGSSGDNAALSAAAGALLAGQINDRIGLVDDLGFTSKRSRNAQTGELNPAEQVLTVGKQLTGKLYIGYEYSISSVEQSVKLIYRLTRAIQAVARIGSRSSGGELTYTIRFDRFSGSDKKDSAGNGKGK

SEQ ID NO: 18624 - protein, 475 aa, Neisseria meningitidis
MFFSALKSFLSRYITVWRNVWAVRDQLKPPKRTAEEQAFLPAHLELTDTPVSAAPKWAARFIMAFALLALLWSWFGKIDIVAAASGKTVSGGRSKTIQPLETAVVKAVHVRDGQHVKQGETLAELEAVGTDSDVVQSEQALQAAQLSKLRYEAVLAALESRTVPHIDMAQARSLGLSDADVQSVQVLAQHQYQAWAAQDAQLQSALRGHQAELQSAKAQEQKLVSVGAIEQQKTADYRRLRADNFISEHAFLEQQSKSVSNWNDLESTRGQMRQIQAAIAQAEQNRVLNTQNLKRDTLDALRQANEQIDQYRGQTDKAKQRQQLMTIQSPADGTVQELATYTVGGVVQAAQKMMVIAPDDDKMDVEVLVLNKDIGFVEQGQDAVVKIESFPYTRYGYLTGKVKSVSHDAVSHEQLGLVYTAVVSLDKHTLNIDGKAVNLTAGMNVTAEIKTGKRRVLDYLLSPLQTKLDESFRER

SEQ ID NO: 18625 - protein, 161 aa, Neisseria meningitidis
MFVNEKDPYAALFAGLVFLTLPFALAVHDAFALAFGRAGLLVSVSDGGFGWRGGWDGVVWFVFGMFAFLNVVVSAGLTKLAYKKMMRRHSRYALFLSGVAACAAAAVAWIFELLLGSAALGGLRGEAVSEYAFAVWLVSMLTLPKRLTRAPVQPVVFHRKK

SEQ ID NO: 18626 - protein, 942 aa, Neisseria meningitidis
MMDEKLNFSYLFGSNAPYIEELYEAFLENPDAVDEKWKQYFTDLSKQPGTVAVDVAHTPIRESFVTLAKKKIASAVVGGADEAMLKKQVSVLRLISAYRIQGVGAAQLDPLKRIPPRDIEALDPKFHGLSDTDMALQFNMGEGDFANRGKLPLSQIISNLKQTYCGHIALEYIYIPNTEERRWVRNYFESVLSTPHYNADQKRRILKEMTAAETLERYLHTKYVGQKRFGVEGGESAIAGLNYLIQNASKDGVEEVIIGMAHRGRLNVLVNILGKKPGDLFAEFEGRAEIKLPSGDVKYHMGFSSDIATPHGPMHVSLAFNPSHLEIVNPVVEGSARAKQKRLGENGRDKVLPVLIHGDSAFIGLGVNQATFNLSKTRGYTTGGTVHIVINNQIGFTTSDIRDTRSTVHCTDIAKMVSAPVIHVNGDDPERVCFAIQAALDYRKKFHKDIVIDVVCYRKWGHNEGDDPTLTQPMMYKKVSQHPGARALYTEQLIAEGVVTQAEADGYIQAYRDALDKGEHVEQTTLSNFQRTQIDWSKYQGKDWREHIETGLPAADIERLTEKFTAVPEGFALHPTAKRVIEARKAMASGKQAIDWGMAETLAYASLVTKGHGVRISGEDSGRGTFSHRHAVLHDQKREKWDDGTYVPLRHMGEGMGEFLVIDSILNEEAVMAFEYGFACSAPDKLTIWEAQFGDFANGAQVTIDQFLSSGETKWGRLCGLTTILPHGYDGQGPEHSSARVERWLQLCSENNMQVIMPSEASQMFHLLQRQVLGSYRKPLVIFMSKRLLRFKGAMSPLENFTEGSTFRPVIGDTAERASNGSVKRVVLCAGQVYYDLEAGRTERKLEDDVAIVRVEQLYPFPYEEVKAELAKYPNAKSVVWAQEEPKNQGAFYQIRHRIEDVISEEQKLSYAGRPSSASPAVGYSSKHIAQLKQLVEDALAL

SEQ ID NO: 18627 - protein, 163 aa, Neisseria meningitidis; identical to SEQ ID NO: 684

SEQ ID NO: 18628 - protein, 348 aa, Neisseria meningitidis
MPSEAFRRHRAYRENKLQPLVSVLICAYNVEKYFAQSLAAVVNQTWRNLDILIVDDGSTDGTLAIARRFQEQDGRIRILAQPRNSGLIPSLNIGLDELAKSGMGEYIARTDADDIAAPDWIEKIVGEMEKDRSIIAMGAWLEVLSEEKDGNRLARHHRHGKIWKKPTRHEDIADFFPFGNPIHNNTMIMRRSVIDGGLRYNTERDWAEDYQFWYDVSKLGRLAYYPEALVKYRLHANQVSSKYSIRQHEIAQGIQKTARNDFLQSMGFKTRFDSLEYRQIKAVAYELLEKHLPEEDFERARRFLYQCFKRTDTPPAGAWLDFAADGRMRRLFTLRQYFGILHRLLKNR

SEQ ID NO: 18629 - protein, 169 aa, Neisseria meningitidis; identical to SEQ ID NO: 219

SEQ ID NO: 18630 - protein, 365 aa, Neisseria meningitidis; identical to SEQ ID NO: 1845

SEQ ID NO: 18631 - protein, 185 aa, Neisseria meningitidis; identical to SEQ ID NO: 18260

SEQ ID NO: 18632 - protein, 95 aa, Neisseria meningitidis; identical to SEQ ID NO: 738

SEQ ID NO: 18633 - protein, 105 aa, Neisseria meningitidis; identical to SEQ ID NO: 895

SEQ ID NO: 18634 - protein, 351 aa, Neisseria meningitidis
MIGASLFSSAGIAETYLHNAGIKIIAANELVPERANLYKALYPESKMIIGDILHEEVFQNLIQSVPNRLDFLIASPPCQGMSVAGKNRNIQEMANDKRNHLIFRVIEFILLKRPTFVLIENVPFFLKIKLPYKGTLQTVEVILQDLFGCEYYIQTHIFDSADYGVAQHRKRAIIRMNKHSTIWGMPEKVTKTISVRDAISFLPSIESGQKSNVKWHFARTHAPEHIIWLKNTPTGRSAFDNIEHYPKKKNGEKIKSYNTTYRRMEWDAPAPTITIRNDAISSQLNVHPGRSMPDGTYSDARVLTPLELMLLTSLPIDWNIPDDTSELLIRQCIGESIPPLLIKKIVERIGK

SEQ ID NO: 18635 - protein, 693 aa, Neisseria meningitidis
MKSLKTFLIWGIVVLVGLASFTTLALSRGEQVSAVWMVTAAISVYCIAYRFYSLYIANRVMRLDPNRLTPAERHNDGLDYVPTHKGVLFGHHFAAIAGAGPLVGPVLAAQMGYLPGTLWIIFGVVFAGAVQDMMVLFVSMRRDGKSLGDIVKQELGTVPGVIASIGILMIMVIIMAVLALIVVKALVHSPWGTFTIAATMPIALFMGIYTRYIRPGKIGEISIVGFILLMLAVIYGEDVAKSSIGHWFDLDGIQLTWAIMIYGFVASVLPVWLLLTPRDYLSTFLKIGTIAALALGIVIVNPTLQMPAVTHFIDGSGPVFSGALFPFLFITIACGAVSGFHALISSGTTPKMLENETHVRMIGYGGMLMESFVAIMALAATASLDPGVYFAMNSPAALIGTDANTAAEVITTKLQFPVDAATLLHTAKEVGENTILSRAGGAPTLAVGMAHIMSRLIPGEAMMAFWYHFALLFEALFILTAVDAGTRVARFMIQDLGSIFYKPFGNTDSIPANLIATFFAVALWGYFLYTGVTDPLGGINSLWPLFGIANQMLAGVALIMCAVVLIKMKRDRYVWVVLVPAVGVLFVTCYAGLQKLFHSDPRISFLAHAGKYSDALAKNEVLAPAKDIGEMAQIIFNDKINAGLTILFLSVVVIVAAYGLRTALKARKVGWPTAKEIPAVYRDGKQPEAQSEA

SEQ ID NO: 18636 - protein, 291 aa, Neisseria meningitidis
MLQGSLVALITPMNQDGSIHYEQLRDLIDWHIENGTDGIVAVGTTGESATLSVEEHTAVIEAVVKHVAKRVPVIAGTGANNTVEAIALSQAAEKAGADFTLSVVPYYNKPSQEGIYQHFKTIAEATSIPMIIYNVPGRTVVSMTNDTILRLAEIPNIVGVKEASGNIGSNIELINRAPEGFVVLSGDDHTALPFMLCGGHGVITVAANAAPKLFADMCRAALQGDIALARKLNDRLIPIYDTMFCEPSPAAPKWAVSALGRCEPHVRLPLVPLTEGGQAKVRAALKASGQL

SEQ ID NO: 18637 - protein, 122 aa, Neisseria meningitidis; identical to SEQ ID NO: 848

SEQ ID NO: 18638 - protein, 539 aa, Neisseria meningitidis
  misc_feature 534, 535: 'Xaa' is any amino acid
MTDATIRHDHKFALETLPVSLEDEMRKSYLDYAMSVIVGRALPDVRDGLKPVHRRVLYAMHELKNNWNAAYKKSARIVGDVIGKYHPHGDTAVYDTIVRMAQNFAMRYVLIDGQGNFGSVDGLAAAAMRYTEIRMAKISHEMLADIEEETVNFGPNYDGSEHEPLVLPTRFPTLLVNGSSGIAVGMATNIPPHNLSDTVNACLRLLDAPDTEIDELIDIIQAPDFPTGATIYGLSGVREGYKTGRGRVVMRGKTHIEPIGRNGEREAIVIDEIPYQVNKAKLVEKIGDLVREKTLEGISELRDESDKSGMRVVIELKRNENAEVVLNQLYKLTPLQDSFGINMVVLVDGQPRLLNLKQILSEFLRHRREVVTRRTLFRLKKARHEGHIAEGKAVALSNIDEIIKLIKESPNAAEAKDKLLARPWRSSLVEEMLTRSGLDLEMMRPEGLAANIGLKEQGYYLSEIQADAILRMSLRNLTGLDQEEIVESYKNLMGKIIDFVDILSKPERITQIIRDELEESNQLWRRRRSEINPXXHTLN

SEQ ID NO: 18639 - protein, 148 aa, Neisseria meningitidis; identical to SEQ ID NO: 14596

SEQ ID NO: 18640 - protein, 387 aa, Neisseria meningitidis
LPYLLEQDMSQNASVGIVMPQKIPFEVPLVLENGKTLPRFDLMIETYGELNAEKNNAVLICHALSGNHHVAGRHSAEDKYTGWWDNMVGPGKPIDTERFFVVGLNNLGGCDGSSGPLSINPETGREYGADFPLVTVKDWVKSQAALADYLSIGQWAAVVGGSLGGMQALQWAISYPERVRHALVIASAPKLSTQNIAFNDVARQAILTDPDFNEGHYRSRNTVPARGLRIARMMGHITYLAEDGLGKKFGRDLRSNGYQYGYGVEFEVESYLRYQGDKFVGRFDANTYLLMTKALDYFDPAADFGDSLTRALQNVKAKFFVASFSTDWRFAPERSHELVKALIAAQKSVQYIEVKSAHGHDAFLMEDEAYMRAVAAYMNNVYKGCQQ

SEQ ID NO: 18641 - protein, 74 aa, Neisseria meningitidis; identical to SEQ ID NO: 444

SEQ ID NO: 18642 - protein, 156 aa, Neisseria meningitidis
MRIIQANAFRRHLNAMPSEHAAYADLTASSAKRLLCAKAILFSSAVRTGAAVGNIFFDGFADGGDFGDGAQYGFATFNAVDAASDSAGGIAGAAVLGIVEDEDFEGDLGSWADSVKMVRSSNGITVVPMPSETAAVQAFVPDGKLGYNIGHQCPTY

SEQ ID NO: 18643 - protein, 154 aa, Neisseria meningitidis
MKCPFCAHPDTRVADSRLMDERNAVRRRRYCPNCGKRFGTLETAELKMPAVIGPDKKRSPFNAQRLRNDLTAAARKSALTPEQIDETVRLTEHRLYTSGQRDIPSAALADMVLKELLRQDTEAAVRFAALHKRFDNPADFASWLAQAVKTDRKA

SEQ ID NO: 18644 - protein, 453 aa, Neisseria meningitidis
MLKKWLNKMLPSGRSSKKAESKTIIPAERHNIRAEMLSFAAENVIRRLKGAGFQAYVVGGAVRDLLLGIEPKDFDVATDATPEQVHKLFRRSRIIGRRFQIVHVMNGAEIIEVTTFRGGAKVHQNAHGRIMKDNTYGSIEEDAMRRDFTCNALYYDPEKEEILDFHNGIADVAARRLVMIGDAAERYQEDPVRILRAIRLSSKLGFDLSEETAAPIAESICRLKHEPVARLFDEIMKLLFSGHARECLKRLNGFDIPDDIHPLLNALRVSDGIAGKMTVLALKNTDERLRADKSVSVGFVLAALMWPELERHWKSNLQQGLKPVPALSDAINTMRETVERGWGVPQRFSATMREIWMFQPQFENRKGARPHKLFAQARFRAAYDFLLLRAETGNADRALAEWWTAFQTASTEQRSEMTKNEAAARHEKNEGQAKKRRRRRRKPKPKVVGTDWE

SEQ ID NO: 18645 - protein, 303 aa, Neisseria meningitidis
VFLNGFSDGIGFAVCFMAVCRLFGYWGNQMIKKTIGGIIPIFTAVFIPASAGAADLMLAQEYKDQEIAGWAMSEKLDGVRAYWDGKHLISRQGYAFTPPKGFTAQFPPYPLDGELYSGRGQFEQISATVRSVSSDWRGIRLHVFDVPKAQGNLYQRLAVATQWLKTHPNAPITIIPQTKVRDRQHAMDFLKQIEAQGGEGVMLRQPESRYSGGRSSQLLKLKSQYDDECTVTRHYEGKGRNAGRLGAVGCKNRHGEFRIGSGFKDKDRDNPPKIGTLITYRYRGFTRKGTPKFATFVRVRTDR

SEQ ID NO: 18646 - protein, 209 aa, Neisseria meningitidis
LVKTADGYKAIAHIRVGESVLSKDEASGKTGYKPVTAQYGNPYQETVYIEISDGIGNSQTLVSNKIHPFYSQGKWIQAGRLKKGDTLLSESGAKQTVQNITLKQQPLKAYNLTVADWHTYFVKGDKAETEGVWVHNSCPPKRTGSSKNEKHGDGGRSQISAESKIAELTNKIIPGMSKNERLKIERTIRNITKNANRKAKGEEHGRRGR

SEQ ID NO: 18647 - protein, 151 aa, Neisseria meningitidis; identical to SEQ ID NO: 4206

SEQ ID NO: 18648 - protein, 287 aa, Neisseria meningitidis
MELNEFLDKAYAVLRRLDAVLPPEPGHTDWNALAFRWQSAGKKGFLEHLPDPHTFPLVRLAGVGRQTELLVRNTEQFIVGRPANNVLMSGARGTGKSSLVKALLHEYADKGLRLIEVDKSDLIGLPYLLTLLKGRPEKFIVFCDDLSFESGDETYKALKTALDGGLSQRCANVLVYATSNRRHLMPEYFDENAGTTGMRGEIHQKEAVEEKISLSDRFGLWLSFYPFDQNDYLAAVQNWLEDFGVPYDETAQMAALQWAQTRGSRSGRSAWQFACDWAGRLPKQRAL

SEQ ID NO: 18649 - protein, 185 aa, Neisseria meningitidis
MKPKFKTVLTALLLAASLPSMAATHVLMETDMGNIRLVLDESKAPKTVANFVRYARKGFYDNTIFHRVIDGFVIQGGGLTEDLAQKASDKAVANESGNGLKNTAGTIAMARTTAPDSATSQFFINLADNASLDYKNGQYGYTVFGRVESGMNTVSKIARVKTATRGFYQNVPVQPVKIRRVVVGQ

SEQ ID NO: 18650 - protein, 455 aa, Neisseria meningitidis
MQHLTERMTQIAKLLNSSANNPDIDIPDFLTEIKDYSEFSVTDENGTYLHWDKFRQIHTEDTRMKWRAVKESRKKIQKPIDFPFEHQFWFCIPDSLQARLHLIDKSCGSSIGTSSLGGFGRSEQNRFLLKSLIMEEAITSAQLEGAATTRKVAKDMLKSQRKPKTKDEIMIVNNYHLMKKAVELKNTPLSVEMILDLHRIATSNAIENKADPGQFRRDDEIFIADNDGNSLYQPPPHGQVHTLMEAVCTFANNTYDGVENPFIHPIVQAIILHFLIGYIHPFGDGNGRIARALFYWFMLKNSYWLFEYISISRLLKNAPAQYAKSYLYAETDDSDLTYFIYYQCDIIKRAVADLEHYISDKQKHQQEFKAAIAQYTEKIGKLNQRQIGILQKAVEESGKIFTALEIANQYGISLNTARSDLSKLGEYRFLVPFKSGNALEYVAPQDLLERLEKKN

SEQ ID NO: 18651 - protein, 239 aa, Neisseria meningitidis
MATLSNKTILVTGASQGLGEQVAKAYAAAGATVILVARHQKKLEKVYDAIVEAGHPEPFAIRFDLMSAEEKEFNQFATTIAEATQGKLDGIVHCAGYFYALSPLDFQTVAEWVNQYRINTVAPMGLTRALFPLLKQSPDASVIFVGESHGETPKAYWGGFGASKAALNYLCKVAADEWERFGNLRANVLVPGPINSPQRIKSHPGEAKSERKSYGDVLPAFVWWASAESKGRSGEIVYL

SEQ ID NO: 18652 - protein, 284 aa, Neisseria meningitidis; identical to SEQ ID NO: 15385

SEQ ID NO: 18653 - protein, 337 aa, Neisseria meningitidis; identical to SEQ ID NO: 1101

SEQ ID NO: 18654 - protein, 124 aa, Neisseria meningitidis; identical to SEQ ID NO: 4349

SEQ ID NO: 18655 - protein, 1328 aa, Neisseria meningitidis; identical to SEQ ID NO: 1250

SEQ ID NO: 18656 - protein, 232 aa, Neisseria meningitidis
VQADLAYAAERITHDYPKPTGANNTSTVSDYFRNIRAHSIHPRVSVGYDFGDWRIAADYASYRKWNNNKYSVNTKEVGRNNNNNIDIWKELKTENQENGSFHAASSLGLSAIYDFKLNDKFDKFKPYIGARVAYGHVKHQVHSVRKETTTVFSKPSGSVTKPGEIVETPTSKPAYHESHSISSLGLGVIAGVGFDITPKLTLDTGYRYHNWGRLENTRFKTHEVSLGMRYRF

SEQ ID NO: 18657 - protein, 291 aa, Neisseria meningitidis
VFGFRLSGGKGILQRSQVALVVTESTGGLEIPAAKAIRRAGIAVIIANPRQTHQFAQSQPLTKTDAKDAKMLAFFAQMMTQKEDWQTMPYQPPTEAEEVLEALVNRRNQSADMRTAEKNRLHQVHETQVGSVKQLIAHFDRLIDELDKQIDDHTHTHFDGKAQVAEQIKGIGSITTATLMAMLPELGRLSHKRIASLAGIAPHPRESEETKFKSRCFGGRSAVRKALYMATVVATRFKPLIRDFYQRLPSEGKPYKVAVTAYMRKLLTISNARMRDYFAENDTAENGIRTA

SEQ ID NO: 18658 - protein, 307 aa, Neisseria meningitidis
MKKRNNPLPLLNGVKPSYLVLPHEKQFYGLPLLHFLCIRFPFVGADDWRRRLNSGFVVGSDGATLDEHTLFEPGKVMFYYRETSSEDEPRIPFEEKILHIDEHLIVVDKPHFLPVIPSGRFLRETLLTRLRLRPELQHLNVEDITPLHRLDKDTAGVMLLSHNPATRGAYQTMFQNKTVWKTYEALAPTRTDLPYPLDVVSRLVRGEKFFTTQEAEGEPNAHTTVELIENRGEFSLYRLTPHTGKKHQLRVHMMGLGMPLLNDALYPVPSEAGSEDYRKPLKLLAKKIAFADPLSGRERVFCSRFCL

SEQ ID NO: 18659 - protein, 223 aa, Neisseria meningitidis; identical to SEQ ID NO: 2385

SEQ ID NO: 18660 - protein, 335 aa, Neisseria meningitidis
MSTFFQQTAQAMIAKHIDRFPLLKLDQVIDWQPIEQYLNRQKTRYLRDHRGRPAYPLLSMFKAVLLGQWHSLSDPELEHSLITRIDFNLFCRFDELSIPDYSTLCRYRNWLAQDDTLSELLKLINRQLTEKGLKIEKASAAVVDATIIQTAGSKQRQTIEVDEEGQVSGQTTPSKDSDARWIKKNGLYKLGYKQHTRTDAEGYIEKLHITPANAHECKHLSPLLEGLPKGTTVYADKGYDSAENRQHLEERQLLDGIMRKACRNRPLTETQTKRNRYLSKTRYVVEQSFGTLHRKFRYARAAYFGLIKVSAQSHLKAMCLNLLKAANRLSAPAAA

SEQ ID NO: 18661 - protein, 187 aa, Neisseria meningitidis
MKKIIFAALAAAAISTASAATYKVDEYHANARFAIDHFNTSTNVGGFYGLTGSVEFDQAKRDGKIDITIPIANLQSGSQHFTDHLKSADIFDAAQYPDIRFVSTKFNFNGKKLVSVDGNLTMHGKTAPVKLKAEKFNCYQSPMEKTEVCGGDFSTTIDRTKWGMDYLVNVGMTKSVRIDIQIEAAKQ

SEQ ID NO: 18662 - protein, 511 aa, Neisseria meningitidis; identical to SEQ ID NO: 3843

SEQ ID NO: 18663 - protein, 119 aa, Neisseria meningitidis; identical to SEQ ID NO: 6447

SEQ ID NO: 18664 - protein, 122 aa, Neisseria meningitidis
MRIFKNQWIVKFAKKHKINDSELLEAVERADNGLIDADLGGGVIKQRIARQGQGRSGGYRSLILFKQADRAFFVYAFAKNDRENISDKELDVYRKAAAYYLKYTRAELAALKEDGIITEIES

SEQ ID NO: 18665 - protein, 759 aa, Neisseria meningitidis
MNTPTDLKVTKRDGRLEAIDLDKIHRVVTWAAEGLENVSVSQVELKSHIQFYNGIRTDDIHETIIKAAADLISEDTPDYQYLAARLAIFHLRKIAYGEYEPPHLYDHVKKLTDAGKYDRHILEDYSREEFDELNAYIDHERDMSFSYAAVKQLEGKYLVQNRVTSQIYETPQFLYVLVAMCLFSKYPKETRLDYVKRFYDAVSTFKVSLPTPIMSGVRTPTRQFSSCVLIECDDSLDSINATTSAIVKYVSQRAGIGINAGRIRGLDSEIRGGEARHTGCIPFFKMFQAAVKSCSQGGVRGGAATLFYPLWHIEAESLLVLKNNRGVEDNRIRQLDYGVQINRLLYTRLIKGGNITLFSPNEVPGLYEAFFADQDEFERLYTKYEQDPNIRKRIIPAADLFSTLMQERAGTGRIYIQNVDHCNTHSPFDPCVAPVHQSNLCMEIALPTKPLDNINDPNGEIALCTLSAFNLGALNSLDELEGLADLTVRALDALLDYQGYPVEAARTSTMGRRSLGIGVINYAYYLAKNGVRYSDGSALGLTHRTFEAIQYYLLKASANLAKEYGACTLFNQTVYSQGKLPIDTYKKDLDAVCGEPLHYDWESLRADIVKYGLRNSTLTALMPSETSSQIANATNGIEPPRGLVTVKASKDGILKQVVPEFETLKNAYETLWQLPGNEGYLKLVGVMQKFVDQSISANTAYDPGKFEGGKVSMKQMLKDLLTAYKYGVKTLYYHNTRDGADDTQTDIQDDGCAGGACKI

SEQ ID NO: 18666 - protein, 558 aa, Neisseria meningitidis; identical to SEQ ID NO: 1615

SEQ ID NO: 18667 - protein, 601 aa, Neisseria meningitidis
MRKVCASARTRSMIYGSMPSEKLTIFQTAFVMQVNIQIPYILPRCVRAEDTPYACYLKQLQVTKDVNWNQVQLAYDKWDYKQEGLTGAGAAIIALAVTVVTAGAGAGAALGLNGAAAAATDAAFASLASQASVSLINNKGNIGNTLKELGRSSTVKNLMVAVATAGVADKIGASALNNVSDKQWINNLTVNLANAGSAALINTAVNGGSLKDNLEANILAALVNTAHGEAASKIKQLDQHYIAHKIAHAIAGCAAAAANKGKCQDGAIGAAVGEIVGEALVKNTDFSRMSATEIEKAKAKITAYSKLVAGTASAVVGGDVNTAANAAQIAVENNTLYPRCVGAKCDEFQKEQQKWIRENPEEYREVLLLQTGFIPIIGDIQSFVQAQTAADHLFALLGVVPGIGESIQAYKVAKAAKNLQGMKKALDKAATVATAQGYVSKTKIKIGQTELRVTAATDKQLLKAIGEGRDTTGKMTEQLFDSLAKQNGFRVLSGGKYGGNNGFDHVWQAADGSVVLIVESKQIRNGTVQLNPNGAGGYTQMSEDWIRQVLDQLPDGSPAKAAVFKANKNGTLKTAIAGVDRQTGKAVILPVKVPSKANIRR

SEQ ID NO: 18668 - protein, 139 aa, Neisseria meningitidis
MAQLPLYRTAEIENFTVGTPEVLESFSKHIPYGVVFEDDGDTGYFYAASQDGILDALHIYNVEDVSDKHIPNHVLILWDDACTIAALCINDYIHAVYDFVEQAGYCRNGFPEAQGEWPKVTDRVLDDELQDKILSRKPT

SEQ ID NO: 18669 - protein, 330 aa, Neisseria meningitidis
MKQKIFVLYTGGTIGMTQSSEGLRPDTALVSQALSPFSGGLDFEWHVCNPLIDSSSVTLQHWRDWLDIIADKLPSCDGILILHGTDSMAYTANLLALALQGLGKPIVLTGSQWPYAAENSDAPRNLSTAVAAFSLKLKQTVIAFDGKLYPAVGSSKVSTETASGFDNPHFGVIAEWDETQGWYNLRIPSQDAAAVSDGLKIRYPDPQAKIAVRTLIPGFAVQELADGLGQFPAQALILQSYGHGNTPADEGFIRAVRDFARQGKLLLNISQVRQGKTAAVYAQGNAFRNSGIINGGKCNLETATALMTLAVSEGWGADEVKHELQRLGLV

SEQ ID NO: 18670 - protein, 394 aa, Neisseria meningitidis; identical to SEQ ID NO: 277

SEQ ID NO: 18671 - protein, 504 aa, Neisseria meningitidis; identical to SEQ ID NO: 17548

SEQ ID NO: 18672 - protein, 134 aa, Neisseria meningitidis; identical to SEQ ID NO: 6040

SEQ ID NO: 18673 - protein, 331 aa, Neisseria meningitidis; identical to SEQ ID NO: 6104

SEQ ID NO: 18674 - protein, 816 aa, Neisseria meningitidis
VSISAPYANENSRILLSTTDISSENGKIKIQSYGDQYYYARQSELYTFERRSYKTGKWYNRKHITEVKEHKNAKPDAVNLSASQGIDIKSGGSIDAYATAFDAPKGSINIEAGRKLTLYAVEELNYDKLDSQKRRRFLGISYSKAHDTTTQVMKTALPSRVVAESANLQSGWDTKLQGTQFETTLGGATIRAGVGEQARADAKIILEGIKSSIHTETVSSSKSTLWQKQAGWGSNIETLQLPSFTGPVAPVLTAPGGYIADIPKGNLKTEIEKLAKQPEYAYLKQLQVAKNINWNQVQLAYDKWDYKQEGMTPAAAAVVVIVVTVLTYGALSAPAAAGTAGAAGAGAGGAAAGTAAGTGVAAGTAATTGVAAGTSAAAITTAAGKAALASLASQAAVSLINNKGDINHTLKELGKSSTVRQAATAAVTAGVLQGISGLNTQAAEAVSKHFHSPAAGKLTANLINSTAAASVHTAINGGSLKDNLGDAALGAIVSTVHGEVASKIKFNLSEDYIAHKIAHAVAGCASAVANKGKCRDGAIGAAVGEMVGETLLDGRDVGKLSPQERQKVIAYSQIIAGSVVALVKGDVNTAANAATVAVENNSLLARRRVNIRWTPRQELEHEYAILEIQAITNQIRRLDPKFNGIAILRTPGEPWTRHDVQTYRQYYNQLRESRGFAVDPIYRIRINNGNEFNRIMSSKYPYNELYVANPKSATGYFRVDSYNPATEEIISRKFTQFSQIQESTGIGYIKEAVRKYSPGAVISNVPSTPTTIRGRKLEGKLILEVPAQVNPIPQSVLRAAQEENVIIRDTTGRIYK

SEQ ID NO: 18675 - protein, 171 aa, Neisseria meningitidis
MYTCTSCGEKHEDMPAIGFTAPDPYNQLSEEERIAYQAECDSDFCIIRYPDQTDRFIRAVLPIPIIGHEETLEYGVWVSVSEKSFNDYQSRFYDNLENAVYFGMICNRLPPYETDPFGLHCNVVTQPDGQRPLLQLHQGGEHPLVRDFYHGIEYAEAQARIGAVSESDCSG

SEQ ID NO: 18676 - protein, 41 aa, Neisseria meningitidis; identical to SEQ ID NO: 2201

SEQ ID NO: 18677 - protein, 211 aa, Neisseria meningitidis
LNIKYSGIENRFETAILKKNGVRSGFVSFAPNLAAVKLNDYAKVRKRITKTKQKADIVIVMFHGGAEGKQAEHLPFDTEIFYGENRGNVVEFARLAVDSGADVVFGQRPHVTRAVELYRDRFISYSGGNFATYGAINTSGISGIAPIFKIITDKQGRFVSGNIIPITQIGDKIPKIDPEKTVIGRIIYLNRSDFPKGNGLDVSPDGSITRR

SEQ ID NO: 18678 - protein, 163 aa, Neisseria meningitidis; identical to SEQ ID NO: 2563

SEQ ID NO: 18679 - protein, 154 aa, Neisseria meningitidis; identical to SEQ ID NO: 2010

SEQ ID NO: 18680 - protein, 173 aa, Neisseria meningitidis; identical to SEQ ID NO: 6851

SEQ ID NO: 18681 - protein, 448 aa, Neisseria meningitidis; identical to SEQ ID NO: 2224

SEQ ID NO: 18682 - protein, 217 aa, Neisseria meningitidis
MKITHCKLKKKVQKELLRFFVLEVTARSAADILGIHPNSAVLFYRKIRTVINYHLVLAADEVFEGPVEPDESDFGGRRKGRRGRGAAGKVVVFGILKRNGRGYTVVVDNAKSETLLPVIKKKIMPDSIVYTDSLSSCDKLDVSGFIHYRINHSKEFADRQNHINGIENFWNQAKRVLRKYNGIDCKSFPLFLKECEFRFNFGTPSQQLKILRDWCGI

SEQ ID NO: 18683 - protein, 124 aa, Neisseria meningitidis; identical to SEQ ID NO: 2472

SEQ ID NO: 18684 - protein, 153 aa, Neisseria meningitidis; identical to SEQ ID NO: 750

SEQ ID NO: 18685 - protein, 141 aa, Neisseria meningitidis; identical to SEQ ID NO: 26

SEQ ID NO: 18686 - protein, 214 aa, Neisseria meningitidis
MESTLSLQANLYPRLTPAGAFYAVSSDAPSAGKTLLHSLLKADVDEMVSSEKLLTWADTADIDTALNLLYRLQKLEFLYGDENGHSDGINLSDEQLPLLMEQLSGSGKALLVDRNGLYLANANFHHEAAEELGLLAAEVAQMEKKYRLLIKNNLYINNNAWGVCDPSGQSELTFFPLYIGSTKFILVIGGIPDLGKEAFVTLVRILYRRYSNRV

SEQ ID NO: 18687 - protein, 160 aa, Neisseria meningitidis; identical to SEQ ID NO: 1377

SEQ ID NO: 18688 - protein, 208 aa, Neisseria meningitidis; identical to SEQ ID NO: 339

SEQ ID NO: 18689 - protein, 259 aa, Neisseria meningitidis
MAASPEAKFTEEKILWVKHHTPKLITFAISRPESYRFKAGQFSRLGFYEGEGFIWRAYSIVSAEYADTLEYFAVLIQDGPMSARFAKMQQGDTILLDKNATGFLLPERFPDGKDLVMLCTGSGIAPFLSILEQPEIRQRFDTVNLIHSVSFPEELIFNDRLAALAEHPLVGEYGHSFRFVPVTTRAANPSGLGGKRIPELLKNNSIEQALHTKFTPESTRFMICGNPEMVKDTFQTLLDMGYAMHRNRIPGQIMMENGF

SEQ ID NO: 18690 - protein, 367 aa, Neisseria meningitidis; identical to SEQ ID NO: 7962

SEQ ID NO: 18691 - protein, 160 aa, Neisseria meningitidis; identical to SEQ ID NO: 1762

SEQ ID NO: 18692 - protein, 414 aa, Neisseria meningitidis
MEQQQRYISVLDIGTSKVLALIGEVQDDDKINIVGLGQAPSRGLRAGMVTNIDATVQAIRQAVNDAELMADTKITHVTTGIAGNHIRSLNSQGVVKIKDGEVTQADIDRAIETAKAINIPPDQKILDAVVQDYIIDTQLGVREPIGMSGVRLDTRVHIITGASTAVQNVQKCIERCGLKSDQIMLQPLASGQAVLTEDEKDLGVCVIDIGGGTTDIAVYMNGAIRHTSVIPAGGNLITKDLSKSLRTPLDAAEYIKIHYGVASCDTEGLGEMIEVPGVGDRTSRQVSSKVLAAIISARIQEIFGVVLGELQKSGFPKEVLNAGIVLTGGVSMMTGIVEFAEKIFDLPVRTGAPQEMGGLSDRVRTPRFSTAIGLLHAACKLEGNLPQPENGAVQEREGGGGLLARLQRWIENSF

SEQ ID NO: 18693 - protein, 334 aa, Neisseria meningitidis
MTIIVTGAAGFIGSNIVKALNQRGITDIVAVDNLSKGEKFKNLAECEIAHYLDKHEFIRQVREHILPYQNIEAVFHQGACSDTMNHDGLYMMENNYQYTLDLLNWCQDERIPFLYASSAAVYGKGEIFREERELEKPLNVYGYSKFLFDQVLRRRMKEGLTAQVVGFRYFNVYGQHEQHKGRMASVTFHHFHQYREHGYVNLFGSNDGYGNGEQTRDFVSVEDVAKVNLYFFDHPELSGIYNLGTGRSQQFNELAAATVNACRAAEGKPEMSLKELVEEELIRYIPFPDALKGKYQSFTQADITKLREAGYTEEFFDVKSGVERYVKWMLENLA

SEQ ID NO: 18694 - protein, 130 aa, Neisseria meningitidis
MYSFEANANAVKISETVSVDTGQGAKIHKFVPKNSKTYSSDLIKTVDLTHIPTGAKARINAKITASISRAGVLAGGGKLARLGAKFSTRAVPYVGTALLAHDVYETFKEDIQARGYQYDTETDKFAKVSG

SEQ ID NO: 18695 - protein, 518 aa, Neisseria meningitidis; identical to SEQ ID NO: 8503

SEQ ID NO: 18696 - protein, 716 aa, Neisseria meningitidis
LGSDWVSDGIHSGFHRLMPSERRFRPIPTTRFVRKRITGKIMEVIRYPDSPFKLHQPFPPAGDQPTAIADLLEGLSDGLAYQTLLGVTGSGKTYTMANVIAQSGRPAIIMAHNKTLAAQLYAEMREFFPENAVEYFVSYYDYYQPEAYVPSRDLFIEKDSAINEHIEQMRLSATKNLMTRDDVIIVATVSAIYGIGDPTEYQQMVLSVKEGDTIEQRDIIATLVSMQYERGDLDFKRGSFRVRGDVIDVYPAESSENALRISLFDDEIDRLDMFDPLSGSLHQRVGRYTVFPSSHYVTPRDTVLRACESIKEELRERIDFFTKENRPVEQQRIEQRTRFDLEMLYEMGFCKGIENYSRHFSGKKEGEPPPTLMDYLPDNAIMFIDESHVTVTQIGGMYKGDASRKQNLVDYGFRLPSARDNRPLKFHEFEKVMPQTVFVSATPAKYEEEHAGQVVEQVVRPTGLVDPQIIIRPVATQVDDLMSEINDRIQKGERVLVTTLTKRMAEQLTDYYSELGIKVRYLHSDIDTVERVEIIRDLRLGLFDVLVGINLLREGLDIPEVSLVAILDADKEGFLRSHRSLIQTIGRAARNVNGVAILYADKITDSMKAAIDETERRREKQIKFNEEHGIVPQQIKKQVKDIIDGVYHEEDSGKGRRQGKNKVKVGEIHNEEDAIKEIAKLEKAMQQAARDLQFEEAAVLRDRIRNIKESLLFGAE

SEQ ID NO: 18697 - protein, 217 aa, Neisseria meningitidis; identical to SEQ ID NO: 8419

SEQ ID NO: 18698 - protein, 428 aa, Neisseria meningitidis
MTAQHQTPLRFITAGSVDDGKSTLIGRLLYDSKALLSDQIKTLESGKSNGLKETIDFSILTDGLEAEREQGITIDVAYRYFSTAKRKFIIADTPGHEQYTRNMVTGASTASAAVVLVDASQLDFGAQPLQLLPQTKRHSAILRQLNCPHIVVAVNKMDLLDYSEDKFNAIVEAYRRLAEQLGLKDVHFVPVSALLGDNIVYPGGNMPWYKGEPLLSILENLPGADETGRSAADFYFPVQLVVRQDADKADDFRGYQGRIERGSVAVGQTVRIEPNGLTAEVSEIITPKGEVAQAFAGEAATLRLDRDIDVSRGDLFVDKNSPLAPQKHLEATLCWFDERPLNTARKYLLKHGTQTVPAKVGEIESVLDVRTLEQEAGAESLKMNDIAKVRINLQKPVTATPYAENTAAGSFILIDEATYGTVAAGMIL

SEQ ID NO: 18699 - protein, 169 aa, Neisseria meningitidis
MKKKLLSGIKFAVQTALVFLLVSLFLDWVRKPDEPAGAAGRPLTLLSGQRLTLGQFSRDRTVLVYFWGSWCGVCRYQSPIIDDLAADGVPVVGVAVRSGSSAEVAAYMAKRGLGFPTVNDEDGGLARSWRIVATPAVVLVKNGKMVHYTTGISSYWGLRARIFQADVFG

SEQ ID NO: 18700 - protein, 661 aa, Neisseria meningitidis
MAKNNQYSESSITVLKGLEPVKERPGMYTRTDSPTHICQEVIDNAADEALGGFATAIDVQIHEDGSLSVRDNGRGIPVGLHPEEGVPVVELVFTRLHAGGKFNKKDGGSAYAFSGGLHGVGVSVTNALSTRLEVTVKREGKIHRIVFAGGDVVEPLAQVGKCAVKDSGTEVRVWPDGKYFESPNYSIPELERLLRAKAVLLPGVRVSLTRPVKGEDEAHTQTWHYPDGLKSYLTDLIADAQEAVPIFSCENYISDDHNGDFSIGEGAAFALTWLEEGSCANESYVNLIPTPLGGTHEAGLKQAVFNAVNNFINLHNLLPRGVKVQSDDVFGKTAFVLSARVLDPQFQGQTKDKLTNRDALKLVAAVAGDPLELWLNQNVDFGKKIAELAIRQAQARMRSVKKIEKKKGSGVAVLPGKLTDCESEDIRENELFLVEGDSAGGSAKLARDKATQAILPLRGKVLNSFEVHPDQLFGNAEIHDISVAIGVDPHGINDHPDLSGLRYGKIAILSDADVDGSHIQVLLLTLFYRHFPKLVADGHIYVAQPPLFRVDVNAQGKSKPARKFYALDQNELDSILERLQKEGVKETAYSISRFKGLGEMNPDQLKDTTMHPDTRRLLQVQIPEGADDETRDIFVKLMGKGEAAARRAWMEREGDTAELDI

SEQ ID NO: 18701 - protein, 177 aa, Neisseria meningitidis
MFPPDKTLFLCLSALLLASCGTTSGKHRQPKPKQTVRQIQAVRISHIDRTQGSQELMLHSLGLIGTPYKWGGSSTATGFDCSGMIQFVYKNALNVKLPRTARDMAAASRKIPGSRLKAGDLVFFNTGGTHRYSHVGLYIGNGEFIHAPSSGKTIKTEKLSTPFYAKNYLGAHTFFTE

SEQ ID NO: 18702 - protein, 123 aa, Neisseria meningitidis
MRKPQRGYARQDRVKEQIMRELAELVRTGLKDPRAGFITVNEVEVTRDYSHATVFYTVLNQDAREITEEVLEHARGHLRSELAKRIKLFKTPELHFKYDESLERGLNLSALIDQVAAGKPVED

SEQ ID NO: 18703 - protein, 160 aa, Neisseria meningitidis; identical to SEQ ID NO: 515

SEQ ID NO: 18704 - protein, 71 aa, Neisseria meningitidis
MKAIHPYACPRCCRLPANTFRTGMANSASKFCIAKGGRREVKKTKAAADMPCAICRTAGLSRSGNISVHNI

SEQ ID NO: 18705 - protein, 117 aa, Neisseria meningitidis
MGIKNEQIIICKKYNTEIYPVSDVSKIGVAENVKQANLYPINGLRHRPKGDTNGWYIWAGENFSYDKNFFLPLHTFHLQIWRPEIIPFLTLPPGYRFLIGENGYEDVWFDELLLNDN

SEQ ID NO: 18706 - protein, 395 aa, Neisseria meningitidis
MNTLLKQLKPYPFARLHEAMQGISAPEGMEAVPLHIGEPKHPTPKVITDALTASLHELEKYPLTAGLPELRQACANWLKRRYDGLTLNSDTEILPVLGSREALFSFVQTVLNPVSDGLKPVIVSPNPFYQIYEGATLLGGGEIHFANCPAPSFNPDWRSISEEVWKRTKLVFVCSPNNPSGSVLDLDGWKEVFDLQDKYGFIIASDECYSEIYFDGNKPLGCLQAAAQLGRSRQKLLMFTSLSKRSNVPGLRSGFVAGDAELLKNFLLYRTYHGSAMSIPVQRASIAAWNDEQHVIDNRRLYQEKFEWVIPILQQVFDVKLPDASFYIWLKVPDGDDLAFARNLWQKAAIQVLPGRFLARDTEQGNPGEGYVRIALVTDVATCVKAAETIVSLYR

SEQ ID NO: 18707 - protein, 56 aa, Neisseria meningitidis; identical to SEQ ID NO: 326

SEQ ID NO: 18708 - protein, 263 aa, Neisseria meningitidis; identical to SEQ ID NO: 3390

SEQ ID NO: 18709 - protein, 251 aa, Neisseria meningitidis; identical to SEQ ID NO: 15704

SEQ ID NO: 18710 - protein, 92 aa, Neisseria meningitidis; identical to SEQ ID NO: 752

SEQ ID NO: 18711 - protein, 753 aa, Neisseria meningitidis
MLQIEIDGKQVSVEQGATVIEAAHKLGTYIPHFCYHKKLSIAANCRMCLVNVEKAPKPLPACATPVTDGMIVRTHSAKAREAQEGVMEFLLINHPLDCPTCDQGGECQLQDLAVGYGKTTSRYTEEKRSVVGKDMGPLVSAEEMSRCIHCTRCVRFTEEIAGLQEIAMVNRGEHSEIMPFIGKTVETELSGNVIDLCPVGALTSKPFRFNARTWELNRRKSVSAHDALGSNLIIQTKDHTVRRVLPLENEAINECWLSDRDRFAYEGLYHESRLKNPKIKQGGEWMDVDWKTALEYVRSAIECIAKDGNQNQVGIWANPMNTVEELYLAKKLANGLGVKNFATRLRQQDKRLLDDLKGAQWLGQSIESLADNDAVLVVGANLRKEQPLLTARLRRAAKDRMALSVLAGSKEELLMPLLSQEAAHPDEWAGRLKNLSANAEHAVTASLKNAEKAAVILGAEVQNHPDYAAIYAAAQELAAATGAVLGILPQAANSVGADVLGVNSGESVAEMANAPKQAVLLLNVEPEIDTADGAKAVAALKQAKSVMAFTPFVSETLLDVCDVLLPIAPFTETSGSFINMEGRLQSFHGVVQGFGDSRPMWKVLRVLGNLFDLQGFEYHDTAAILKDALDVESLPSKLDNRNTWTGEGVQTTSDRLVRVGGVGIYHTDSIVRRSAPLQETGHAAVPAARVNPNTLARLGLQNGQTAVAKQNGASVSVAVKADAGLPENVVHLPLHTENAALGALMDTIELAGA

SEQ ID NO: 18712 - protein, 230 aa, Neisseria meningitidis
MKLIKYLQYQGIGSRKQCQWLIAGGYVFINGTCMDDTDADIDSSSVETLDIDGEAVTVVPEPYFYIMLNKPEDYETSHKPKHYRSVFSLFPDNMRNIDMQAVGRLDADTTGVLLITNDGKLNHNLTSPSRKIPKLYEVTLKHPAGETLCETLKNGVLLHDENETVYAADAVLESPSALLLTITEGKYHQVKRMVAAAGNRVQHLHRRRFAHLETENLKPGEWKFIDCPKF

SEQ ID NO: 18713 - protein, 59 aa, Neisseria meningitidis; identical to SEQ ID NO: 642

SEQ ID NO: 18714 - protein, 738 aa, Neisseria meningitidis
VLEYAARSRRSDGIPTHRQKHHDRNQEKNMAYQVLARKWRPKTFADLVGQEHVVKALQNALDEGRLHHAYLLTGTRGVGKTTIARILAKSLNCENAQHGEPCGVCQSCTQIDAGRYVDLLEIDAASNTGIDNIREILENAQYAPTAGKYKVYIIDEVHMLSKSAFNAMLKTLEEPPEHVKFILATTDPHKVPVTVLSRCLQFVLRNMTAQQVADHLAHVLDSEKIAYEPAALQLLGRAAAGSMRDALSLLDQAIALGSGKVAENDVRQMIGAVDKQYLYELLTGIINQDGAALTAKAQEMAACAVGFDNALGELAILLQHLALIQAVPNALAHDDPDSDILHRLAQTISGEQIQLYYQIAVHGKRDLSLAPDEYAGFMMTLLRMLAFAPLAAASCDANAVIENTELKSPSAQTAEKETAAKKPQPRPEAETAQTPVQTASAAAMPSESKTAEPVSNQENNDVPPWEDAPDEAQTAAGTAQTSAKSIQTASEAETPPENQVSKNKAADNETNAPLSETPSENPIQATPNNEAVETETFAHEAPAEPFYGYGFPDNDCPVEDGAEIPPPDWEHAAPADTAGGGADEEAEAGGIGGNNTPSAPPPEFSTENWAAIVRHFARKLGAAQMPAQHSAWTEYHPDTGLMVLAMTAEARATADKKRLDKIRDTLAQAYGLQLTLQTQDWRDEAGRETPAMQDKRVQAEDRQKAQALLEADPAAQKILQAFGAQWQPESVELAANRP

SEQ ID NO: 18715 - protein, 248 aa, Neisseria meningitidis; identical to SEQ ID NO: 639

SEQ ID NO: 18716 - protein, 436 aa, Neisseria meningitidis; identical to SEQ ID NO: 7620

SEQ ID NO: 18717 - protein, 366 aa, Neisseria meningitidis
MAGNTFGQLFTVTTFGESHGAGLGCIIDGCPPGLELSEADIQFDLDRRKPGTSRHVTQRREADQVEILSGVFEGKTTGTPIALLIRNTDQRSKDYGNIATSFRPGHADYTYWHKYGTRDYRGGGRSSARETAARVAAGAIAKKWLKEKFGTEITAYVTQVGEKEIQFEGYEHISQNPFFAANQSQIAELENYMDSVRKSLDSVGAKLHIEAANVPVGLGEPVFDRLDAEIAYAMMGINAVKGVEIGAGFDSVTQRGSEHGDELTPQGFLSNHSGGILGGISTGQDIHVNIAIKPTSSIATPRRSIDINGNPIELATHGRHDPCVGLRAAPIAEAMLALVLIDHALRHRAQNADVQVNTPDITLSNK

SEQ ID NO: 18718 - protein, 903 aa, Neisseria meningitidis
MLYHHSYAEDAGRAGSEAQIQVLEDVHVKAKRVPKDKKVFTDARAVSTRQDIFKSSENLDNIVRSIPGAFTQQDKSSGIVSLNIRGDSGFGRVNTMVDGITQTFYSTSTDAGRAGGSSQFGASVDSNFIAGLDVVKGSFSGSAGINSLAGSANLRTLGVDDVVQGNNTYGLLLKGLTGTNSTKGNAMAAIGARKWLESGASVGVLYGHSRRSVAQNYRVGGGGQHIGNFGAEYLERRKQRYFVQEGALKFNSDSGKWERDLQRQQWKYKPYKNYNNQELQKYIEEYDKSWRENLAPQYDITPIDPSSLKQQSAGNLFKLEYDGVFNKYTAQFRDLNTKIGSRKIINRNYQFNYGLSLNPYTNLNLTAAYNSGRQKYPKGSKFTGWGLLKDFETYNNAKILDLNNTATFRLPRETELQTTLGFNYFHNEYGKNRFPEELGLFFDGPDQDNGLYSYLGRFKGDKGLLPQKSTIVQPAGSQYFNTFYFDAALKKDIYRLNYSTNTVGYRFGGEYTGYYGSDDEFKRAFGENSPTYREHCNQSCGIYEPVLKKYGKKRANNHSVSISADFGDYFMPFASYSRTHRMPNIQEMYFSQIGDSGVHTALKPERANTWQFGFNTYKKGLLKQDDTLGLKLVGYRSRIDNYIHNVYGKWWDLNGNIPSWVSSTGLAYTIQHRNFKDKVHKHGFELELNYDYGRFFTNLSYAYQKSTQPTNFSDASESPNNASKEDQLKQGYGLSRVSALPRDYGRLEVGTRWLGNKLTLGGAMRYFGKSIRATAEERYIDGTNGGNTSNVRQLGKRSIKQTETLARQPLIFDFYAAYEPKKNLIFRAEVKNLFDRRYIDPLDAGNDAATQRYYSSFDPKDKDEDVTCNADGLCNGKYGGTSKSVLTNFARGRTFLITMSYKF

SEQ ID NO: 18719 - protein, 118 aa, Neisseria meningitidis; identical to SEQ ID NO: 367

SEQ ID NO: 18720 - protein, 672 aa, Neisseria meningitidis
MMGEKDGFYRHLAVEGNFGGTAQSLAVCSTIGANSVKMPTSFLYTPHRQAEFMALLQISEPGMSAAPHRHRLAAGIDLGTTNSLVATVRSGSAACLPDAEGRVTLPSVVRYLENGGIEVGKTALSAQKTDPLNTVSSAKRLIGRTLADLHQNTHYLPYRFGDNQRVIELHTRQGVKTPVEVSAEILKTLKSRAEETLGGDLVGVVITVPAYFDDAQRQATKDAARLAGLNVLRLLNEPTAAAIAYGLDNASEGTFVVYDLGGGTFDVSVLQLTKGLFEVKATGGNSALGGDDFDHRLFCRLLEQNGLSQLNEQDSQLLLSLVRAAKEQLTTQTEARIQATLSDGMAIDTSISRAEFHNLTQHLVMKTLEPVTQALKDAGVGKNEVKGVIMVGGSTRMLHVQQAVATFFGQTPLNNLNPDEVVALGAAIQANVLAGNKTDGEWLLLDVTPLSLGLETYGGLAEKIIPRNSTIPTARAQDFTTFKDGQTAMTIHVVQGERELVSDCRSLAKFTLRGIPPMAAGAARIRVTFQIDADGLLSVSAQEQSTGVQAQIEVKPSYGLDDGAITRMLKDSMDNAAEDMAARARAEAVVEAESLTDAVNAALELDSDLLDAKELQQIRQGIADLQGRLKDGKAEDIRSAVAKLSRSTDNFAAKRMNRNIQRALTGQSVDNI

SEQ ID NO: 18721 - protein, 60 aa, Neisseria meningitidis; identical to SEQ ID NO: 15364

SEQ ID NO: 18722 - protein, 218 aa, Neisseria meningitidis
MEQKRRFAASLLLAAVLPLCAHSFPFAEENPIAYGKVKIQSWKERRDFNIVKQDLDFSCGAASVATLLNNFYGQTLTEEEVLKKLDKEQMRASFEDMQRIMPDLGFEAKGYALSFEQLAQLKIPIIVYLKYRKDDHFSVLRGIDGNTVLLADPSLGHVSMSRAQFLDAWQTREGNLAGKILAVVPKKAETISNKLFFTHHPKRQTEFAVRQIRQARAE

SEQ ID NO: 18723 - protein, 404 aa, Neisseria meningitidis; identical to SEQ ID NO: 33

SEQ ID NO: 18724 - protein, 185 aa, Neisseria meningitidis
MDALKLLTNRRSSKKLKHPAPDAAELEQIFQAATQVPDHGNMRPFRFTVIQGEVGLQRFRDVLKQTVAELNFGDDAMKKAEKVGNMSPMVIGVTFAPNRDVPKPKPEWEQMLTAGCAAYALQLAATAQGFDNVWITGMWVNSPLLREAFGCADKDKIIGLMMVGTPTEEVHKPKNTDLEAFVSHW

SEQ ID NO: 18725 - protein, 418 aa, Neisseria meningitidis
VANKLRNYTINFGPQHPAAHGVLRMILELDGEQIVRADPHIGLLHRGTEKLAETKTYLQALPYMDRLDYVSMMVNEQAYCLAVEKLAGIDVPIRAQYIRVMFAEVTRILNHLMGIGSHAFDIGAMTAILYAFRDREELMDLYEAVSGARMHAAYFRPGGVYRDLPDFMPKYEGSKFRNAKVLKQLNESREGTMLDFIDAFCERFPKNIDTLETLLTDNRIWKQRTVGIGVVSPERAMQKGFTGVMLRGSGVEWDVRKTQPYEVYDKMDFDIPVGVNGDCYDRYLCRMEEMRQSVRIIKQCSEWLRVNPGPVITTNHKFAPPKRTEMKTGMEDLIHHFKLFTEGMHVPEGETYTAVEHPKGEFGVYIISDGANKPYRLKIRAPGFAHLQGMDEMAKGHMLADVVAIIGTQDIVFGEVDR

SEQ ID NO: 18726 - protein, 475 aa, Neisseria meningitidis; identical to SEQ ID NO: 3229

SEQ ID NO: 18727 - protein, 446 aa, Neisseria meningitidis
LHTLLAFIFAILILVSLHEFGHYIVARLCGVKVVRFSVGFGKPFFTRKRGDTEWCLAPIPLGGYVKMVDTREGEVSEADLPYAFDKQHPAKRIAIVAAGPLTNLALAVLLYGLSFSFGVTELRPYVGTVEPDTIAARAGFQSGDKIQSVNGTPVADWGSAQTEIVLNLEAGKVAVGVQTASGAQTVRTIDAAGTPEAGKIAKNQGYIGLMPFKITTVAGGVEKGSPAEKAGLKPGDRLTAADGKPITSWQEWANLTRQSPGKKITLNYERAGQTHTADIRPDTVEQPDHTLIGRVGLRPQPDRAWDAQIRRSYRPSVVRAFGMGWEKTVSHSWTTLKFFGKLISGNASVSHISGPLTIADIAGQSAELGLQSYLEFLALVSISLGVLNLLPVPVLDGGHLVFYTAEWIRGKPLGERVQNIGLRFGLALMMLMMAVAFFNDVTRLLG

SEQ ID NO: 18728 - protein, 149 aa, Neisseria meningitidis
MSIYAVAHIVHLYCAIAFVGGVFFEVLVLSVLHTGRVSCEARREVEKAMSYRAVRVMPFVVGLLFASGVVMAANRYLSILGEPFATSFGTMLTLKILLAFSVLAHFAIAVVKMARSTLTVGWSKYIHAVVFAHMLLIVFLAKAMFYISW

SEQ ID NO: 18729 - protein, 602 aa, Neisseria meningitidis; identical to SEQ ID NO: 2934

SEQ ID NO: 18730 - protein, 209 aa, Neisseria meningitidis
MAAHLEEQQELDNFKYFWKTTGKWLFALLILAALGYLGYTVYQNRATSQNQEAAAVLANIVEKAQNKAPQSEINAELTKLQQSYPHSISTAQATLMAAATEFDAQRYDVAEGHLKWVLSNQKDSLIQALAAQRLGVVLLQQKKYDAALAALDTPVEADFAPLLMETKGDVYAAQGKSQEALKNYGQALEKMPQDSVGRELVQMKLDSLK

SEQ ID NO: 18731 - protein, 362 aa, Neisseria meningitidis
MNDYTQQLQGKKDYLKTLFAGLDVPEWEVYESPDKHYRMRAEFRIWHEGGEMFYAMFEKGQKASGASMIRCDRFEAASEAVNRLMPELIAAAAQSPELKKRWYAVEFLSTLSGEMLVTMIYHKRLDAEWMQAAQALQQQLDISVIGRSRGQKIVLKQDYVTETLKVGNRDFRYRQIEGSFTQPNAAVCQKMLEWACGAAEGLDGDLLELYCGNGNFTLPLSEKFERVLATEISKTSISAAQWNIEANRIGNIKIARLSAEEFTEAYTRKREFKRLKDGGIALTDYAFSTIFVDPPRAGIDEETLKLVSQFDNIIYISCNPETLRANLDTLVETHAVERAALFDQFPFTHHIESGVLLKKKIL

SEQ ID NO: 18732 - protein, 92 aa, Neisseria meningitidis; identical to SEQ ID NO: 1287

SEQ ID NO: 18733 - protein, 284 aa, Neisseria meningitidis
LFSEHGGLEMKLDIYALLERALLSGDPDEKGRLTDEAFAAVQNADGAEANAPPADFPRAGRPDKPVLVAPSQLTPRKMNTTEGYAAMLHAIAHIEFNAVNLALDAAYRFRTLPFQFVRDWVKVAKEEVYHFRLMRDRLRAFGFDYGSFEAHNHLWDMAYKTAYDPLLRMALVPRVLEARGLDVTPGIRAKVAQRGDSETCGVLDIIYRDEVGHVAIGNHWYQHLCRERGLEPITLFRSLIARYDMFIFRGYVNIEAREKAGFSRFELDMLEDFEQGLKQNKHAV

SEQ ID NO: 18734 - protein, 480 aa, Neisseria meningitidis
MKQLAMYINGRFENDFNGEWRDVLNPSTEEAIAREPKGGRADVDRAVAAARAAQPAWERLPAVERGAYLRKIAQGILERADELTDTIVAEGGKTKDLARVEVMFTADYLDYQAEWARRYEGEIIQSDRPRENILLFKRPLGVIAGILPWNFPFFLIARKMGPALVTGNTIVVKPSSVTPINCHIFAEIVDAVGLPAGVFNVVNGPGAEIGNALSAHPQVDMVSLTGSVEAGRQVMEAASANITKVSLELGGKAPAIVLKDADLDLAVKSILASRVGNTGQICNCAERVYVHSSLKDAFIEKMTAAMKGVRYGNPAEAEAGALEMGPLIEERAVKAVAEKVERAVKQGAKLVCGGKRAEGRGYFFEPTLLTDTDNSMDIMKEETFGPVLPVSAFDTLDQVIALANDCEFGLTSSVYTTNLNEAFYVTRRLQFGETYINRENFEAMQGFHAGWKKSGIGGADGKHGLEEYLQTQVVYLETDI

SEQ ID NO: 18735 - protein, 125 aa, Neisseria meningitidis; identical to SEQ ID NO: 2523

SEQ ID NO: 18736 - protein, 115 aa, Neisseria meningitidis; identical to SEQ ID NO: 2034

SEQ ID NO: 18737 - protein, 380 aa, Neisseria meningitidis; identical to SEQ ID NO: 5057

SEQ ID NO: 18738 - protein, 167 aa, Neisseria meningitidis; identical to SEQ ID NO: 189

SEQ ID NO: 18739 - protein, 151 aa, Neisseria meningitidis; identical to SEQ ID NO: 6340

SEQ ID NO: 18740 - protein, 245 aa, Neisseria meningitidis
MIILDKVSKHYQTRDKTRFAAVEPTSLEIRDGEIFGLMGYSGAGKSTLLRLINLLERPDTGKVNVCGQELTALDAAALRQARQNIGMVFQQFNLLNNRTVAGNVAFPLEIAGWPSEKIKARVAECLEIVGLTERAGHYPAQLSGGQKQRVGIARALAPKPQVILADEPTSALDPATTRSVLECLEDINKRFNVTIVIVTHEMSVIRRLCDRAALLDKGKVVEIVEVRGNQIHARSDIGCELIRED

SEQ ID NO: 18741 - protein, 262 aa, Neisseria meningitidis
MLTLYGETFPSRLLLGTAAYPTPEILKQSVRTARPAMITVSLRRAGCGGEAHGQGFWSLLQETGVPVLPNTAGCQSVQEAVTTAQMAREVFETDWIKLELIGDDDTLQPDVFQLVEAAEILIKDGFKVLPYCTEDLIACRRLLDAGCQALMPWAAPIGTGLGAVHAYALNVLRERLPDTPLIIDAGLGLPSQAAQVMEWGFDGVLLNTAVSRSGDPVNMARAFALAVESGRLAFEAGPVEARDKAQASTPTVGQPFWHSAEY

SEQ ID NO: 18742 - protein, 95 aa, Neisseria meningitidis; identical to SEQ ID NO: 4938

SEQ ID NO: 18743 - protein, 332 aa, Neisseria meningitidis
MSRPVPAVFGSVFHSQMPVLAYREGKWQPTEWQSSQDLSLAPGAHALHYSSECFEGLKAFRQADGKIVLFRPTANIARMRQSADILHLPRPETQAYLDALIELVKRAADEIPDAPAALYLRPTLIGTDPVIGKAGSPSETALLYILASPVGDYFKVGSPVKILVETEHIRCAPHMGRVKCGGNYASAMHWVLKAKAEYGANQVLFCPNGDVQETGASNFILINGDEIITKPLTDEFLHGVTRDSVLTVAKDLGYTVSERNFTVDELKAAVENGAEAILTGTAAVISPVTSFVIGGKEIEVKSQERGYAIRKAITDIQYGLAEDKYGWLVEVC

SEQ ID NO: 18744 - protein, 351 aa, Neisseria meningitidis; identical to SEQ ID NO: 1414

SEQ ID NO: 18745 - protein, 66 aa, Neisseria meningitidis; identical to SEQ ID NO: 421

SEQ ID NO: 18746 - protein, 69 aa, Neisseria meningitidis; identical to SEQ ID NO: 3128

SEQ ID NO: 18747 - protein, 287 aa, Neisseria meningitidis
MKTLLPFFGVVRVSGEDRQTFLHGQLSNDINNLQTGQACYATYNTPKGRVIANMIVVNRGGDLLLIMAQDLLEATVKRLRMFVLRAKAVFEILEDYAVGAELEASAEPLAAQEPNLAFAAQQDSDGICSIALPHGGILRIAPKNTLPPYDAAAENAWRLHEIRSGYPWICAATKETAVAQMLNQHIIGGVHFKKGCYPGQEIIARAQYRGQVKRGLAVLSGNSAVEAGTLLTADGEEAGIVLDSVQDSENFTALAVIKFSAAQKELAAPNGGIFKAVHLFFKTENAE

SEQ ID NO: 18748 - protein, 162 aa, Neisseria meningitidis
MTALLVILALALIAAGTAGIVYPALPGLALMFAGTWLLAYSGGYQIYGAGVLWTVGLISLAGILADYVAGIWGTKYTGAGKLAVRGALVGSIIGMFFSLPGLILGPFIGAAAGELIDRRNMLQAGKAGLGTLLGLVVGTAFKIGCAVSILFILLVKYIAYLF

SEQ ID NO: 18749 - protein, 313 aa, Neisseria meningitidis
MPTPKAFALLGPTACGKTALALKIAETLPVEIISLDSALVYRDMDIGTAKPSHAERSFVPHHLIDIITPVQTYSAARFVEDCTRLIGEITARGKYPLIVGGTMMYFRALTQGLNDLPEADACLRADLDEQKQMYGLDFLYRTLQKVDPETACRLKPNDSQRIGRALEVYYLTGKPMSTHLGSPTSHTLPFDLHTAALIPENRARLHENIALRFHLMLEQGFIGEVENLRRLYPSLTADSPAIRCVGYRQAWEYLDGKTDFPAFVEKGIAATRQLAKRQLTWLRKTPLDCVTDPFSDGNSCTRLIEAAKRFFGA

SEQ ID NO: 18750 - protein, 220 aa, Neisseria meningitidis; identical to SEQ ID NO: 2583

SEQ ID NO: 18751 - protein, 321 aa, Neisseria meningitidis; identical to SEQ ID NO: 6649

SEQ ID NO: 18752 - protein, 142 aa, Neisseria meningitidis
MMFSWFKLFHLFFVISWFAGLFYLPRIFVNMAMIDVPRGNPEYVRLSGMAVRLYRFMSPLGFGAVVFGAAIPFAAGWWGSGWVHVKLCLGLMLLAYQLYCGVLLRRFQDYSNAFSHRWYRVFNEIPVLLMVAALYLVVFKPF

SEQ ID NO: 18753 - protein, 207 aa, Neisseria meningitidis; identical to SEQ ID NO: 4832

SEQ ID NO: 18754 - protein, 544 aa, Neisseria meningitidis; identical to SEQ ID NO: 3460

SEQ ID NO: 18755 - protein, 76 aa, Neisseria meningitidis; identical to SEQ ID NO: 3053

SEQ ID NO: 18756 - protein, 714 aa, Neisseria meningitidis
MNTPLFRLSLLSLTLAAGFAHAAENNAKVVLDTVTVKGDRQGSKIRTNIVTLQQKDESTATDMRELLKEEPSIDFGGGNGTSQFLTLRGMGQNSVDIKVDNAYSDSQILYHQGRFIVDPALVKVVSVQKGAGSASAGIGATNGAIIAKTVDAQDLLKGLDKNWGVRLNSGFASNEGVSYGASVFGKEGNFDGLFSYNRNNEKDYEAGKGFRNNFNGGKTVPYSALDKRSYLAKIGTTFGDGDHRIVLSHMKDQHRGIRTVREEFTVGSEDSRINIKRQAPAYRETTQSNTNLAYTGKNLGFVEKLDANAYVLEKERYSADDSGTGYAGNVKGPNHTRITTRGANFNFDSRLAEQTLLKYGINYRHQEIKPQAFLNSQFKIEDKEKATDEEKNKNRENEKIAKAYRLTNPTKTDAGAYIEAIHEIDGFTLTGGLRYDRFKVKTHDGKTVSSSNLNPSFGVIWQPHEHWSFSASHNYASRSPRLYDALQTHGKRGIISIADGTKAERARNTEIGFNYNDGTFAANGSYFWQTIKDALANPQNRHDSVAVREAVNAGYIKNHGYELGASYRTGGLTAKVGVSHSKPRFYDTHKDKLLSANPEFGAQVGRTWTASLAYRFQNPNLEIGWRGRYVQKAVGSILVAGQKDRNGKLENVVRKGFGVNDIFANWKPLGKDTLNVNLSVNNVFNTFYYPHSQRWTNTLPGVGRDVRLGVNYKF

SEQ ID NO: 18757 - protein, 245 aa, Neisseria meningitidis
MALQDRTGQKVPSVVFRTRVGDTWKDVSTDDLFKGKKVVVFSLPGAFTPTCSSSHLPRYNELFGAFKENGVDAIYCVSVNDTFVMNAWAAEEESDNIYMIPDGNGEFTEGMGMLVGKEDLGFGKRSWRYSMLVNDGVVEKMFIEPEEPGDPFKVSDADTMLQFVAPDWKAQESVAIFTKPGCQFCAKAKQALQDKGLSYEEIVLGKDATVTSVRAITGKMTAPQVFIGGKYIGGSEDLEAYLAKN

SEQ ID NO: 18758 - protein, 296 aa, Neisseria meningitidis; identical to SEQ ID NO: 337

SEQ ID NO: 18759 - protein, 207 aa, Neisseria meningitidis; identical to SEQ ID NO: 3013

SEQ ID NO: 18760 - protein, 175 aa, Neisseria meningitidis; identical to SEQ ID NO: 5147

SEQ ID NO: 18761 - protein, 127 aa, Neisseria meningitidis; identical to SEQ ID NO: 1080

SEQ ID NO: 18762 - protein, 210 aa, Neisseria meningitidis; identical to SEQ ID NO: 3262

SEQ ID NO: 18763 - protein, 102 aa, Neisseria meningitidis
LTPWADAYADLRGKTKVMTTQMGASRDVSKSAKGWSVGIGLNVGKQLTDSVGLEFDPYYRHKTIYKPREIVLDGDKTKMGRSKSNEYGFRVAATFYSQLKSK

SEQ ID NO: 18764 - protein, 327 aa, Neisseria meningitidis; identical to SEQ ID NO: 2154

SEQ ID NO: 18765 - protein, 315 aa, Neisseria meningitidis
MTDITPFANRLGKNIKHLMKWVKRNGIEAWRIYDRDIPQFPFAADVYGDRIHLQEYDTGWLMRPEEYEAWLAEVLEAVAFVTGFAPEQIRLKRRERQKGLQQYEKTGKAGDDFVITENGRKFWVNLDKYLDTGLFLDHRNTRKKVGETAAGKRFLNLFSYTGSFTVYAATGGAASSETVDLSNTYLDWAKRNFELNGIDTERHKIVRADVFQYLQTAYGEGRRFDLIVMDPPSFSNSKKMLDILDIQRDHKKLIDGAVKLLASDGILYFSNNLSSFVLDDLVSEQYAVKDISKQSVPEDFRNKKIHRCWEIRHKS

SEQ ID NO: 18766 - protein, 737 aa, Neisseria meningitidis
MTAISPIQDTQSATLQELREWFDSYCAALPNNDKKLVLAARSLAEAHYPADAATPYGEPLPDHFLGAAQMVHELDLLPDAVAATLLADIGRYVPDWNLLVSERCNSTVAELVKGVDEVQKLTHFARVDSLATPEERAQQAETMRKMLLAMVTDIRVVLIKLAMRTRTLQFLSNAPDSPEKRAVAKETLDIFAPLANRLGVWQLKWQLEDLGFRHQEPEKYREIALLLDEKRTERLEYIENFLNILRTELKKYNIHFEVAGRPKHIYSIYKKMVKKKLSFDGLFDIRAVRILVDTVPECYTTLGIVHSLWQPIPGEFDDYIANPKGNGYKSLHTVIVGPEDKGVEVQIRTFDMHQFNEFGVAAHWRYKEGGKGDSAYEQKIAWLRQLLDWRENMAESGKEDLAAAFKTELFNDTIYVLTPHGKVLSLPTGATPIDFAYALHSSIGDRCRGAKVEGQIVPLSTPLENGQRVEIITAKEGHPSVNWLYEGWVKSNKAIGKIRAYIRQQNADTVREEGRVQLDKQLAKLTPKPNLQELAENLGYKKPEDLYTAVGQGEISNRAIQKACGTLNEPPPVPVSETTIVKQSKIKKGGKNGVLIDGEDGLMTTLAKCCKPAPPDDIVGFVTRDRGISVHRKTCPSFRHLAEHAPEKVLDASWAALQEGQVFAVDIEIRAQDRSGLLRDVSDALARHKLNVTAVQTQSRDLEASMRFTLEVKQVNDLPRVLASLGDVKGVLSVTRL

SEQ ID NO: 18767 - protein, 223 aa, Neisseria meningitidis; identical to SEQ ID NO: 934

SEQ ID NO: 18768 - protein, 291 aa, Neisseria meningitidis
MEEGLIDRLLETLWLDRRLSQNTLNGYRRDLEKIARRLSQSGRMLKDADEADLAAAVYVDGEQRSSQARALSACKRLYIWMEREGIRTDNPTRLLKPPKIDKNIPTLITEQQISRLLATPDTDTPHGLRDKALLELMYATGLRVSEAVGLNFGNVDLDRGCITALGKGDKQRMVPMGQESAYWVERYYTEARPLLLKGRNCDALFVSQKKTGISRQLAWMIVKEYASQAGIGHISPHSLRHAFATHLVQHGLDLRVVQDMLGHADLNTTQIYTHVANVWLQGVVKEHHSRN

SEQ ID NO: 18769 - protein, 99 aa, Neisseria meningitidis; identical to SEQ ID NO: 7449

SEQ ID NO: 18770 - protein, 105 aa, Neisseria meningitidis
MQKRIDEIQSKYREWCHLLPQLEEDIRRWKHAVALIRDMDNFYTHEYQACHRAIEDGAEVDLRTEGEYSIMSEDALWNALGEFHQLAWLYLRSSVDALDKYTQED

SEQ ID NO: 18771 - protein, 199 aa, Neisseria meningitidis; identical to SEQ ID NO: 3649

SEQ ID NO: 18772 - protein, 662 aa, Neisseria meningitidis
MKISASDIAKLGIPSLPTDRQGIEYHAKKNNWQHCFEQKGRGRPKKLYEIASLPAEIRAAIMKRQSDELAEKMPKMLPQVRPGTAMSAQALAEAAKLLNEKQRSVADARCAVVAAVLGIKYEYDCSAKAAVAQFLGLLAEGKLDAVTLGNLEKANDRSRSAKVGERTLDGWISAYLKAENAIERLVALAPKTTKAVKPIESYGWLPMFMRFHNIPSAPKLAHSYRRFVQWAEAENMPVNDVPNLSMVRRVWDKLPLIMQERGRKTGAAYKSLLPYVKRDWGALKPNDVWIGDGHSFKAKVAHPVHGRPFKPEVTVIIDGCTRFVVGFSVSLAESCVAVSDALRIGVKHFGLPIIYYSDNGGGQTGKTIDHEITGITSRLGIRHETGIAGNPQGRGIIERWWKDNLIEMARQYETFAGAGMDSSTKNLMYRKMESAFNALEKGKDLTEEQQKYLKKLPSWSRFIADVVKCIDDYNNRPHGELPRHPDGGHYSPKAYREIRLEQDGIAPDMLSAEELATMFMPQEVRKVQRGWLDLFSNSYFSTELAEYHKDEVRVSYDLSDASAVNVFDMDGKFITKAQANGNTREAFPTARIDQLAEKRRKGKIKRAENAIKLANAEVNPALEQAAAWDELGHLGGNVIEAEYAVLPKTGTDDGIFLFEADM

SEQ ID NO: 18773 - protein, 311 aa, Neisseria meningitidis; identical to SEQ ID NO: 5677

SEQ ID NO: 18774 - protein, 159 aa, Neisseria meningitidis; identical to SEQ ID NO: 929

SEQ ID NO: 18775 - protein, 103 aa, Neisseria meningitidis; identical to SEQ ID NO: 1558

SEQ ID NO: 18776 - protein, 276 aa, Neisseria meningitidis; identical to SEQ ID NO: 15375

SEQ ID NO: 18777 - protein, 319 aa, Neisseria meningitidis
MSTFFRQTAQAMIAKHIDRFPLLKLDQVIDWQPIEQYLNRQRTRYLRDHRGRPAYPLLSMFKAVLLGQWHSLSDPELEHSLITRIDFNLFCCFDELSIPDYSTLCRYRNWLAQDDTLSELLKLINRQLTEKGLKIEKASAAVIDATIIQTAGSKQRQAIEVDEEGQISGQTTPSKDSDARWIKKNGLYKLGYKQHTRTDAEGYIEKLHITPANAHECKHLSPLLEGLPKGTTVYADKGYDSAENRQHLEEHQLLDGIMRKACRNRPLSEVQTKRNRYLSKTRYVVEQSFGTLHRKFRYARAAYFGLICARCRLKGSPDA

SEQ ID NO: 18778 - protein, 394 aa, Neisseria meningitidis
MGKHILLGVTGSIAAYKSCELVRLLKKQGHSVTVVMSRSATEFVSPLTFQALSGNPVLTDTHGGNGSNGMEHINLTRNADVFLIAPASMNTVAKICNGVADNLLTSLAAARKCPLAIAPAMNVEMWLNPANQRNIAQLVSDGITVYMPGLGEQACGENGMGRMPEPAELLDLLPDLWTPKILRGKKILITAGATFEAIDPVRGITNTSSGKMGVALARACRAAGAEVSLIHGQLQTALPFGISDTVQAVSAEDMHRAVHRLIEKQDAFISVAAVSDYKVKNKSTQKFKKDKNAKPLSIELDENPDILASIASLPNPPFCIGFAAETENVMAYAREKRIKKKIPVIVANDVSIAMGKPTNRITIIGDDGELSFPETSKDEAAMQIVERLAVYLNK

SEQ ID NO: 18779 - protein, 612 aa, Neisseria meningitidis; identical to SEQ ID NO: 5263

SEQ ID NO: 18780 - protein, 218 aa, Neisseria meningitidis
MDFEKARFNMVEQQIRPWDVLDFDVLDALAEIPRELFVDEDLQGLAYADMALPLANGHKMLEPKVVARLAQGLKLTKNDTVLEIGTGSGYAAALLAKLAGRVVSDDIDAEQQKRAKAVLDGLSLENIDYVQNNGLTELSAGAPFDAVYVGGAVNLVPEVLKEQLKDGGRMAVIVGRKPVQRALLITRKGDVFEEKVLFDTLVAHLDDKDADPFGGFDF

SEQ ID NO: 18781 - protein, 209 aa, Neisseria meningitidis; identical to SEQ ID NO: 1305

SEQ ID NO: 18782 - protein, 66 aa, Neisseria meningitidis; identical to SEQ ID NO: 3561

SEQ ID NO: 18783 - protein, 636 aa, Neisseria meningitidis
MTLETLIALPRNIKKICFLIHDFLMIFIAFWFTQSLKADYSDEWFDPANWQSFLLTAFLTACLFFRMGLYRAVTRFISFRILSTALAGSLASAVLFFLNTLIFEERLRLALPIVYFLLLFVSVTGSRMVLRGLLSEHPKKQMAPVIIYGAGRSGRQLLKAVKQMREYSAAAFVDDDPKLWHTVIYDLAVYQPDAIAFLIERYGVEKILLAIPGATQEQRLRIINKLEAYPCEVLTIPGMKDLMDGKISIGTLKKISVSDLLGRDSVAPDDRLMNADIEGKTVMVTGAGGSIGSELCRQIIRRRPEKLLLFELSEFALYAIEKELRETCIQKRLDTEILPFLGSVQNRTLLEHVMTAFSVATVYHAAAYKHVPMVEFNTVEGIRNNIFGTLECALAATASGVRTFVLISTDKAVRPTNTMGAGKRMAELCLQALAAEPGQKTRFSMVRFGNVLGSSGSVVPLFEKQIAEGGPLTLTHPEITRYFMTIPEAAQLVIQAGAMGTGGDVFVLDMGESVKIIDLARQMITLSGLKPNTPEQPDGDIEILITGLRPGEKLYEELLIGDNVRKTGHPRIMTADEAMLPWHELSALLDRIRAACDRYDQQAIRTLLINAPTGFAPSDGICDLLWVRETHRKNAV

SEQ ID NO: 18784 - protein, 131 aa, Neisseria meningitidis; identical to SEQ ID NO: 3391

SEQ ID NO: 18785 - protein, 513 aa, Neisseria meningitidis
MKFLDREASIAKPGFNRWLVPPAALAVHLAIGQIYAYSVFNAPLTKLIGITESAAGDWKLTTVGWIFSIALAMLGASAALFGTWMERVGPRKAIFAAACCFSLGFFVSAFGVSTHNLFLLYLGNGVIGGVGLGLGYIGPVSTLMKWFPDKPGMATGLAIMGFGGGAMLASPLSVSLMNAFSNAASVGVVETFAVLGLLYLALMMFGAFTIRVPADGWKPEGYIAPKTQNKLVSSNHVNVSQAMKTPQFWLLFWVLCLNVTAGIGVLGQASVMIQELFSETSIGRQAAVGAGAAAGFVSLLSLFNMGGRFLWSSVSDKIGRKNTYTIFFVLGSLLYFAVPSIGEGGSKALFIIGFCVIISMYGGGFAAIPAYLKDLFGTYQVGAIHGRILLAWSTAAVIGPVLVNYIRQSQIDSGIPAAQAYSVTMYIMAGLLIIGLLCNLAVKSVHEKHHEKDIKTAAHSGNPDDETAISDAYLVGEKVSGGGISVWWRWALAVIPLAYGVVMVFVKALDLFS

SEQ ID NO: 18786 - protein, 589 aa, Neisseria meningitidis
MTVQTKTKGLAWQEKPLSDNERLKTESNFLRGTILDDLKDPLTGGFKGDNFQLIRFHGMYEQDDRDIRAERAEAKLEPLKFMLLRCRLPGGIIKPSQWIELDKFARENSHYRSIRLTNRQTFQFHGVPKAKLQTMHRLLHKLGLDSIATAADMNRNVLCTSNPIESELHRQAYEYAKKISEHLLPRTRGYLDVWVDGKKVQSSDDFLQEDEPILGKTYLPRKFKTAVVIPPLNDVDCYGNDLDFVAISDGGGQLAGFNVLAGGGLSMEHGNTKTYPNISLELGFVPPEHALKAAEAVVTTQRDFGNRSDRKNARTRYTIQNMGLDNFRAEVERRMGMPFEPIRPFKFTGRGDRIGWVKGIDGNWHLTLFIESGRLVDEGGKQLLTGVLEIAKIHKGDFRITANQNLIVANVAEADKAKIEELARTYGLIRNDVSKLRENAMSCVSFPTCPLAMAEAERVLPDFIDELDKIMAKHGTSDDYIVTRITGCPNGCGRAMLAEIGLVGKAVERYNLHIGGDREGVRIPRLYKENITLPEILSELDDLIGKWAAGRDTDEGFGDFAIRTGIVKPVLDAPVDFWDASKAVPIARA

SEQ ID NO: 18787 - protein, 74 aa, Neisseria meningitidis; identical to SEQ ID NO: 801

SEQ ID NO: 18788 - protein, 344 aa, Neisseria meningitidis
  misc_feature 338, 339: 'Xaa' is any amino acid
MSTQTNFDLVLFGATGDLAMRKLLPCLYQAHVAGLLHPEGRILGVSRSELDTEGFLAKVETSSKIHVKENFSDEAWASFVERFAYLKVDVTQPDDFAALGDLVKARKETDNVVIYLSTAPKFFAQTCENLAKIGLNADNVRVVLEKPLGTDLASSQQINTDVARYFKEGQIYRIDHYLGKESLQNLLALRFANVMFEPLWNNKYIESVQLTIAEQLGVEERGEFYDITGALRDMVQNHLMQMLCMTAMEAPASLDADAVRDEKVKVIKSLKPLTVESVNENVVRGQYTAAKGMNGYLEEINVPQDSFTETYVAIKAEIENERWKAFPSTCVPASAWRXXTHLIN

SEQ ID NO: 18789 - protein, 358 aa, Neisseria meningitidis
MKPSILEKLQQLGDRLEEVTHLLGQPEATADMDNYRKLTREHAELTPVVEVFQNYRLAQSDLADAEEMLSDPEMKDFAAEEIEAAKAKINTLDTELQKLLLPKDADDDKNIFIEIRAGTGGDEAALFAGDLLRMYSRYAERNRWQVEIVSANESELGGYKEVIARIVGLGAYSRLKFESGGHRVQRVPATESQGRIHTSACTVAVMPEADELEDIELNPADLRIDTFRASGAGGQHINKTDSAVRITHLPTGMVVECQDGRSQHANKAQAMKVLAARLNDAQKREAQAKEAAERKSLIGSGDRSERIRTYNYPQGRVTDHRINLTLHKLDFVMDGDLAEITNALIAEHQAELLAAMGD

SEQ ID NO: 18790 - protein, 481 aa, Neisseria meningitidis
MKLPIQKFMMLFAAAISLLQIPISHANGLDARLRDDMQAKHYEPGGKYHLFGNARGSVKNRVYAVQTFDATAVGPILPITHERTGFEGIIGYETHFSGHGHEVHSPFDNHDSKSTSDFSGGVDGGFTVYQLHRTGSEIHPEDGYDGPQGSDYPPPGGARDIYSYYVKGTSTKTKTNIVPQAPFSDRWLKENAGAASGFFSRADEAGKLIWESDPNKNWWANRMDDIRGIVQGAVNPFLMGFQGLGVGAITDSAVNPVTYAAARKTLQGIHNLGNLSPEAQLAAATALQDSAFAVKDSINSARQWADAHPNITATAQTALSVAEAATTVWGGKKVELNPTKWDWVKNTGYKKPAARHMQTVDGEMAGGNKPPKPSTQQHSTHSDNNIGLPAPYVKPDTSISPTGTIYVDSKGNAIPTPIGGYITGSPDARFIQVRDSNGNLTGARIDDAHHANTHQDPRALTGHAHVPGVTNDDGTPWLPIK

SEQ ID NO: 18791 - protein, 171 aa, Neisseria meningitidis
MKIKQIVKPGLAVLAAGVLSACATKSNVKADGTTDNPVFPKPYSVTLDNKRGTFPTYDELDQMRPGLTKDDIYKILGRPHYDEGMYGVREWDYLFHFHTPGVGIDPENTSGVEDVTTCQYKVIFDKDKFARSFYWNPVFPKDAACPPPAPKAEPQVIIREIVPAKPKRIRQ

SEQ ID NO: 18792 - protein, 680 aa, Neisseria meningitidis
MMSPETQKQLKITDVSAKKLDKLNLHTAWDLVLHLPLRYEDETHIMPIKDAPIGVPCQVEGEVIHQEVTFKPRKQLIVQIADGSGSVLFLRFIHFYASHQKQTAVGKRIRAVGEIKHGFYGDEMIHPKIRDAEGGGLAESLTPVYPTVNGLNQPTLRRIIQTALDVTPLHDTLPDALLCRLKLPHLAESLRLLHSPPPSFTIHQLSDGTLPAWQRLKFDELLAQQLSMRLARQKRIGGTAAALGGDGTLTQALRQALPFALTDAQEKVVSEICRDMAQTYPMHRLLQGDVGSGKTIVAALSALTAIESGAQVAVMAPTEILAEQHFIKFKQWLEPLGIEVVRLFGSLRKKAKDEAKAKLADGSVKIAIGTHALFSDGVTFHNLGLTIVDEQHRFGVAQRLALKNKGREVHQLMMSATPIPRTLAMSFFADLDVSVIDKLPPGRTPIKTRLVNNVRRAEVEGFVLNTCRKGRQAYWVCPLIEESETLQLQTAAETLARLQTALPELNIGLVHGRMKAAEKAEVMARFSSGELNVLVATTVIEVGVDVPNAALMVIEHAERMGLAQLHQLRGRVGRGAAESVCVLLFAEPLGELAKARLKVIYEHTDGFEIARQDLNIRGPGEFLGARQSGVPMLRFAKLEEDLHLLEQAREIAPILIEQNPEIVEAHLARWLSGREGYLGV

SEQ ID NO: 18793 - protein, 257 aa, Neisseria meningitidis
MYRQIGMWDQKWVIGNWKMNGRLQNNNALMHRFRILPTAERVLIGLAAPTVYLLQLHNAMQIVLNNRILTCAQDVSRFPDNGAYTGEVSAEMLADTGTDIVLIGHSERSLYFGEKNEIQRRKMENVLNVGLIPLLCVGESLEEREAGKEHEVIAHQLSILQGLDTKNIAVAYEPVWAIGTGKVATVEQIADMHAFIYKEILSLCGSDVKIRVLYGGSVKADNAADIFAVPYVDGALVGGASLSYDSFTAIISAAQNA

SEQ ID NO: 18794 - protein, 228 aa, Neisseria meningitidis
MKTINPETTVIVFDLDDTLYSEYEYKLSGIRSVIDTVAALYPDWNSDNLWRNIDPDGKDWLDKLCRHCGFNESEKQVLLWQYRLHRPTLTPYAPPDFLSELTAPFAARALITDGRSLTQRLKLEALGLSSLFDDILISEACSSEKPDGKRFRHLQDKYADKAGCFIYIGDNISKDFIAPNTLGWITIGLLPSGQNIHRHQPESFNTEYHPDFWVNSLQDLVPIIDSNT

SEQ ID NO: 18795 - protein, 285 aa, Neisseria meningitidis
MNYALDALWWKLTSQPVRDLASLLTAPPLWQSGCELGVRELLGERGFRYLLALDADPAPLTEHLTRRAPFGHRLGIYAEELLAFWFANAPHAELLAHNLTVSGSDGNTQGAADFVVRLNGKPYHIELTCKYYGGGTGRLEDMRGLDPKDTLLGKAAKLTAQLGLPHTSDGIRTLRQHGLPLDVKPVSIVRGIGFFPHGFHAFEPPLNPYGWRGIYIQDWAEYGFKRQEVRYHLLDRMAYLAPARVAETETLNATEIRRIDQGLIAVLECRPDGFWHEIERIMKAV

SEQ ID NO: 18796 - protein, 106 aa, Neisseria meningitidis
MMGNKLTPPAKLPDEQDLRAVLAYNMRLFRVNKGWSQEELARQCGLDRTYVSAVERKRWNIALSNIEKMAAALGVAAYQLLLPPQERLKLMTNSADTRQMPSESGI

SEQ ID NO: 18797 - protein, 291 aa, Neisseria meningitidis
MKGIILAGGSGIRLYPITRGVSKQLLPVYNKPMIYYPLSVLMLAGIRDVLVITTPEDNDAFRRLLGDGSDFGIQISYAIQPSPDGLAQAFLIGEEFIGDDSVCLVLGDNIFYGQHFSQSLKEAAASVETKGATVFGYQVKDPERFGVIEFDENFKALSIEEKPKQPKSDWAVTGLYFYDNRVVEFAKQVKPSERGELEITTLNQMYLDDGSLNVQLLGRGFAWLDTGTHASLLEAASFVETIENIQNLQVACLEEIAWRNGWLSSEEIRNLAKPMCKNEYGRYLLRLVGKD

SEQ ID NO: 18798 - protein, 402 aa, Neisseria meningitidis; identical to SEQ ID NO: 2438

SEQ ID NO: 18799 - protein, 297 aa, Neisseria meningitidis; identical to SEQ ID NO: 13535

SEQ ID NO: 18800 - protein, 185 aa, Neisseria meningitidis; identical to SEQ ID NO: 5086

SEQ ID NO: 18801 - protein, 109 aa, Neisseria meningitidis; identical to SEQ ID NO: 899

SEQ ID NO: 18802 - protein, 446 aa, Neisseria meningitidis
MLNPSRKLVELVRILEEGGFIFSGDPVQATEALRRVDGSTEEKIIRRAEMIDRNRMLRETLERVRAGSFWLWVAAATFAFFTGFSGTYLLMGNQGLNFFLVLAGVLGMNTLMLAVWLAMLFLRVKVGRFFSSPATWFRGKDPVNQAVLQLYADEWRQPSVRWKIGATSHSLWLCTLLGMLVSVLLLLLVRQYTFNWESTLLGDSSSVRLVEMLAWLPAKLGFPVPDARAVIEGRLNGNIADARAWSGLLVGSIACYGILPRLLAWVVCKILLKTSENGLDLEKPYYQAVIRRWQNKITDADTRREIVSAVSPKIVLNDAPKWAVMLETEWQDGEWFEGRLAQEWLDKGVATNREQVAALETELKQKPAQLLIGVRAQTVPDRGVLRQIVRLSEAAQGGAVVQLLAEQGLSDDLSEKLEHWRNALAECGAAWLEPDRAAQEGRLKDQ

SEQ ID NO: 18803 - protein, 92 aa, Neisseria meningitidis
MHTELNNGTLHISGDVTVKTLTAAAFTRFRQQCRLKDTRAVDLSGVGRADSACVSLLLEVLRGCKGSVRLTGIPESVRALSELYEIKDWLKS

SEQ ID NO: 18804 - protein, 87 aa, Neisseria meningitidis; identical to SEQ ID NO: 932

SEQ ID NO: 18805 - protein, 242 aa, Neisseria meningitidis
MCRTAANHPFSRKIFDFKLPMNHDITFLTLFLLGFFGGTHCIGMCGGLSSAFALQLPPHINRFWLILLLNTGRVSSYTAIGLILGLIGQVGVSLDQTRVLQNILYTAANLLLLFLGLYLSGISSLAAKIEKIGKPIWRNLNPILNRLLPIKSIPACLAVGILWGWLPCGLVYSASLYALGSGSAATGGLYMLAFALGTLPNLLAIGIFSLQLKKIMQNRYIRLCTGLSVSLWALWKLAVLWL

SEQ ID NO: 18806 - protein, 117 aa, Neisseria meningitidis; identical to SEQ ID NO: 408

SEQ ID NO: 18807 - protein, 63 aa, Neisseria meningitidis; identical to SEQ ID NO: 5865

SEQ ID NO: 18808 - protein, 37 aa, Neisseria meningitidis; identical to SEQ ID NO: 14718

SEQ ID NO: 18809 - protein, 322 aa, Neisseria meningitidis; identical to SEQ ID NO: 3333

SEQ ID NO: 18810 - protein, 281 aa, Neisseria meningitidis
MNKFSQSGKGLSGFFFGLILATVIIAGILFYLNQSGQNAFKIPVPSKQPAETEILKPKNQPKEDIQPEPADQNALSEPDAATEAEQSDAEKAADKADEVEEKAGEPEREEPDGQAVRKKVLTEEREQTVREKAQKKDAETVKKQAVKPSKETEKKAPKEEKKAEKEKVAPKPTPEQILNSGSIEKARSAAAKEVQKMKTSDKAEATHYLQMGAYADRRSAEGQRAKLAILGISSKVVGYQAGHKTLYRVQSGNMSADAVKKMQDELKKHEVASLIRSIESK

SEQ ID NO: 18811 - protein, 134 aa, Neisseria meningitidis
VPSGKPPHPAHQATTNKKCRLNASDGIPGKLAHRTLPRSCTNKHGTADVPDHTVFKAFCKIKANPTAIRRSPKNILPNTPPFFQVKIHHRTRRRRNAVSRKFKHHGFRAAATFPFPCMKGSIKVPPSNRFSDGI

SEQ ID NO: 18812 - protein, 298 aa, Neisseria meningitidis
LNPTNDLKAWQQRAQAQTELLLERFLPSENEIPHTLHEAMRYAVLDGGKRLRPMLVLAASELGEAVHEAVEQAMAAIEMIHAYSLVHDDMPAMDNDSLRRGKPTCHIKYGEATALLVGDALQTQAFDVLSRPTELPAARQLAMLSVLAKAGGSAGMAGGQAIDLANVGKQMVQADLEQMHSLKTGALIRAAVLLGAMSCPNLSEDSLAVLDDYAAKLGLAFQVIDDVLDCEADTATLGKTAGKDADNDKPTYVKLMGLEAARSYAHKLVAEAVALLEPFGDKALRLRQLAEFAVARKY

SEQ ID NO: 18813 - protein, 238 aa, Neisseria meningitidis
LVKCRLKIISDGIFIWGESEVASVFLEGEAVEVGNIFCIGRNYAAHIEELKNEIPSEPVVFMKPSGSILNSGGTILLPEFSRDVQFECELVLLVGKDSDGTGEGKDILGCVAGYGVGLDLTARDIQCRLKEKGLPWLKAKGFRHSACVSDFAAAGRIGNPENVLFSLKQNGVLKQRGDTGLMIYPIREILHKLAADYGLGKGDLVFTGTPSGVGAIGAGDNLALELDGLVRASFTVGC

SEQ ID NO: 18814 - protein, 119 aa, Neisseria meningitidis; identical to SEQ ID NO: 16438

SEQ ID NO: 18815 - protein, 254 aa, Neisseria meningitidis
MPTEDIEEIFMSANVSRLVVQNLQKSFKKRQVVKSFSLEIESGEVIGLLGPNGAGKTTSFYMIVGLIAADAGSVMLDGQELRHLPIHERARLGVGYLPQEASIFRKMTVEQNIRAILEIRTKDKNQIDREIEKLLADLNIERLRNNPAPSLSGGERRRVEIARVLAMKPHFILLDEPFAGVDPIAVIDIQKIIGFLKSRGIGVLITDHNVRETLSICDRAYIISDGTVLASGKPDDLVGNEQVRSVYLGENFKY

SEQ ID NO: 18816 - protein, 201 aa, Neisseria meningitidis
MLCPNTARNKENIMSIKSDKWIRRMSEEFGMIDPFEPNQIKEADGKRIISYGTSSYGYDIRCANEFKIFTNINSTIVDPKNFDPKNFVTVEDDCCIIPPNSFALARTVEYFRIPRNVLTVCLGKSTYARCGIIVNVTPFEPEWEGYVTLEFSNTTPLPAKIYAGEGVAQVLFFESDEICKTSYKDRNGKYMGQTGVTLPKA

SEQ ID NO: 18817 - protein, 189 aa, Neisseria meningitidis
MAAGKHTKHSNRVRIIGGQCRGRKLSFTSADGLRPTPDSVREKLFNWLGQDLTGKTVLDLFGGSGALGIEAASRNAKRVLISDNNRQTAQTLQKNSRELGLGQVQIVCSDGIAYLKTVSEQFDVVFLDPPFAWQDWQILFDALKPCLNPRAFVYLEAGTLPNIPDWLTEYREGKSGQSTFELRVFQVAE

SEQ ID NO: 18818 - protein, 166 aa, Neisseria meningitidis; identical to SEQ ID NO: 1704

SEQ ID NO: 18819 - protein, 259 aa, Neisseria meningitidis
MKEHKARKRFGQNFLQDTRIISDIVNAVRPQADDVVIEIGPGLAAITEPLAKKLNRLHVVEIDRDIVCRLKTLPFADKLVIHEGDVLQFDFNGIAGKKKIVGNLPYNISTPLLFKLAEVADDVVDMHFMLQKEVVERMVAAPKSNDYGRLGVMLQYFFDMEMLIDVPPESFDPAPKVDSAVVRIIPVKHRIGRADDFEYFAKLVKLAFHQRRKTIRNNLKELAGDDDLQAVDINPQDRAEHIAPEKYVALSNYLAGKAV

SEQ ID NO: 18820 - protein, 505 aa, Neisseria meningitidis; identical to SEQ ID NO: 2655

SEQ ID NO: 18821 - protein, 500 aa, Neisseria meningitidis
MSREMLQLAEALASEKNVDAEVVFQALEFALSTAAKKKADREHMDVRVQINRDTGEYQTFRRWLIVADEDYTYPDVEKTIEEIQEEIPGTAIQIGEYYEEQLPNEGFGRQAAQTAKQIILQRIRDAEREQNLNEFLAVKEDIVSGTVKRVERHGIIVEVVAGKLDALIPRDQMIPRENFRSGDRIRALFLRVEEIGNTGRKQVILSRTSGDFLVKLYANEVPEIADGMLEIRAVARDPGQRAKVAVKANDQRIDPQGTCIGVRGSRVNAVSNELSGERIDVVLWSPEPAQFVMSALSPAEVSRIVIDEDKHAVDVIVAEDQLALAIGRGGQNVRLASDLTGWQLNIMTSAEADERNAAEDAAIRRLFMDYLNVDEETADVLVQEGFATLEEVAYVPAAELLAIEGFDEEIVDMLRNRARDAILTMAIAAEEKLGEVSDDMRNLEGIDADMLRSLAEAGITTRDDLAELSVDELIEITGVNEETAKAVILTAREHWFTEDK

SEQ ID NO: 18822 - protein, 208 aa, Neisseria meningitidis
MRKIRTKICGITTPEDASAAVAAGADAVGLVFFQGSSRAVDIARAKKITAALPPFVSVVALFVNESAQNIRRILAEVPIHIIQFHGDEDDTFCRQFHRPYIKAIRVQTTSDIRNAADRFPDAQALLFDAYHPSEYGGTGHRFDWTLLAEYSGKPWVLAGGLTPENVGEAVRITGAEAVDVSGGVEASKGKKDPAKVAAFIATANRLSR

SEQ ID NO: 18823 - protein, 1296 aa, Neisseria meningitidis
MTYPIPKPREKSRWLNLSQGSLPLALARYLPHRRLKVVLTQDAEQALRLQTAWRFFRPHDTAVFLPDWETLPYERFSPHQDLVSERLSALWQIKSGAADVLFVPVATAMQKLPPVPFLAGRTFWLKTGQTLDIGRLKSDLVDAGYNHVSHVVAAGEFAVRGGIVDLFPMGSEMPYRIDLFDDEIDSIKTFDTETQRTISPVSEIRLLPAHEFPTDNEAQKIFRSRFREEVDGNPNDAAVYKAVSNGHFGAGVEYYLPLFFENELETLFDYIGEDALFVSLGDVHAEANRFWSDVKSRYAMAQGDETYPPLLPQYLYLSADVFAGRLKNYGQVLPDVSGKEYTLPDLAVNRQADEPLQALKDFQTAFDGRILLCAESLGRRETMLGFLQQNGLKAKPVSDWQGFLSAHEPLMITVAPLAYGFKLGGLQSPSQQQAAPASEGEGDAITDQTEFSASATNPLPSPLPQEREQSAAAVSDDLKTKSSLHPVANNLYGQTRQQAAPSPVGEDWGESKTVAAQTEFSVSATNPLPSPLPQEREQSTAAISDSLKTKSSLYPIENSLHGQIQQQPAPSPVGEGWGEGKAVAAQSAIAVITESDLYQYVARSRIHNRRKKHAAVSDDLLRDLAEINIGDPVVHEEHGIGRYMGLITMNLGGETNEMMLLEYAGEAQLYVPVSQLHLISRYSGQAHENIALHKLGSGAWNKAKRKAAEKARDTAAELLNLYARRAAQSGHKFEINELDYQAFADGFGYEETEDQAAAIAAVIKDLTQAKPMDRLVCGDVGFGKTEVALRAAFVAVMGGKQVAVLAPTTLLVEQHAQNFADRFADFPVKVASLSRFNNSKATKAALEGMADGTVDIVIGTHKLVQDDIKFKNLGLVIIDEEHRFGVRQKEQLKRLRANVDILTMTATPIPRTLSMALEGLRDFSLITTAPSRRLAVKTFVKPFSEGSVREAVLRELKRGGQVFFLHNEVDTIENMRERLETLLPEARIGVAHGQLRERELEQVMRDFLQQRFNVLLCSTIIETGIDIPNANTIIINRADKFGLAQLHQLRGRVGRSHHQAYAYLLTPEYITKDAEKRLDAIAAADELGAGFTLAMQDLEIRGAGEILGEGQSGEMMQVGFTLYTEMLKQAVRDLKKGRQPDLDAPLGITTEIKLHSPALLPESYCPDIHERLVLYKRLAVCETVQQINAIHEELVDRFGLPEQPVKTLIESHHLRLMAKELGINAIDAAGEAVTVTFGKNNNIDPTEIILLIQNDKKYRLAGADKLRFTAEMENIEVRINTVKNVLKTLQNRCLPK

SEQ ID NO: 18824 - protein, 179 aa, Neisseria meningitidis
MNIIDTRIPDVKLLEPKVFGDERGFFMETFRDEWFRQNVAERTFVQENHSKSTQGVLRGLHYQTENTQGKLVRVVSGEVFDVAVDMRRDSPTFGHWVGEVLSADNKRQLWVPEGFAHGFYVLSDEAEFVYKCTDYYNPNAEHSLIWNDATVGIDWPLLGEPSLSAKDLAGKMLAEAATF

SEQ ID NO: 18825 - protein, 81 aa, Neisseria meningitidis; identical to SEQ ID NO: 2079

SEQ ID NO: 18826 - protein, 126 aa, Neisseria meningitidis; identical to SEQ ID NO: 6506

SEQ ID NO: 18827 - protein, 239 aa, Neisseria meningitidis; identical to SEQ ID NO: 1086

SEQ ID NO: 18828 - protein, 60 aa, Neisseria meningitidis; identical to SEQ ID NO: 2288

SEQ ID NO: 18829 - protein, 252 aa, Neisseria meningitidis
MKQKKTAATVIAAMLAGFAAAKAPEIDPALVDTLVAQIMQQADRHAEQSQKPDGQAIRNDAVRRLQTLEVLKNRALKEGLDKDKDVQNRFKIAEASFYAEEYVRFLERSETVSESALRQFYERQIRMIKLQQVSFATEEEARQAQQLLLKGLSFEGLMKRYPNDEQAFDGFIMAQQLPEPLASQFAAMNRGDVTRDPVKLGERYYLFKLSEVGKNPDAQPFELVRNQLEQGLRQEKARLKIDAILEENGVKP

SEQ ID NO: 18830 - protein, 392 aa, Neisseria meningitidis
MTGRTGGNGSTQAQPERVMLVGVMLDKDGTGSSAARLNGFQTALAEAVELVKAAGGDSVRVETAKRDRPHTALFVGTGKAAELSEAVAADGIDLVVFNHELTPTQERNLEKELKCRVLDRVGLILAIFARRARTQEGRLQVELAQLSHLAGRLIRGYGHLQSQRGGIGMKGPGETKLETDRRLIAHRINALKKQLANLKKQRALRRKSRESGTIKTFALVGYTNVGKSSLFNRLTKSGIYAKDQLFATLDTTARRLYISPECSIILTDTVGFVSDLPHKLISAFSATLEETAQADVLLHVVDAAAPNSGQQIEDVENVLQEIHAGDIPCIKVYNKTDLLPSEEQNTGIWRDAAGKIAAVRISVAENTGIDALREAIAESCAAAPNTDETEMP

SEQ ID NO: 18831 - protein, 758 aa, Neisseria meningitidis
MTTLHFSGFPRVGAFRELKFAQEKYWRKEISEQELLAVAKDLREKNWKHQVAANADFVAVGDFTFYDHILDLQVATGAIPARFGFDSQNLSLEQFFQLARGNKDQFAIEMTKWFDTNYHYLVPEFHADTEFKANAKHYVQQLQEAQALGLKAKPTVVGPLTFLWVGKEKGAVEFDRLSLLPKLLPVYVEILTALVEAGAEWIQIDEPALAVDLPKEWVEAYKDVYATLSKVSAKILLSTYFGSVAEHAALLKALPVDGLHIDLVRAPEQLDAFADYDKVLSAGVIDGRNIWRANLNKVLETVEPLQAKLGDRLWISSSCSLLHTPFDLSVEEKLKANKPDLYSWLAFTLQKTQELRVLKAALNEGRDSVAEELAASQAAADSRANSSEIHRADVAKRLADLPANADQRKSPFADRIKAQQAWLNLPLLPTTNIGSFPQTTEIRQARSAFKKGELSAADYEAAMKKEIALVVEEQEKLDLDVLVHGEAERNDMVEYFGELLSGFAFTQYGWVQSYGSRCVKPPIIFGDVSRPEAMTVAWSTYAQSLTKRPMKGMLTGPVTILQWSFVRNDIPRSTVCKQIALALNDEVLDLEKAGIKVIQIDEPAIREGLPLKRADWDAYLNWAGESFRLSSAGCEDSTQIHTHMCYSEFNDILPAIAAMDADVITIETSRSDMELLTAFGEFQYPNDIGPGVYDIHSPRVPTEAEVEHLLRKAIEVVPVERLWVNPDCGLKTRGWKETLEQLQVMMNVTRKLRAELAK

SEQ ID NO: 18832 - protein, 751 aa, Neisseria meningitidis
MGQYKKLWYLLFAVLAVCFTILGYMGSEVYKKAPPYPEQVVSASGKVLMTKDDILAGQSAWQTTGGMEVGSVLGHGAYQAPDWTADWLHRELVAWLDLTAQETYGKKFDEVSPEEQAVLKTRLADEYHNQSRIKEDGSVVVSETRVKAIESILPYYHGVYSDDPKFQTTREHFAMKNNTLPSQEAREKLFDFFFWTSWSASTNRPDENFTYTNNWPHEPLINNVPTTENYMWSFTSVVLLLMGIGLLMWGYSFLTKHEEVEVPTEDPISKVQLTPSQKALGKYVFLTVALFVVQVLLGGLTAHYTVEGQGFYGIDEALGFEMSDWFPYALTRTWHIQSAIFWIATGFLTAGLFLAPIVNGGKDPKFQRAGVNFLYIALFIVVGGSYAGNFFALTHILPPEFNFWFGHQGYEYLDLGRFWQLLLMVGLLLWLFLMLRCTVSAFKEKGVDKNLLAIFVASMVGVGVFYAPGLFYGEKSPIAVMEYWRWWVVHLWVEGFFEVFATAAFAFVFYNMGFVRRSTATASTLAAAAIFMLGGVPGTLHHLYFSGSTSASMAIGACFSALEVVPLVLLGREAYEHWSYQHLSDWAKRLRWPLMCFVAVAFWNMIGAGVFGFLINPPISLFYIQGLNTSAVHAHAALFGVYGFLALGFVLLVARYLKPNAQFDDKLMTWGFWLLNGGLVGMIAISLLPVGAIQAYASITHGLWYARSEEFLQMEILDTLRWVRTAADLVFIGGAICVAIQATKIVFGRDK

SEQ ID NO: 18833 - protein, 351 aa, Neisseria meningitidis
VFETPTFEQIRERILRDTKSLWPDADISPDSDHYVHASRLASCAEGQYAHQSWIVRQIFPDTADREYLERHASMRGLSRRNPTTASGTLTVSGIAQSMLSDDLQVRIGQRFYRTTARAVIGSGGTAEIPAIADEPGAAANVRDGEAQLMAAPAGVATECRLTVQGGTDRESDASLLARLLEIIRRPPAGGNRYDYKNWALSVDGVTSAYVYPLRRGLGTVDIAITSADGVPSEETVRRVQAYIDEMRPVTAKNALVLKPTVTAVPVTVQVKLDGIDLDEAKRRIRTALKEYFDTLIPGDGLTVSQIEAAISNVDGVIDRRLTAPTANRAADTVNRIEWFKAGAINVTEMPS

SEQ ID NO: 18834 - protein, 247 aa, Neisseria meningitidis
MPDAVKKVYLIHGWGANRHMFDDLMPRLPATWPVSAVDLPGHGDAPFAQPFDIEAAADAVAAQIDTPADILGWSLGGLVALYLAARHPDKVRSLCLTASFARLTADEDYPEGLAAPALGKMVGAFRSDYAKHIKQFLQLQLLHTPDADGIIGRILPDLARCGTPSALQEALDAAERADARHLLDKIDVPVLLVFGSKDAITPPRMGEYLHRRLKGSRLVVMEKAAHAPFLSHAEAFAALYRDFVEGV

SEQ ID NO: 18835 - protein, 443 aa, Neisseria meningitidis
MLFNHTASELLDLCRRTLDLAKAAGATAAEADFSESLGQSVSVRLGEIEQIEFQQDKSLDITVYVGKRKGRASTADFSEKALQDTVKAAIDIARYTAEDDCAGLADASLMAQHIGDPDLYHEWDLDTEAAVELAKQCEQAALNEDERIENSEGAAVQTGHYQYVYGNTHGFAAHQQGTRHSISCSVVAADENGMQRDYWYDSSCRHQDMDSPTQIGQTAAERTLRRLNSRSIPTGSYPVLFDATVSGGLIGHLVGALSGGSLYRQSSFLIDSIGKQVLPDFLSLREEPHIPRAFGSTYFDSEGVATRPRFVIRDGIVEGYFLSSYSARKLGMQTTGNAGGAHNLYLNHTHETQSDLLKEMGTGLLVTELMGQGANTITGDYSRGAAGFWVENGVIAYPVHEITVAGRLQDMYRDIVGVADDALRRSSNKIGSILIAGMTVAGS

SEQ ID NO: 18836 - protein, 77 aa, Neisseria meningitidis; identical to SEQ ID NO: 1677

SEQ ID NO: 18837 - protein, 300 aa, Neisseria meningitidis; identical to SEQ ID NO: 2507

SEQ ID NO: 18838 - protein, 166 aa, Neisseria meningitidis
LGIHPNSAALFYRKIRMVINHHLALAADEVFEGSVEPDESDFGGRRKGRRGRGAAGKVVVFGILKRNGRVYTVVVDNAKSETLLPVIKKKIMPDSIVYTDSLSSCDKLDVSGFIHYRINHSKEFADRQNHINGIENFWNQAKRVLRKYSGLARTFPRIGSATGCAD

SEQ ID NO: 18839 - protein, 156 aa, Neisseria meningitidis; identical to SEQ ID NO: 955

SEQ ID NO: 18840 - protein, 117 aa, Neisseria meningitidis; identical to SEQ ID NO: 6607

SEQ ID NO: 18841 - protein, 520 aa, Neisseria meningitidis
VFQVGKAMDGRRWAVWGAFALLPSAFLAVMVVAPLWAVAAYDGLAWRAVLSDAYMLKRLAWTVFQAAATCVLVLPLGVPVAWVLARLAFPGRALVLRLLMLPFVMPTLVAGVGVLALFGADGLLWRGRQDTPYLLLYGNVFFNLPVLVRAAYQGFVQVPAARLQTARTLGAGAWRRFWDIEMPVLRPWLAGGVCLVFLYCFSGFGLALLLGGSRYATVEVEIYQLVMFELDMAVASVLVWLVLGVTAAAGLLYAWFGRCAVSDKAVSPVMPSPPQSVGEYVLLAFAAAVLSVCCLFPLLAIVVKAWSADESWRVLMESETWQAVWNTLRFSAAAVYAAAVLGVVYAAAARRSAWMRGLMFLPFMVSPVCVSAGVLLLYPQWTASLPLLLAMYALLAYPFVAKDVLSAWDALPPDYGRAAAGLGANGFQTAYRITFPLLKPALRRGLTLAAATCVGEFAATLFLSRPEWQTLTTLIYAYLGRAGADNYARAMVLTLLLSAFALGIFLLLDGGEGGKQTETL

SEQ ID NO: 18842 - protein, 96 aa, Neisseria meningitidis
MAKYFTETGIGVREHFDFFGEFVVSPAARSGDLALAYGLRLEAGEEGLSLAELFDKRSDSQEPVECGRIDIGGFMLTAKEVDGGGNIGSMGLKVPR

SEQ ID NO: 18843 - protein, 103 aa, Neisseria meningitidis
MKKSLFAAALLSLVLAACGGEKAAEAPATEAPAAEAPATEAPAAEAPATEAPAAEAPATEAPAAEAPAAEAAATEAPAAEAAATEAPAAEAPAAEAPAAEAAK

SEQ ID NO: 18844 - protein, 324 aa, Neisseria meningitidis
MPSEKNIGFMAGSSRPLWVAFALLLVSCILFMTLNVKGDWDFVLHLRLTKLAALLMVAYAVGVSTQLFQTLTNNPILTPSILGFDSLYVFLQTLLVFTFGGVGYASLPLTGKFGFELVVMMGGSLLLFYTLIKQGGRDLPRMILIGVIFGILFRSLSSLLSRMIDPEEFTAAQANMFAGFNTVHSELLGIGALILLVSAAVVWRERYRLDVHLLGRDQAVNLGISYTRNTLWILLWIAALVATATAVVGPVSFFGLLAASLANHFSPSVRHSVRLPMTVCVGGILLVGGQTVFEHFLGMKAVLSVVVEFAGGLVFLYLVLKHKK

SEQ ID NO: 18845 - protein, 199 aa, Neisseria meningitidis; identical to SEQ ID NO: 5383

SEQ ID NO: 18846 - protein, 113 aa, Neisseria meningitidis; identical to SEQ ID NO: 1729

SEQ ID NO: 18847 - protein, 99 aa, Neisseria meningitidis; identical to SEQ ID NO: 5781

SEQ ID NO: 18848 - protein, 671 aa, Neisseria meningitidis
MSKSRRSPPLLSRPWFAFFSSMRFAVALLSLLGIASVIGTVLQQNQPQTDYLVKFGSFWAQIFGFLGLYDVYASAWFVVIMMFLVVSTSLCLIRNVPPFWREMKSFREKVKEKSLAAMRHSSLLDVKIAPEVAKRYLEVQGFQGKTINREDGSVLIAAKKGTMNKWGYIFAHVALIVICLGGLIDSNLLLKLGMLTGRIVPDNQAVYAKDFKPESILGASNLSFRGNVNISEGQSADVVFLNADNGILVQDLPFEVKLKKFHIDFYNTGMPRDFASDIEVTDKATGEKLERTIRVNHPLTLHGITIYQASFADGGSDLTFKAWNLGDASREPVVLKATSIHQFPLEIGKHKYRLEFDQFTSMNVEDMSEGAEREKSLKSTLNDVRAVTQEGKKYTNIGPSIVYRIRDAAGQAVEYKNYMLPVLQEQDYFWITGTRSGLQQQYRWLRIPLDKQLKADTFMALREFLKDGKGRKRLVADATKDAPAEIREQFMLAAENTLNIFAQKGYLGLDEFITSNIPKEQQDKMQGYFYEMLYGVMNAALDETIRRYGLPEWQQDEARNRFLLHSMDAYTGLTEYPAPMLLQLDGFSEVRSSGLQMTRSPGALLVYLGSVLLVLGTVLMFYVREKRAWVLFSDGKIRFAMSSARSERDLQKEFPKHVESLQRLGKDLNHD

SEQ ID NO: 18849 - protein, 381 aa, Neisseria meningitidis; identical to SEQ ID NO: 14816

SEQ ID NO: 18850 - protein, 249 aa, Neisseria meningitidis; identical to SEQ ID NO: 1060

SEQ ID NO: 18851 - protein, 416 aa, Neisseria meningitidis
MPSESPSDGIARLRGTKAEKPFAPYFQTRYTCRRCFQPFDYPQPPSLRRRFACQRHCAAVNTKEHIMTVSPVALRRKTECKPHPTARYWKKCDVEALFGLPFLELVHQAAEVHRQNFNPREIQLSTLLSIKTGGCPEDCAYCPQSAHHNTNLGKEQMMDVDEIVEKAKIAKSRGASRFCMGAAWRGPKPKDVETVSAIIKAVKGLGMETCGTFGMLEEGMAEDLKEAGLDYYNHNLDTDPDRYNDIIHTRQHEDRMDTLGKVRNAGLKVCCGGIVGMNETRAERAGLIASLANLDPQPESVPINRLVKVEGTPLDDAEDLDWTEFVRTIAVARITMPQSYVRLSAGRSNMPEAMQAMCFMAGANSIFYGDKLLTTGNPDEDGDRILMEKLNLYPLQFELEGEVAEVEKASGIKVDY

SEQ ID NO: 18852 - protein, 96 aa, Neisseria meningitidis; identical to SEQ ID NO: 3537

SEQ ID NO: 18853 - protein, 77 aa, Neisseria meningitidis; identical to SEQ ID NO: 14102

SEQ ID NO: 18854 - protein, 828 aa, Neisseria meningitidis
LDRNRSGQYHIYDPLALDLDGDGIETVAAKGFSGSLFDHNGNGIHTATGWVSADDGLLVRDLNGNGIIDNGAELFGDNTKLADGSFAKHGYAALAELDSNGDNIINAADAAFQSLRVWQDLNQDGISQTNELRTLEELGIQSLDLAYKDVNKNLGNGNTLAQQGSYTKTNGTTAKMGDLLLAADNLHSRFKDKVELTAEQAKAANLAGIGRLRDLREAAALSGDLANMLKAYSAAETKEAQLALLDNLIHKWAETDSNWGKKSPMRLSTDWTQTANEGIALTPSQVAQLKKNALVSLSDKAKATIDAARDRIAVLDAYTGQDSNTLYYMSEEDALNIVKVTNDTYDHLAKNIYQNLLFQTRLQPYLNQISFKMENDTFTLDFSGLVQAFNHVKETNPQKAFVDLAEMLAYGELRSWYEGRRLMADYVEEAKKAGKFEDYQKVLGQETVALLAKTSGTQADDILQNVGFGHNKNVSLYGNDGNDTLIGGAGNDYLEGGSGSDTYVFGKGFGQDTVYNYDYATGRKDIIRFTDGITADMLTFTREGNHLLIKAKDGSGQVTVQSYFQNDGSGAYRIDEIHFDNGKVLDVATVKKLVQQSTDGSDRLYAYQSGSTLNGGLGDDYLYGADGNDLLNGDAGNDSIYSGNGNDTLNGGEGNDALYGYNGNDALNGGEGNDHLNGEDGNDTLIGGAGNDYLEGGSGSDTYVFGEGFGQDTVYNYHVDKNSDTMHFKGFKAADVHFIRSGSDLVLSASEQDNVRISGFFYGENHRVDTFVFDDAAISNPDFAKYINAGNNLVQSMSVFGSNTAATGGNVDANIQSVQQPLLVTPSA

SEQ ID NO: 18855 - protein, 119 aa, Neisseria meningitidis; identical to SEQ ID NO: 2176

SEQ ID NO: 18856 - protein, 281 aa, Neisseria meningitidis
MNIADGRQAFPAPAKLNLDLRITGRREDGYHNIESIFCLIDLQDTVYLKPRDDGKIILHNPVDGMPQEVDLSYRAASLLQKYARNPAGVEIWLDKKIPTGAGLGGGSSDAATVLLVLNRWWQCGLTQRQLIDSGAALGADVPFFIFGKNAFARGIGDRLDEMDIPKQWYVIVKPPVHVSTAKIFTHESLTRNSASSIMPTFQNLQPFRNDMQAVVFKEYPEVWKAYSELSRYGFALMTGSGACVFTACQDRNSAYNIYRQVSDLYEAYLAEGLSKHPWLSV

SEQ ID NO: 18857 - protein, 283 aa, Neisseria meningitidis
MNTISSIMSLENFQLIKTQLGVPSYENDRVAIYQGDCIQLMDKISKGSFQMTITSPPYNIGKEYESILDLEHYLEWCERWMQSIHHLTEDSGCFWLNLGYLHVEKKGLAVPIPYLLWDKTNFFLLQEVVWNYAAGVACRNRFSPRNEKLLWYVKNPAKYTFNLDAVRDPNVKYPNQKKNGKLKCNPLGKNPTDVWQIAKVTSGRNRSSRERTAHPAQFPLELIERIIRASSNQNDVILDPFIGSGTTALAGLKNNRFVIGFEINDEYIDIIKERFKEYDLQNT

SEQ ID NO: 18858 - protein, 107 aa, Neisseria meningitidis; identical to SEQ ID NO: 4094

SEQ ID NO: 18859 - protein, 169 aa, Neisseria meningitidis; identical to SEQ ID NO: 2049

SEQ ID NO: 18860 - protein, 235 aa, Neisseria meningitidis
MNAAIEHVQAVAFDLDGTLCDSVPDLAAAAEAMLEQLGMKPLPAKVVESYVGDGIGKLVHRVLTNDRDREADSELWEKGFVSYMKYYRDHLSVFTRPYPETEAGLALLKSLGIPLAVITNKNEILAVELLKQLGLADYFSLILGGDSLPEKKPSPLPLRHAAEVLGIDVANMVMVGDSRNDIIAAKAAGCLSVGVTFGYGDMTLLSQDDATRPDWIIGSLPEIYENLQPQKNKEE

SEQ ID NO: 18861 - protein, 259 aa, Neisseria meningitidis; identical to SEQ ID NO: 7119

SEQ ID NO: 18862 - protein, 419 aa, Neisseria meningitidis
MSMALAQKLAADSIAAVAEGRNLQDVLAQIRTAHPDLMAQENGALQDIAYGCQRYLGSLKHMLAQMLKKPIGNPQLESLLLAALYQLHYTRNAPHAVVNEAVESIAKIGRGQYRSFANAVLRRFLRERDKLVASCKKDDVAKHNLPLWWVAYLKNHYPKHWHNIAAALQSHPPMTLRVNRRHGNAESYLEKLVAEGIAAKALDEYAVTLEEAVPVNRLPGFSDGIVSVQDFGAQQAAYLLNPKDGERILDACAAPGGKTGHILELADCRVTALDIDAGRLKRVEDNIARLGFQTASTACADAQDLSAWYDGKPFDAVLADVPCTASGVARRNPDVKWLRRPTDALKTARQQEALLDALWQVLKSGGRMLIATCSVFVEENDGQLQKFLNRHADAELIESRVLLPNKHQDGFYYALIQKH

SEQ ID NO: 18863 - protein, 179 aa, Neisseria meningitidis
MKRRKLSLRPSDKRAPRGGAKGEYDMYKHLVVAVDGSETSINALKHAAELAGVNGARLTLVHVANPAEYMALAPEFLQHESYEAAAVAQGNEVLDAAERTARELGVENTVKHLLVANKGAREMAQDLVDYADENGADLLVLGTHGRTGLMHLLMGSFAETVMRQSHLPLLIIRSKAEEA

SEQ ID NO: 18864 - protein, 61 aa, Neisseria meningitidis; identical to SEQ ID NO: 2615

SEQ ID NO: 18865 - protein, 78 aa, Neisseria meningitidis; identical to SEQ ID NO: 1246

SEQ ID NO: 18866 - protein, 477 aa, Neisseria meningitidis; identical to SEQ ID NO: 3214

SEQ ID NO: 18867 - protein, 339 aa, Neisseria meningitidis
MSDTPATPATRDFGLIDGRAVTGYVLSNRRGTRVCVLDLGGIVQEFSVLADGVRENLVVSFDDAASYADNPFQINKQIGRVAGRIRGAAFDINGRTYRVEANEGRNALHGGSHGLAVTRFNAVAADGRSVVLRSRLQQSADGYPNDLDLDISYRLDEDDRLTVTYRATALGDTVFDPTLHIYWRLDAGLHDAVLHIPQGGHIPADAEKLPVSTVSDGLEVFDFSRPKPLDAAVAALRRETGRAGFDDAYRVPSDIGRPAAVLQAGRRCRISIYSDRNGLVIFTAAPQDFARHDAGVYDALATEAQTLPDSLHWPEFGNIRLNKGDTREATIAYGIESLS

SEQ ID NO: 18868 - protein, 371 aa, Neisseria meningitidis; identical to SEQ ID NO: 5069

SEQ ID NO: 18869 - protein, 916 aa, Neisseria meningitidis; identical to SEQ ID NO: 1114

SEQ ID NO: 18870 - protein, 591 aa, Neisseria meningitidis
VAKTYLLTALIMSMTISGCQVIHANQGKVNTHSAVITGADAHTPEHATGLIEQKQVIASDFMVASANPLATQAGYDILKQGGSAADAMVAVQTTLSLVEPQSSGLGGGAFVLYWDNTAKTLTTFDGRETAPMRATPELFLDKDGQPLKFMEAVVGGRSVGTPAIPKLMETIHQRYGVLPWGKLFDTPIRLAKQGFEVSPRLAISVEQNQQHLARYPKTAAYFLPNGVPLQAGSLLKNLEFADSVQALAAQGAKALHTGKYAQNIVSVVQNAKDNPGQLSLQDLSDYQVVERPPVCVTYRIYEVCGMGAPSSGGIAVGQILGILNEFSPNQVGYDAEGLRLLGDASRLAFADRDVYLGDPDFVPVPIRQLISKDYLKHRSQLLEQSDKALPSVSAGDFIHEWVSSQAIELPSTSHISIVDKAGNVLSMTTSIENAFGSTLMANGYLLNNELTDFSFEPIKQGKQVANRVEPSKRPRSSMAPTIVFKAGKPYMAIGSPGGSRIIGYVAKTIVAHSDWNMDIQDAISAPNLLNRFGSYELETGTTALQWQQALNDLGYKTDVRELNSGVQAIIIEPSRLVGGADPRREGRVMGD

SEQ ID NO: 18871 - protein, 55 aa, Neisseria meningitidis; identical to SEQ ID NO: 1257

SEQ ID NO: 18872 - protein, 71 aa, Neisseria meningitidis; identical to SEQ ID NO: 3925

SEQ ID NO: 18873 - protein, 135 aa, Neisseria meningitidis
MTVWFVAAVAVLIIELLTGTVYLLVVSAALAGSGIAYGLTGSTPAAVLTAALLSALGIWFVHAKTAVGKVETDSYQDLDAGQYAEILRHAGGNRYEVFYRGTHWQAQNTGQDVFEPGTRALIVRKEGNLLIITHP

SEQ ID NO: 18874 - protein, 268 aa, Neisseria meningitidis; identical to SEQ ID NO: 8872

SEQ ID NO: 18875 - protein, 417 aa, Neisseria meningitidis
MQTYLVGGAVRDYLLGLPVKDRDWVVVGADAQTMLAQGFQPVGKDFPVFLHPETHEEYALARTERKTAKGYAGFSFHTDKDVTLEQDLMRRDLTINAMAQDADGKIIDPFGGQRDLAAGILRHVSPAFAEDPVRILRTARFAARYKFEIAEETIKLMRQMVENGEADALVAERVWQEFAKGLMEKNPRKMIEVLRECGALKVLLPEVNALFGVPQRADYHPEIDSGIHTLMTLQRAADMGLSLPERYAALLHDLGKAKTPSDILPRHHGHDLAGVEPVREVNQRLRAPKHCAELAELVCRWHIIFHQVGQLKSQTILNVLKKTDAFRRPERFQTALNVCIADTQGRLNREHTPYPQRAHWLALLEAANQADSGKIAAECWAQGKAHLIAEQIDRARLAQIAPLQKAFRAAQDKTEKH

SEQ ID NO: 18876 - protein, 118 aa, Neisseria meningitidis; identical to SEQ ID NO: 2492

SEQ ID NO: 18877 - protein, 90 aa, Neisseria meningitidis; identical to SEQ ID NO: 311

SEQ ID NO: 18878 - protein, 173 aa, Neisseria meningitidis
VKDSLMDAFDFFMQGNFKKIATEQGLDRKYFIFHYIVCNLSAISSFCLMKVIHSYTILCLLIMIIGIAFGFILRNRVLSIVKNKQNFLSDMFPLEMPFFSRVYKIPILARFLNRGMKWLYLQNFFCLVMICFSISLILNEERGWMPYFACYWFGLCYPVSTYYVFYPEIINIS

SEQ ID NO: 18879 - protein, 104 aa, Neisseria meningitidis; identical to SEQ ID NO: 1772

SEQ ID NO: 18880 - protein, 110 aa, Neisseria meningitidis
MSSELIIHTSDAAFEKDVLNSDTPVLLDFWAPWCGPCKMIAPILDDIAAEFEGRLKVVKINIDDNEATPSRFGVRGIPTLMVFKNGEVVATKVGALAKGQLTAFVEASIA

SEQ ID NO: 18881 - protein, 134 aa, Neisseria meningitidis; identical to SEQ ID NO: 1773

SEQ ID NO: 18882 - protein, 344 aa, Neisseria meningitidis
MSTSLSYRDAGVDIDAGDQLVENIKPFAKRTMRPEVLGDLGGFGALVEIGKKYKNPVLVSGTDGVGTKLKLAFDWDKHDMVGIDLVAMSVNDILVQGAEPLFFLDYFACGKLDVPRATDVIKGIAQGCEESGCALIGGETAEMPGMYPVGEYDLAGFAVGVVEKENVITGRSIGAGDVVLGLASNGAHSNGYSLIRKIIERDNPDLDAEFDNGKTLREAVIAPTRLYVKPILAALEKFTIKGMAHITGGGITENVPRVLPENTVAQIDAKSWELPKLFQWLQKAGNVETQEMYRTFNCGIGMVVIVAAEDADAVQGLLGEQGETVYRLGLIRERQGDEHQTQVA

SEQ ID NO: 18883 - protein, 141 aa, Neisseria meningitidis
MAIERTISIIKPDAVGKNVIGKIYSHFEENGLKIVAAKMKQLTLKEAQEFYAVHKDRPFYAGLVEFMTGGPVMIQVLEGENAVLKNRELMGATNPSEAAEGTIRADFATSVSINAVHGSDTPENAALEIAYFFSQTEICPR

SEQ ID NO: 18884 - protein, 279 aa, Neisseria meningitidis; identical to SEQ ID NO: 8587

SEQ ID NO: 18885 - protein, 92 aa, Neisseria meningitidis; identical to SEQ ID NO: 10783

SEQ ID NO: 18886 - protein, 593 aa, Neisseria meningitidis
MPYFALFDDAVSGRAKRYQNHVESRFFRPEELDALDGALQSGWQKGLHAVLFADYGFGLPLTGVESERGGNLALHWFADCADTDAASWLARHSDGLPAGISTPQSSVSEADYLDHIRQIHEAIRRGDTYQINYTTRLHLQAYGNPVKLYQRLRQPVPYAVLSHLPDAQGQSAWTLCFSPELFLKIGSDGTISTEPMKGTAPILGDGQDERRAAELQADPKNRAENVMIVDLLRNDLGKIAQTGKVCVPEPFKVSRFGSVWQMTSTIRAQALPHTSFADILRAAFPCGSITGAPKKMSMQIIESLEAEPRGLYTGSIGYLKPCAGGLGFEGAFNVVIRTLSLTPLSDGIYQGVYGVGSGIVIDSDPAAEYRECGWKARFLNELRPDFGIFETLRAENGRCTLLDRHLCRLKTSAQALNLPLPDGCENQIKQYIADLPDGAFRVKALLASDGISLSRAVLNRLTDKQRVIISPTILPAQNYLRRFKTTCRTVFDQAWQTAETQGAFDSLFFNSDGILLEGGRSNVFVKHRGQWLTPSLDLDILNGIMRQAVLDEPQKYLQTNQVIETHITQKTLQEAEEIRLSNALRGVFAAALA

SEQ ID NO: 18887 - protein, 643 aa, Neisseria meningitidis
MFWSFLMLNITLPDGSVRQYESPVTVAQIAASIGAGLAKAAVAGRVNGKLVDACDPIVEDSAVQIITPKDQEGIEIIRHSCAHLVGHAVKQLYPNAKMVIGPVIEEGFYYDIATEKPFTPEDVAAIEARMKELIAQDYDVVKIMTPRAEAIKIFQERGEEYKLRLIDDMPEVEAMGMYHHQEYVDMCRGPHVPNTRFLKNFKLTKLAGAYWRGDSNNEMLQRIYGTAWATKDELKAYIQRIEEAEKRDHRKLGKQLDLFHLQDEAPGMVFWHPKGWALWQVIEQHMRKELNAAGYKEVKTPQIMDKTFWEKSGHWDNYKDNMFVTSSEKREYAVKPMNCPGHVQIFNNGLRSYRDLPMRLAEFGSCHRNEPSGALHGLMRVRGFVQDDAHIFCTEDQIVSEARAFNELLVRIYKQFGFHDVSVKLSLRPEKRAGSDDVWDKAEQGLREALTACGVEWGELPGEGAFYGPKIEYHVRDALGRSWQCGTLQLDFVLPERLNAEYVTENNDRARPVMLHRAILGSLERFIGILIENHAGSFPLWLAPVQMVIMNITENQADYCREVAAKLQAAGFRAELDLRNEKIGYKIRDNSQYRFPYQIVVGDKEKQENKVAVRRKAEDLGSLDLDDFIAQLQQEITDALVNH

SEQ ID NO: 18888 - protein, 88 aa, Neisseria meningitidis; identical to SEQ ID NO: 6869

SEQ ID NO: 18889 - protein, 128 aa, Neisseria meningitidis; identical to SEQ ID NO: 8714

SEQ ID NO: 18890 - protein, 411 aa, Neisseria meningitidis; identical to SEQ ID NO: 3347

SEQ ID NO: 18891 - protein, 624 aa, Neisseria meningitidis
LHPIFGRNAVCSDGISQTHCPTFKTTLMKNIRNFSIIAHIDHGKSTLADRFIQYCGGLDLREMSTQVLDSMDIEKERGITIKAQTAALNYKARDGQVYQLNLIDTPGHVDFSYEVSRSLSACEGALLVVDASQGVEAQTVANCYTAIDLGVEVVPVLNKIDLPAADPERVEQEIEDIIGIDAVGAVQCSAKSGIGVEDVLEEIVAKIPAPTGDENAPLQAVIVDSWFDNYVGVVMLIRVKNGTIKLKDKVRFMSTKAETQVEQLGVFTPKSVQKQELKAGEVGFLITGVKELGQAKVGDTVTLVANPATEPLPGFQEVQSQVFAGLYPVESHDYEALRDALEKLQLNDASLKFEPEVSQALGFGFRCGFLGLLHLEIVQERLEREFDMDLITTAPTVVYEVVLKNGEKIEVENPSKLPDIGSIETILEPIITATILVPQEYVGNVMTLCNQKRGVQVNMQYMGRQVMLTYDLPMNEVVMDFFDKLKSTSRGYASLDYHFKEFQPSDLIKLDIMVNGEKVDALSLIVHRQSAVHRGRELASKMRELIPRQMFDIAVQAAIGSQIIARENVKALRKNVLAKCYGGDITRKKKLLEKQKAGKRRMKQVGNVEIPQSAFLAILQVSDK

SEQ ID NO: 18892 - protein, 404 aa, Neisseria meningitidis
MDKFPKSAKLDHVCYDIRGPVHKKALQLEEEGNKILKLNIGNPAPFGFEAPDEILVDVIRNLPTSQGYCDSKGLYSARKAIVHYYQTKGLRDITVNDVYIGNGVSELITMSMQALLNDGDEILIPAPDYPLWTAAATLAGGTVRHYLCDEENGWFPNLADMEAKITPKTKAIVVINPNNPTGAVYSREILLEIAELARKHGLIIFADEIYDKILYDGAVHHHIAALAPDLLTVTFNGLSKAYRVAGFRQGWMVLNGPKHHAKGYIEGLDMLSSMRLCANTPMQHAIQTALGGYQSINEFILPGGRLLEQRNRAWELVNQIPGVSCVKPMGAMYMFPKIDTEMYRIHDDMKFVYDLLVREKVLLVQGTGFNWIKPDHFRIVTLPYVHQIEEAMGRLARFLQTYRQ

SEQ ID NO: 18893 - protein, 359 aa, Neisseria meningitidis
MKTLTVHTPSHSYPIFIGNGLLPQAGSLLKPHLGKRAAIIANETVAPLYLGTLQTALDAAGVSHFSIILPDGEAHKNWQTLNLIFDGLMQNRAERKTTLIALGGGVIGDMVGFAAATYQRGAPFVQIPTTLLSQVDSSVGGKTAINHPLGKNMIGAFYQPQAVLADLDTLHTLPVRELSAGMAEVIKYGALGDIGFFEWLEQNISGLMTLDREKLAQAVYRCCQMKADIVAQDETEQGIRAWLNLGHTFGHAIETEMGYGTWLHGEAIAAGCVLAARLSEQLGKTSAADTARLAALLEAAGLPSAPPVFAFEKWLEHMSHDKKVSGGIMRFIGLNRLGEANITEITDTDILRRTLQPYL

SEQ ID NO: 18894 - protein, 499 aa, Neisseria meningitidis
VFKKYQYLALAALCAASLAGCDKAGSFFGADKKEASFVERIEHTKDDGSVSMLLPDFVQLVQSEGPAVVNIQAAPAPRTQNGSGNAETDSDPLADSDPFYEFFKRLVPNMPEIPQEEADDGGLNFGSGFIISKDGYILTNTHVVTGMGSIKVLLNDKREYTAKLIGSDVQSDVALLKIDATEELPVVKIGNPKDLKPGEWVAAIGAPFGFDNSVTAGIVSAKGRSLPNESYTPFIQTDVAINPGNSGGPLFNLKGQVVGINSQIYSRSGGFMGISFAIPIDVAMNVAEQLKNTGKVQRGQLGVIIQEVSYGLAQSFGLDKAGGALIAKILPGSPAERAGLQAGDIVLSLDGGEIRSSGDLPVMVGAITPGKEVSLGVWRKGKEITVAVKLGNASEQTGSSSEPDKAPYAEHQSGTFSVESAGITLQTHTDSSGGRLVVVRVSGAAERAGLRRGDEILAVGQVPVNDEDGFRKAMDKAGKNVPLLVMRRGNTLFIALNLQ

SEQ ID NO: 18895 - protein, 423 aa, Neisseria meningitidis
MQQIKFIDLFSGMSGIRKGFEQACRKQSVACECVFTSEIKPAALEVLKQNYPDEVPYGDITKIETGDIPDFDILLAGFPCQAFSFAGKRLGFEDTRGTLFFDVARILKAKKPKGFILENVEGLVTHDRKDPTQKIGRTLTVILETLETLGYYVSWKVLNAKDFGIPQNRKRIYLTGSLKSKPDLSFETTLSPKLKNILESGLPTESSPFIKKLLKKFPPSELYGKSVKDKRGGKNNIHSWDIELKGTVTEEEKQLLNMLLKERRKKKWASEIGIDWMDGMPLTKAQISTFYKHPNLQNILDSLTDKGYLVLEHPKQKIGGRRIKDESLPKGYNIVSGKKSFEINKILDPNDVAPTLVAMDMEHLFVVDNGGLRTLTGKEGLRLFGYPDDYSFDIPKKDKYDLLGNTVAVPVIKAVSERLLHTL

SEQ ID NO: 18896 - protein, 125 aa, Neisseria meningitidis; identical to SEQ ID NO: 535

SEQ ID NO: 18897 - protein, 626 aa, Neisseria meningitidis; identical to SEQ ID NO: 11093

SEQ ID NO: 18898 - protein, 458 aa, Neisseria meningitidis
MKHIHIIGIGGTFMGGIAAIAKEAGFEVSGCDAKMYPPMSTQLEALGIGVHEGFDAAQLEEFKADVYVIGNVAKRGMDVVEAILNRGLPYISGPQWLAENVLHHHWVLGVAGTHGKTTTASMLAWVLEYAGLAPGFLIGGVPENFSVSARLPQTPRQDPNSQSPFFVIEADEYDTAFFDKRSKFVHYRPRTVVLNNLEFDHADIFADLGAIQTQFHHLVRTVPSEGLIICNGQQQSLQDTLDKGCWTPVEKFGTEHGWQAGEANADGSFDVLLDGKTAGRVKWDLMGRHNRMNALAVIAAARHVGVGIQTACEALSTFKNVKRRMEIKGTVNGITVYDDFAHHPTAIETTIEGLRQRVGNARILAVLEPRSNTMKLGTMKSALPESLKEADQVFCYAGGVDWNVAEALAPLGGRLHVGKDFDAFVAEIVKNARTGDHILVMSNGGFGGIHTKLLDALR

SEQ ID NO: 18899 - protein, 354 aa, Neisseria meningitidis
MAWSMFATTQADRAVRSATAPKEMWFHKKIIDEKTGKVSFDTRQIWSLNDLSKEELASIQDTNGKVITVSNPGIFNNREDSLSNAAKQNRNSTNGSGVIAVMNPPTGKYKSDSNNKIKDSLWLSSSLVSELMYVGYDQLNNKVFQGYLPKTNSEKLNQDIYREVQKMGNGWSVDTSNHSRGGITASVSLKDWVNNKEQNGIAPIRKARFYGTATNVKNDYADVLQKNGYTYTGADGKTYNSGAYSIVHDKDFVGNKWIPFLLGNNETTKGACKGFCYSHSSYFAEVPEQYQRDRNGEYILDKNNNKIETEDWKDYKGKWGVPKMGDDGKYINHAIPKLVYPNKLNGEQYEENPF

SEQ ID NO: 18900 - protein, 214 aa, Neisseria meningitidis; identical to SEQ ID NO: 3176

SEQ ID NO: 18901 - protein, 128 aa, Neisseria meningitidis
VVVFGILKRNGRVYTVVVDNAKSETLLPVIKKKIMPDSIVYTDSLSSCDKLDVSGFIHYRINHSKEFADRQNHINGIENFWNQAKRVLRKYNGIDRKSFPLCLKECEFRFNFGTPSQQLKILRDWCGI

SEQ ID NO: 18902 - protein, 231 aa, Neisseria meningitidis; identical to SEQ ID NO: 2520

SEQ ID NO: 18903 - protein, 138 aa, Neisseria meningitidis; identical to SEQ ID NO: 15462

SEQ ID NO: 18904 - protein, 621 aa, Neisseria meningitidis
MIEKLTFGLFKKEDARSFMRLMAYVRPYKIRIIAALIAIFGVAATESYLAAFIAPLINHGFSAPAAPPELSAAAGIISTLQNWREQFTYMVWGTENKIWTVPLFLIILVVIRGICRFTSTYLMTWVSVMTISKIRKDMFAKMLTLSSRYHQETPSGTVLMNMLNLTEQSVSNASDIFTVLTRDTMIVTGLTIVLLYLNWQLSLIVVLMFPLLSLLSRYYRDRLKHVISDSQKSIGTMNNVIAETHQGHRVVKLFNGQAQAANRFDAVNRTIVRLSKKITQATAAHSPFSELIASIALAVVIFIALWQSQNGYTTIGEFMAFIVAMLQMYAPIKSLANISIPMQTMFLAADGVCAFLDTPPEQDKGTLAPQRVEGRISFRNVDVEYRSDGIKALDGFNLDIRQGERVALVGRSGSGKSTVVNLLPRFVEPSAGNICIDSIDIADIKLDCLRAQFALVSQDVFLFDDTLFENVRYSRPDAGEAEVLFALQTANLQSLIDSSPLGLHQPIGSNGSNLSGGQRQRVAIARAILKDAPILLLDEATSALDNESERLVQQALERLMENRTGIIVAHRLTTIEGADRIIVMDDGKIIEQGTHEQLMSQNGYYTMLRNISNKDAAVRTA

SEQ ID NO: 18905 - protein, 445 aa, Neisseria meningitidis
MTLENKKILVAGLGGTGISMIAYLRKNGAEVAAYDAELKPERVSQIGKMFDGLVFYTGRLKDALDNGFDILALSPGISERQPDIEAFKQNGGRVLGDIELLADIVNRRGDKVIAITGSNGKTTVTSLVGYLCIKCGLDTVIAGNIGTPVLEAEWQREGKKADVWVLELSSFQLENTESLRPTAATVLNISEDHLDRYDDLLDYAHTKAKIFRGDGVQVLNADDAFCRAMKRAGREVKWFSLEHEADFWLERETGRLKQGNEDLIATQDIPLQGLHNATNVMAAVALCEAVGLPREALLEHVKTFQGLPHRVEKIGEKNGVVFIDDSKGTNVGATAAAIAGLQNPLFVILGGMGKGQDFTPLRDALAGKAKGVFLIGVDAPQIRRDLDGCGLNMTDCATLEEAVQTAYAQAEACDIVLLSPACASFDMFKGYAHRSEVFIEAFKAL

SEQ ID NO: 18906 - protein, 107 aa, Neisseria meningitidis; identical to SEQ ID NO: 2524

SEQ ID NO: 18907 - protein, 144 aa, Neisseria meningitidis; identical to SEQ ID NO: 4528

SEQ ID NO: 18908 - protein, 232 aa, Neisseria meningitidis
LPLLSVSRFGLHTTSVQRKTMFQNFDLGVFLLAVLPVLLAITVREVARGYTARYWGDNTAEQYGRLTLNPLPHIDLVGTIIVPLLTLMFTPFLFGWARPIPIDSRNFRNPRLAWRCVAASGPLSNLAMAVLWGVVLVLTPYVGGAYQMPLAQMANYGILINAILFALNIIPILPWDGGIFIDTFLSAKYSQAFRKIEPYGTWIILLLMLTGVLGAFIAPIVRLVIAFVQMFV

SEQ ID NO: 18909 - protein, 230 aa, Neisseria meningitidis; identical to SEQ ID NO: 675

SEQ ID NO: 18910 - protein, 129 aa, Neisseria meningitidis; identical to SEQ ID NO: 1031

SEQ ID NO: 18911 - protein, 1862 aa, Neisseria meningitidis
MNKGLHRIIFSKKHSTMVAVAETANSQGKGKQAGSSVSVSLKTSGDLCGKLKTTLKTLVCSLVSLSMVLPAHAQITTDKSAPKNQQVVILKTNTGAPLVNIQTPNGRGLSHNRYTQFDVDNKGAVLNNDRNNNPFVVKGSAQLILNEVRGTASKLNGIVTVGGQKADVIIANPNGITVNGGGFKNVGRGILTTGAPQIGKDGALTGFDVRQGTLTVGAAGWNDKGEADYTGVLARAVALQGKLQGKNLAVSTGPQKVDYASGEISAGTAAGTKPTIALDTAALGGMYADSITLIANEKGVGVKNAGTLEAAKQLIVTSSGRIENSGRIATTADGTEASPTYLSIETTEKGAAGTFISNDGRIESKGLLVIDTGEDIGLRNGAVVQNNGNRPAATVLNAGRNLVIESKANVNNAKGSTNLSTGGRTVIKEASIQTGTTVYSSSKGNAELGNNTRITGADVTVLSNGTISSSAVIDAKDTAHIEAGKPLSLEASTVTSDIRLNGGSIKGGKQLALLADDNITAKTTNLNTPGNLYVHTGKDLNLNVDKDLSAASIHLKSDNAAHITGTSKTLTASKDMGVEAGSLNVTNTNLRTNSGNLHIQAAKGNIQLRNTKLNAAKALETTALQGNIVSDGLHAVSADGHVSLLANGNADFTGHNTLTAKADVNAGSVGKGRLKADNTNITSSSGDITLVAGNGIQLGDGKQRNSINGKHISIKNNGGNADLKNLNVHAKSGALNIHSDRALSIENTKLESTHNTHLNAQHERVTLNQVDAYAHRHLSITGSQIWQNDKLPSANKLVANGVLALNARYSQIADNTTLRAGAINLTAGTALVKRGNINWSTVSTKTLEDNAELKPLAGRLNIEAGSGTLTIEPANRISAHTDLSIKTGGKLLLSVKGGNAGAPSAQVSSLEAKGNIRLVTGETDLRGSKITAGKNLVVATTKGKLNIEAVNNSFSNYFPTQKAAELNQKSKELEQQIAQLKKSSPKSKLIPTLQEERDRLAFYIQAINKEVKGKKPKGKEYLQAKLSAQNIDLISAQGIEISGSDITASKKLNLHAAGVLPKAADSEAAAILIDGITDQYEIGKPTYKSHYDKAALNKPSRLTGRTGVSIHAAAALDDARIIIGASEIKAPSGSIDIKAHSDIVLEAGQNDAYTFLKTKGKSGKIIRKTKFTSTRDHLIMPAPVELTANGITLQAGGNIEANTTRFNAPAGKVTLVAGEELQLLAEEGIHKHELDVQKSRRFIGIKVGKSNYSKNELNETKLPVRVVAQTAATRSGWDTVLEGTEFKTTLAGADIQAGVGEKARVDAKIILKGIVNRIQSEEKLETNSTVWQKQAGRGSTIETLKLPSFESPTPPKLSAPGGYIVDIPKGNLKTEIEKLSKQPEYAYLKQLQVAKNINWNQVQLAYDRWDYKQEGLTEAGAAIIALAVTVVTSGAGTGAVLGLNGAAAAATDAAFASLASQASVSFINNKGDVGKTLKELGRSSTVKNLVVAAATAGVADKIGASALNNVSDKQWINNLTVNLANAGSAALINTAVNGGSLKDNLEANILAALVNTAHGEAASKIKQLDQHYIVHKIAHAIAGCAAAAANKGKCQDGAIGAVVGEIVGEALVKNTDFSGMTASEIEKAKANITAYAKLVAGATVGVTGGNVDVAANASETAVKNNALDIIWDIGNLVWDGGKWIYAKSIGDKQMAREAAIDFGVDAAAAAVPFVPAGATKISRGGAYVLKAGDEAVDTAKAIQEIQKQTGIKLTYDKVNKVWTTPAGLDYGLDAKHGNRIKHVLAHTIPNPNKPVHSVFNVSRKEVLPLVDEAWRMKGNPLPNDSSVYLVDMKKPIGTKGETKVRIVVQKGTNKIISAYPQK

SEQ ID NO: 18912 - protein, 573 aa, Neisseria meningitidis
MPSEAICSKKTMLNKDQFADNHFIRTFIEEDLKSGKHETIQTRFPPEPNGYLHIGHAKSICLNFGLAYIYDGLCNLRFDDTNPEKENDEYVNAIKEDVEWLGFHWAGEPRFASNYFDQLYDYAVGLVKDGKAYVDDLTPEEMREYRGTLTEAGKNSPYRDRSIEENLDLFTRMKNGEFPDGSKTLRLKIDMASGNINMRDPVIYRIRRAHHHNTGDKWCIYPMYDYTHCISDAIEGITHSLCTLEFEAHRPLYDWVLDNIPAPHATRPRQYEFSRLELLYTITSKRKLNQLVVEKHVSGWDDPRMPTISGMRRRGYTPEGLRLFAKRAGISKSENIVDMSVLEGAIREELENSAPRLMAVLNPLKVTLTNFETGRTQSRRAAFHPNHEEMGDREVPVSQTIYIEADDFAENPPKGFKRLIPGGEVRLRHGYVIKCDEVVKDEAGNVVELKCSIDHDTLGKNPEGRKVKGVIHWVSAEHAAEIKVRLYDRLFTVERPDAVRGEDGEYLPFTDFLNPESVKEITAYAEPAAKDLPAESRWQFERIGYFVTDRKDHGKDTPVFNRTVTLKDSWQPK

SEQ ID NO: 18913 - protein, 287 aa, Neisseria meningitidis; identical to SEQ ID NO: 2812

SEQ ID NO: 18914 - protein, 883 aa, Neisseria meningitidis
MELKFEELPYQLDAVNAVANLFAGQPNHARTFDLTSQGTGRFVGNGLDLDWETLGRNLNAVQKQNGQPETEIGTHGLNFSLEMETGTGKTYVYLRTIYELNRRCGWKKFVIVVPSVPIREGVLKSLEITKAHFDGVFGRPVMRYAEYSSTRLSDLRAFAVNDHIEILVINIQSFEKDGNVINKVNESGEAPIKFIQETCPIVIIDEPQNMETEGRLNALESLNPLFTLRYSATHKKPYHKVYSLNPVQAYNLKLVKQIEVLPVLAENDVNGAFAELLEVKQAARGRLKADLNIHYQDKKETKKKKVSVKSGDDLFEKSGGNEAYRHGFIIDGMDFENQELAFSSGKTITRGGDGDVVRDEIMKNQIRETVREHLAKEKRLNPSGIKVLSLFFIDRVENYRTEDGTAGKFALWFEEIYRELSGNTDTAGVHDGYFSQDKKGRLKNTDGTTQADNDTYRLIMRDKETLLSFGSPLRFIFSHSALKEGWDNPNVFQICMLNETRSPLKKRQEIGRGLRIAVNQEGRRVRDENVNILTVVPNESYELFAANLQKEYEDECGIKFAAENIKNGNKKKKQLFRKDFPLDPEFQAIWERLKYKTRYRVRFDTEELIKQASAAVAGLPEIQKPKIRIRKAQLKQSQTYGIETVEIASRSRDMETTWEIPDILGEIQKKTGLTRRTVYEIIIQSGRLKDVPGNPQRFIDLTAEVVNRSLHALMAAGIEYERTGEVYDQKLLEDMAREGIEFYENNFTFAVGNPQKTICENYIPLDSGTEQAFAQNCEDYDAKNEGGVAFYFKLPSWFKIPTPLGNYNPDWAVVKQVQDKVYFVAETKNTGKSIQAGVDAGKLRENERLKIECGERHFEALGGLAYCVVEKVGDLKLEKEEQA

SEQ ID NO: 18915 - protein, 85 aa, Neisseria meningitidis
MQTVTMYTGPFCPYCAMAKRLLHTAGVGHIDEIRVDASPEAFAEMQQLSGQRSVPQIFIGETHVGGFTDLYRLQQEGGLDGLLNP

SEQ ID NO: 18916 - protein, 275 aa, Neisseria meningitidis; identical to SEQ ID NO: 12127

SEQ ID NO: 18917 - protein, 225 aa, Neisseria meningitidis
MSIKQWPEGERPREKLLERGAAALSDAELLAILLRVGTLGMSAVDLARYLLQEFGSLGRLMSAEVGKLSAYKGMGTASFTQFAVVREIGRRILAEELQESIVLSDPDTVADYLRFHLGQEKVEVSVALLLNRQNQLIAVRELSRGTVAENTIYIREIVKLALDEYADSLIIAHNHPGGSPEPSQEDIMFTRRLAQAMSLVDVSLLDHFIVTSQSVCSFRQLGLMP

SEQ ID NO: 18918 - protein, 369 aa, Neisseria meningitidis
MFSETDISMMQNALKLAALGRFSTSPNPRVGCVIAQGSQIVGQGFHVKAGEPHAEVHALRQAGEMAQGATAFVTLEPCSHYGRTPPCAEALLRSGVTRVVAAMRDPNPLVAGKGLALLEAAGIKTECGLLEHQARELNRGFLSRIERRRPFVRLKCAVSLDGKTALSDGSSFWITGEDARADVQVLRAESCAVLTGIGTVLADNPRLNVRAFPTLRQPARIVLDSRLRLPLDSHLLTDGQSPTYIATLERDEDKLRPYRKHAHVRILMPSETAGGKIDLNSLMRLLADEGIGELIVEAGSELTSAFLAEDLADEIVLYRSPKILGSGKDLFSLPENRAALSAPPLWMPVSTEILGHDIKTVFRKNDNAF

SEQ ID NO: 18919 - protein, 227 aa, Neisseria meningitidis
MPSEKCSDGISYNLSFAAHNQSVFPIPFRNAYHAPVPNICEQGKKMARLTVHTLETAPEAAKARVEAVLQNNGFIPNLIGVLANAPEALAFYQEVGKLNAANSLTAGEVEVIQIIAARTNQCGFCVAGHTKLATLKKLLSEQSVKAARALAAGEFDDAKLGALAAFTQAVMAKKGAVSDDELKAFFDAGYNQQQAVEVVMGVALATLCNYVNNLGQTEINPELQAYA

SEQ ID NO: 18920 - protein, 118 aa, Neisseria meningitidis; identical to SEQ ID NO: 7534

SEQ ID NO: 18921 - protein, 406 aa, Neisseria meningitidis
MTFLQRLQGLADNKICAFAWFVVRRFDEERVPQAAASMTFTTLLALVPVLTVMVAVASIFPVFDRWSDSFVSFVNQTIVPQGADMVFDYINAFREQANRLTAIGSMMLVVTSLMLIRTIDNTFNRIWRVNSQRPWMMQFLVYWALLTFGPLSLGVGISFMVGSVQDAALASGAPQWSGALRTAATLTFMTLLLWGLYRFVPNRFVPARQAFVGALATAFCLETARSLFTWYMGNFDGYRSIYGAFAAVPFFLLWLNLLWTLVLGGAVLTSSLSYWQGEAFRRGFDSRGRFDDVLKILLLLDAAQKEGKALPVQEFRRHINMGYDELGELLEKLARHGYIYSGRQGWVLKTGADSIELNELFKLFVYRPLPVERDHVNQAVDAVMTPCLQTLNMTLAEFDAQAKKRQ

SEQ ID NO: 18922 - protein, 197 aa, Neisseria meningitidis
MRKQNALTGIPTSDGQRGFALFIVLMVMIVVAFLVVTAAQSYNTEQRISANESDRKLALSLAEAALREGELQVLDLEYDTDSKVTFSENCGKGLCTAVNVRTNNDNEEAFDNIVVQGKPTVEAVKRSCTAKSTGLCIDNKGMEYKKGTQSVSKMPRYIIEYLGVKNGENVYRVTAKAWGKNANTVVVLQSYVSNNDE

SEQ ID NO: 18923 - protein, 367 aa, Neisseria meningitidis
MSSFIFPDNGAEWRNESLQKPPKGWHYVRESGANGILKAAYQNIATVWQGDFHNAKQVLSAMKKRVRKPAAVRSDADIAALFHAHRMKQAQQSRILNMLAVEIRPGFVLDNKRAPDIRAALLDVYGEADGKPFFLPLNLLLGFMGAHEWHKKGVAVPQLGGSIHVPFGVFSPLRGEYLDLLAHAPSTGFQTALDIGTGSGVLAAILAKQGIPSVIGTDTNPKAVACARANIARLGFEKQVEIRETDLFPEGFVDLIVCNPPWLPAKPTSAVESALYDPESAMLAAFLRDAPKHLNPDGEIRLIISDLAEHLGLRPADFLEKAFIRAGLRVADMIKTKPKHKKAANPSDPLAFARTRETTFLYRLKKA

SEQ ID NO: 18924 - protein, 70 aa, Neisseria meningitidis
MELETVVPPEEGEGEGEGGDGEIPEYLELHSEREDDISAPSQAEPPPRNIKPLVFGLLIAFLGYLLGKIF

SEQ ID NO: 18925 - protein, 217 aa, Neisseria meningitidis
MFSVPRSFLPGVFVLAALAACKPQDNSAAQAASSSASASAAENAAKPQTRGTDMRKEDIGGDFTLTDGEGKPFNLSDLKGKVVILSFGFTHCPDVCPTELLTYSDTLKQLGGQAKDVKVVFVSIDPERDTPEIIGKYAKQFNPDFIGLTATGGQNLPVIKQQYRVVSAKVNQKDDSENYLVDHSSGAYLIDKNGEVAIFSPYGSEPETIAADVRTLL

SEQ ID NO: 18926 - protein, 321 aa, Neisseria meningitidis; identical to SEQ ID NO: 6981

SEQ ID NO: 18927 - protein, 405 aa, Neisseria meningitidis
MKTVVWIVVLFAAAVGLALASGIYTGDVYIVLGQTMLRINLHAFVLGSLIAVVVWYFLFKFIIGVFNIPEKMQRFGSARKGRKAALALNKAGLAYFEGRFEKAELEASRVLGNKEAGDNRTLALMLGAHAAGQMENIELRDRYLAEIAKLPEKQQLSRYLLLAESALNRRDYEAAEANLHAAAKMNANLTRLVRLQLRYAFDRGDALQVLAKTEKLSKAGALGKSEMERYQNWAYRRQLADAADAAALKTCLKRIPDSLKNGELSVSVAEKYERLGLYADAVKWVKQHYPQSRRPELLEAFVESVRFLGERDQQKAIDFADAWLKEQPDNALLLMYLGRLAYGRKLWGKAKGYLEASIALKPSISARLVLAKVFDETGEPQKAEAQRNLVLASVAEENRPSAETC

SEQ ID NO: 18928 - protein, 669 aa, Neisseria meningitidis
LAQQGSYTKTNGTTAKMGDLLLAADNLHSRFKDKVELTAEQAKAANLAGIGRLRDLREAAALSGDLANMLKAYSAAETKEAQLALLDNLIHKWAETDSNWGKKSPMRLSTDWTQTANEGIALTPSQVAQLKKNALVSLSDKAKATIDAARDRIAVLDAYTGQDSNTLYYMSEEDALNIVKVTNDTYDHLAKNIYQNLLFQTRLQPYLNQISFKMENDTFTLDFSGLVQAFNHVKETNPQKAFVDLAEMLAYGELRSWYEGRRLMADYVEEAKKAGKFEDYQKVLGQETVALLAKTSGTQADDILQNVGFGHNKNVSLYGNDGNDTLIGGAGNDYLEGGSGSDTYVFGKGFGQDTVYNYDYATGRKDIIRFTDGITADMLTFTREGNHLLIKAKDGSGQVTVQSYFQNDGSGAYRIDEIHFDNGKVLDVATVKKLVQQSTDGSDRLYAYQSGSTLNGGLGDDYLYGADGNDLLNGDAGNDSIYSGNGNDTLNGGEGNDALYGYNGNDALNGGEGNDHLNGEDGNDTLIGGAGNDYLEGGSGSDTYVFGEGFGQDTVYNYHVDKNSDTMHFKGFKAADVHFIRSGSDLVLSASEQDNVRISGFFYGENHRVDTFVFDDAAISNPDFAKYINAGNNLVQSMSVFGSNTAATGGNVDANIQSVQQPLLVTPSA

SEQ ID NO: 18929 - protein, 228 aa, Neisseria meningitidis; identical to SEQ ID NO: 2979

SEQ ID NO: 18930 - protein, 204 aa, Neisseria meningitidis; identical to SEQ ID NO: 504

SEQ ID NO: 18931 - protein, 246 aa, Neisseria meningitidis
METTLLKPALWQIPHIGSGSETALAEKTETLKQRLHRIAGSHRDARFASSLAAEDMVITDLIAGENLNIGIFTLDTGLLHAETLNLLDRIERVYPHMQIKRFQPIREDALHYVESKGRFAFYDSVEARRECCRIRKIEPLNRAIAGADAWLTGQRREQSATRTELPFAEYDAGRGIGKYNPIFDWSEHDVWAYILANNVPYNDLYRQGFPSIGCDPCTRPVKAGEDIRAGRWWWEGRNSKECGLHK

SEQ ID NO: 18932 - protein, 210 aa, Neisseria meningitidis
MENTNRVPEQARYDAERRQADEALAGVFPAVSIFGSARTPQNHADYAFACRLARRLSDSGIAVISGGGPGIMEAANKGAFAGKSVSVGLNIVLPHEQKPNPYQDIALRFSRFAERKAVFFRYSQAYVVMPGGFGTLDELFEILTLVQTGKVPPRPIVLVGKAFWSGLAEWINAQLLARGLISEGAASLFAISDDEDEIVAYLSEHGLQTA

SEQ ID NO: 18933 - protein, 321 aa, Neisseria meningitidis
MSYTQLTQGERYHIQYLSRHCTVTEIAKQLNRHKSTISREIRRHRTQGQQYSAEKAQRQSRTIKQRKRQPYKLDSQLIQHIDTLIRRKLSPEQVCAYLRKHHRITLHHSTIYRYLRQDKSNGSTLWQHLRICSKPYRKRYGSTWTRGKVPNRVVIENRPAIVDQKSRIGDWEADTIVGKGQKSALLTLVERVTRYTIICKLDSLKAEDTARAAVRTLKAHKDRVHTITMDNGKEFYQHTKITKALKAETYFCRPYHSWEKGLNENTNGLIRQYFPKQTDFRNISDREIRRVQDELNHRPRKTLGYETPSVLFLNLFQPLIH

SEQ ID NO: 18934 - protein, 664 aa, Neisseria meningitidis
MKRHFMPKILQQTTLHRFFRANTHHPISPSVLQQAGDLIRWLCFSDGISDFRPCRLKPQNPIGGTVMNTVSNYLSALREAMKAQGLDALVIPSADPHLSEYLPAHWQARRELSGFTGSVGTFVVTADEAGVWVDSRYWEQAAKQLSGSGIELQKSGQVPPYNEWLAANLPENAAVGIPSDMVSLTGKRTLAQSLTAKNIRIEHPNDLLDQVWTSRPALPAETVFIHDPAYVSETAAEKLARVRAVMAEKGADYHLVSSLDDIAWLTNLRGSDVPFNPIFVSFLLIGKDNAVLFTEQCRLNAEAAAALQTAGIAVEPYAQVAGKLAQIGGVLLIEPNKTAVSTLVRLPKSVRLIEGINPSTLFKSCKSEADIARIREAMEHDGAALCGFFAEFEDIIGNGGSLTEIDVDTMLYRHRSVRPGFISLSFDTIAGFNANGALPHYSATPESHSTISGNGLLLIDSGAQYKGGTTDITRVVPVGTPTAEQKRDNTLVLKAHIALAEAVFPENIPSPLIDAICRKPLWQAQCDYGHGTGHGVGYFLNVHEGPQRIAFAAPATPETAMKKGMVTSIEPGLYRPGKWGIRIENLAANQAVAAPQETEFGSFLCFETLTLCPIDTRLMDTALMTDGEIDWVNRYHAEVRRRLEPLTEGAAKAWLIKRTEPLAR

SEQ ID NO: 18935 - protein, 221 aa, Neisseria meningitidis; identical to SEQ ID NO: 11037

SEQ ID NO: 18936 - protein, 336 aa, Neisseria meningitidis
MHIGGYFIDNPIALAPMAGITDKPFRRLCRDFGAGWAVCEMLTSDPTLRNTRKTLHRSDFVDEGGIVAVQIAGSDPQQMADAARYNVSLGAQLIDINMGCPAKKVCNVQAGSALMQNEPLVAAILEAVVRAAGVPVTLKTRLGWHEDHQNLPVIAKIAEDCGIAALAVHGRTRTQMYKGEARYELIAETKCRLNIPVWVNGDITSPQKAAAVLKQTAADGIMIGRGAQGRPWFFRDLKHYAEHGVLPPALSLAECAAAILNHIRAIHAFYGDSAGVRIARKHIGWYIGEMPDGEQARREINRLDSAAAQYDMLAGYLERLAGKTDRWACGYRTNAF

SEQ ID NO: 18937 - protein, 497 aa, Neisseria meningitidis; identical to SEQ ID NO: 1619

SEQ ID NO: 18938 - protein, 412 aa, Neisseria meningitidis
MAFYAFKAMRAAALAAAVALVLSSCGKGGDAAQGGQPAGREAPAPVVGVVTVHPQTVALTVELPGRLESLRTADVRAQVGGIIQKRLFQEGSYVRAGQPLYQIDSSTYEAGLESARAQLATAQATLAKADADLARYKPLVAAEAVSRQEYDAAVTAKRSAEAGVKAAQAAIKSAGINLNRSRITAPISGFIGQSKVSEGTLLNAGDTTVLATIRQTNPMYVNVTQSASEVMKLRRQIAEGKLLAADGVIAVGIKFDDGTVYPEKGRLLFADPTVNESTGQITLRAAVPNDQNILMPGLYVRVLMDQVAVDNAFVVPQQAVTRGAKDTVMIVNAQGGMEPREVTVAQQQGTNWIVTSGLKDGDKVVVEGISIASITGAKKVTPKEWAPSENQAAAPQSGVQTASEAKTASEAE

SEQ ID NO: 18939 - protein, 431 aa, Neisseria meningitidis
MAQKIQSVKGMNDLLPVEQKDFKLTAAFWQAFEDTVNRWTRAYGYQQIRTPIVEQTGLFVRSIGEETDVVGKEMYTFSDSNDSLSLSLRPEGTASCLRAVVEHNLLYNSPQKLWYMGPMFRRERPQKGRYRQFHQVGIEALGFEGPDIDAEIIAMSADLWEKLGIREYLTLEINSLGNREERAAHRAALVEYLTRYEDKLDEDSKRRLKTNPLRVLDTKNPDLQEICNAAPRLVDYLGEASQNHYARFKAMLDGLGIQYIENPRLVRGLDYYNQTVFEWTTDKLGAQATVCGGGRYDGLIEELGGKPAPSIGFAMGIERLLLLVSEYGSLEVNAAPDVYAMHQGERADLQVMKYAQALRAQGFNVMQHSGYQSLKAQMKKADNSGARFALIVAQDELANGTVTLKDMNGAHGQQTVAAADLTNTLQQWKNA

SEQ ID NO: 18940 - protein, 270 aa, Neisseria meningitidis
LTADATRFIIWSSRNDNLQRQMPSERKDMIKFKNVHKHFKDLHVINGVNLEIKKGEVVVVCGPSGSGKSTLIRTVNQLESIESGEIWVDGVNVADPKTDLNKIREEVGFVFQSFNLYPHLTVLENITLAPMKVKGQNAEQAEKKAMELLERVGLAHKKDAFPSQLSGGQQQRVAIARGLAMEPRVMLFDEPTSALDPEMVGEVLKVMKDLAESGMTMMCVTHEMGFAREVADRVLFVDKGQILEDETPEAFFTNPKHERAKQFLQQVMTH

SEQ ID NO: 18941 - protein, 67 aa, Neisseria meningitidis; identical to SEQ ID NO: 966

SEQ ID NO: 18942 - protein, 166 aa, Neisseria meningitidis; identical to SEQ ID NO: 1498

SEQ ID NO: 18943 - protein, 110 aa, Neisseria meningitidis
MQILSFQPDIAERMLEGTESESVNENAQFVRTDNGYWIAWHEGVAALLAPDTPPGIPCFWVEGAESLEELCVMVERGEFDEVEEFDGDDDEWLETAQGCGHHGDACACGH

SEQ ID NO: 18944 - protein, 367 aa, Neisseria meningitidis; identical to SEQ ID NO: 6599

SEQ ID NO: 18945 - protein, 443 aa, Neisseria meningitidis
MPSENTPDKVNIMIRPDFQEYLPSYYFSSVNPHTVYPKLQCRLKTDTCIIGGGLSGLCTALPLAEQGHETVVLEAARIGFGASGRSGGQVISDYACGMGEIEKQVGLEQAQWFWQQSLQAVELVDERVRKHAIDCDWQRGYATVAVRPQHWEELQQWHEHAQRHYGASHYQLWDKAELKQQLDSDMYQGAQFDPLSGHLHPLNYTLGIARAAAEAGAQIFEQSPMTCIEPHQNGWLVYTPEGSVECKNVVYAVNTYAGLNPIFKPLERKAIAVSTFIIATEPLGARAKGLIRNNMAVCDNRHILDYYRLSADGRLLFGGKDNEFIDNPARMTELVRQDMLKVFPQLADVKIEYSWGGECDITANLVPHFGRLAPNVFYTQGYSGHGMAITGIAGLAVAEAILGDECRLKPFEQLRQPNIILQPFLRKLGSFLGSKYYQWKDSR

SEQ ID NO: 18946 - protein, 67 aa, Neisseria meningitidis
MKKSLIALCVAHCAKLKNDFGVPPLPEIKITPSPVRVGSLKQHPSLRLGKSGVAAAKRAARKRKNRH

SEQ ID NO: 18947 - protein, 91 aa, Neisseria meningitidis; identical to SEQ ID NO: 1961

SEQ ID NO: 18948 - protein, 157 aa, Neisseria meningitidis; identical to SEQ ID NO: 3094

SEQ ID NO: 18949 - protein, 1827 aa, Neisseria meningitidis
MKTKRFKINAISLSIFLAYALTPYSEAALVRDDVDYQIFRDFAENKGKFFVGATDLSVKNKQGQNIGNALSNVPMIDFSVADVNKRIATVVDPQYAVSVKHAKAEVHTFYYGQYNGHNDVADKENEYRVVEQNNYEPHKAWGASNLGRLEDYNMARFNKFVTEVAPIAPTDAGGGLDTYKDKNRFSSFVRVGAGRQLVYEKGAYHQEGNEKGYDLRDLSQAYRYAIAGTPYKDINIDQTMNTEGLIGFGNHNTHYSAEELKQALSQDALTNYGVLGDSGSPLFAFDKQKNQWVFLGTYDYWAGYGKKSWQEWNIYKKEFADKIKQRDNAGTIKGNREHHWNITFGTNSKIGSTAVRLANNERDANNGQNVTFEDNGTLVLDQNINQGAGGLFFKGDYTVKGANNDITWLGAGIDVADGKKVVWQVKNPNGDRLAKIGKGTLEINGTGVNQGQLKVGDGTVILNQQADADKKVQAFSQVGIVSGRGTLVLNSSNQINPDNLYFGFRGGRLDANGNDLTFEHIRNVDEGARIVNHNTDRASTITLTGKSLITAPQNLSVYEIRNDYDDDDYYGYYSYRKPIPQGKDLYYKNYRYYALKSGGSVNAPMPENGQTENNDWVFMGYKQEEAQKNAMNHKNNQRISGFSGFFGEENGKGHNGALNLNFNGKSAQNRFLLTGGTNLNGKISVTQGNVLLSGRPTPHARDFVNKSSARKDAHFSKNNEVVFEDDWINRTFKATEIAVNQSASFSSGRNVSNITANITATDNAKVNLGYKNGDEVCVRSDYTGYVTCNTDNLSDKALNSFGATQINGNVNLSQNAALVLGKAALWGQIQGQGNSSVSLNQHSKWHLTGDSQVHNLSLADSHIHLNNASDAQSANKYHTLKINHLSGNGHFHYLTHLAKNLGDKVLVKESASGHYQLHVQDKTGEPNQEGLNLFDASSVQDRSHLSVSLANNHVDLGALRYTIKTENGITRLYNPYAENRRRVKPAPSPATNTASQAQKATQTDGAQIAKPQNIVVAPPSPQANQAEEAKRQQAKAEQVKRQQAEAERKSAELAKQKAEAEREARELATRQKAEQERSSAELARRHEKEREAAELSAKQKVEAEREAQALAVRRKAEAEEAKRQAAELARRHEKEREAAELSAKQRVGEEERRQTAQSQPQRRKRRAAPQDYMAASQDRPKRRGHRSVQQNNVEIAQAQAELVRRQQEERKAAELLAKQRAEAEREAQALAARRKAEAEEAKRQAAELAHRQEAERKAAELSANQKAAAEAQALAARQQKALARQQEEARKAAELAVKQKAETERKTAELAKQRAAAEAAKRQQEARQTAELARRQEAERQAAELSAKQKAETDREAAESAKRKAEEEEHRQAAQSQPQRRKRRAAPQDYMAASQNRPKRRGRRSTLPAPPSPSFDSSAYAAPRALHNPDWYENDYEEIPLDALEDENVSESVDTSDKQPQDNTELHEKYENDYEEIPLDALEDEDVSESVDTSDKQPQDNTELHEKVETVSLQPRAAQPRAQAATQPQAQAAAQADAVSTNTNSALSDAMASTQSILLDTGASLTRHIAQKSRADAEKNSVWMSNIGYGRDYASAQYRRFSSKRTQTQIGIDRSLSENMQIGGVLTYSDSQHTFDQASGKNTFVQANLYGKYYLNDAWYVAGDIGAGSLRSRLQTQQKANFNRTSIQTGLTLGNTLKINQFEIVPSAGIRYSRLSSADYKLGNDSVKVSSMSVKTLTAGLDFAYRFKVGNLTVKPLLSAAYFANYGKGGVNVGGNSFAYKADNQQKYSAGAALLYRNVTLNVNGSITKGKQLEKQKSGQIKIQIRF

SEQ ID NO: 18950 - protein, 171 aa, Neisseria meningitidis
MKSKLPLILINFSLISSPLGANAAKIYTCTINGETVYTTKPSKSCHSTDLPPIGNYSSERYIPPQTPEPVSSPSNGGQVVKYKAPVKTVSKPAKSNTPPPQQAPSNNSRRSILEAELSNERKALTEAQKMLSQARLAKGGNINHQEINALQSNVLDRQQNIQALQRELGRM

SEQ ID NO: 18951 - protein, 459 aa, Neisseria meningitidis
MLLDLNRFSFSVFLKEVRLLTALALPMLLAQVAQVGIGFVDTVMAGGAGKEDLAAVALGSSAFATVYITFMGIMAALNPMIAQLYGAGKTDEVGETGRQGIGFGLFLGVFGMVLMWAAITPFRNWLTLSDYVEGTMAQYMLFTSLAMPAAMVHRALHAYASSLNRPRLIMLVSFAAFVLNVPLNYIFVYGKFGMPALGGAGCGLATMAVFWFSALALWIYIAKENFFRPFGLTAKFGKPDWAVFKQIWKIGAPIGLSYFLEASAFSFIVFLIAPFGEDYVAAQQVGISLSGILYMIPQSVGSAGTVRIGFSLGRREFSRARYISGVSLVLGWMLAVITVLSLVLFRSPLVSMYNNDPAVLSIAATVLLFAGLFQPADFTQCIASYALRGYKVTKVPMFIHAAAFWGCGLLPGYLLAYRFDMGIYGFWTALIASLTIAAIALVWCLELCSREMVRSHKAV

SEQ ID NO: 18952 - protein, 350 aa, Neisseria meningitidis; identical to SEQ ID NO: 8682

SEQ ID NO: 18953 - protein, 324 aa, Neisseria meningitidis
VQPGLWASDGIFSEWRHSCRRRGSRMGKGGDIVVGNGKKYAAPLLVLGCVVFGLGSLIVRSVPVGSYAIAFWRLLISVFVFWFLARFFGQKFPKNRKTVRYALTAGVFLAFDLALWHESIHAVGPGISTLLNSLQIFFLSAIGVFFFGERLSGLKKAGLISAVAGVAMIAGAEFGYNGNAVWGFASGLVSGLMLALSMVFVRKTHEIEPVALFPSMMILSLGGAVSLVVPALLMDGGALYPTTWKDAGLVLVYGVVMQCFAWAMVAYAIPLLSLSLTGLLLLSEPVAALFIDYFGLGKPIEGVQWAGVALTLSAIYLGSLKQQS

SEQ ID NO: 18954 - protein, 79 aa, Neisseria meningitidis; identical to SEQ ID NO: 1083

SEQ ID NO: 18955 - protein, 263 aa, Neisseria meningitidis
MNLFFDTKLGKQQNKATHKIRVMSEAWLEKNGYCPCCGSKPMQRFANNKPVADLFCSNCHEQYELKSKNQKTIGNSVPDGAYRTMLERIRSDTNPNFFFLAYKKADYSIRQLVLVPKHFITPDMIIPRNKGIKNRPNHIMCSINLAPLPESGKIFLIDDSRIIEPETVLKKWQSNLFLRNQNAERKGWLLAVMKCIDQLPEEFTLSQMYEFENKLSIQFPQNKHIKDKIRQQLQILRDQNTIEFIGRGLYKKIDKLPPTSKAF

SEQ ID NO: 18956 - protein, 328 aa, Neisseria meningitidis
LPDAANRHRPAIRLFKNRKIRMENQRPLLGFALALLAAMTWGTLPIAVRQVLKFVDAPTLVWVRFTVAAAVLFVLLALGGRLPKRRDFSWCSFRLLLLGVAGISANFVLIAQGLHYISPTTTQVLWQISPFTMIVVGVLVFKDRMTAAQKIGLVLLLAGLLMFFNDKFGELSGLGAYAKGVLLCAAGSMAWVCYAVAQKLLSAQFGPQQILLLIYAASAAVFLPFAEPAHIGSLDGTLAWVCFAYCCLNTLIGYGSFGEALKHWEASKVSAVTTLLPVFTVIFSLLGHYVMPDTFAAPDMNGLGYVGALVVVGGAVTAAVGDRLFKRR

SEQ ID NO: 18957 - protein, 590 aa, Neisseria meningitidis; identical to SEQ ID NO: 14343

SEQ ID NO: 18958 - protein, 154 aa, Neisseria meningitidis; identical to SEQ ID NO: 4442

SEQ ID NO: 18959 - protein, 458 aa, Neisseria meningitidis
MHDKTWSGRFNEPVSELVKQYTASIGFDRRLAEWDIQGSLAHAQMLKETGVLDEGDLADIRRGMAEILEEIRSGKIEWSSDLEDVHMNIERRLTDKIGDAGKRLHTGRSRNDQVATDIRLWLRDQITVIQSLIQNLQTALLDLAEQNAETVMPGFTHLQVAQPVSFGHHMLAYVEMLGRDNERMADCRRRVNRMPLGAAALAGTTYPIQREITAELLGFEQICQNSLDAVSDRDFAVEFTAAASLVMVHLSRLSEELILWMSPRFGFIDIADRFCTGSSIMPQKKNPDVPELVRGKSGRVIGHLIGLITLMKSQPLAYNKDNQEDKEPLFDTADTLIDTLRIYADMMRGVTVKPDNMRAAVMQGFATATDLADYLVKKGMPFRDAHEVVAQAVRHADEAGVDLSELPLEVLQGFSDLIADDVYGVLTPEGSLNARNHLGGTAPEQVRFQVKRWREMLA

SEQ ID NO: 18960 - protein, 113 aa, Neisseria meningitidis; identical to SEQ ID NO: 1239

SEQ ID NO: 18961 - protein, 238 aa, Neisseria meningitidis; identical to SEQ ID NO: 2994

SEQ ID NO: 18962 - protein, 823 aa, Neisseria meningitidis
MKKTCFHCGLDVPEHLHLTVRYENEDRETCCAGCQAVAQSIIDAGLGSYYKQRTADAQKTELPPQEILDQIRLYDLPEVQSDFVETHGGTREAVLMLGGITCAACVWLIEQQLLRTDGIVRIDLNYSTHRCRVVWDDGKIRLSDILLKIRQIGYTAAPYDAQKIEAANQKERKQYIVRLAVAGLGMMQTMMFALPTYLYGGDIEPDFLQILHWGGFLMVLPVVFYCAVPFYQGALRDLKNRRVGMDTPITVAIIMTFIAGVYSLATNAGQGMYFESIAMLLFFLLGGRFMEHIARRKAGDAAERLVKLIPAFCHHMPDYPDTQETCEAAVVKLKAGDIVLVKPGETIPVDGTVLEGSSAVNESMLTGESLPVAKMPSEKVTAGTLNTQSPLIIRTDRTGGGTRLSHIVRLLDRALAQKPRTAELAEQYASSFIFGELLLAVPVFIGWTLYADAHTALWITVALLVITCPCALSLATPTALAASTGTLAREGILIGGKQAIETLAQTTDIIFDKTGTLTQGKPAVRRISLLRGTDEAFVLAVAQALEQQSEHPLARAILNCRISDGSVPDIAIKQRLNRIGEGVGAQLTVNGETQVWALGRASYVAEISGKEPQTEGGGSAVYLGSQSGFQAVFYLTDPLKDSAAEAVRQLAGKNLTLHILSGDRETAVAETARALGVAHYRAQAMPEDKLEYVKALQKEGKKVLMIGDGINDAPVLAQADVSAAAAGGTDIARDGADIVLLNEDLRTVAHLLDQARRTRHIIRQNLIWAGAYNIIAVPLAVLGYVQPWIAALGMSFSSLAVLGNALRLHKRGKMQSEKMPSEQ

SEQ ID NO: 18963 - protein, 248 aa, Neisseria meningitidis; identical to SEQ ID NO: 3755

SEQ ID NO: 18964 - protein, 121 aa, Neisseria meningitidis; identical to SEQ ID NO: 10590

SEQ ID NO: 18965 - protein, 195 aa, Neisseria meningitidis; identical to SEQ ID NO: 7027

SEQ ID NO: 18966 - protein, 86 aa, Neisseria meningitidis; identical to SEQ ID NO: 13718

SEQ ID NO: 18967 - protein, 361 aa, Neisseria meningitidis; identical to SEQ ID NO: 7621

SEQ ID NO: 18968 - protein, 351 aa, Neisseria meningitidis; identical to SEQ ID NO: 15425

SEQ ID NO: 18969 - protein, 861 aa, Neisseria meningitidis
MLEAYRKAAAERAALGIPALPLTAQQTADLVELLKSPPAGEGEFLVELLAHRVPPGVDDAAKVKASFLAAVAEGSASSPLISPEYATELLGTMLGGYNIHALIELLDDDKLAPIAAKGLKHTLLMFDSFHDVQEKAEKGNKYAQEVLQSWADAEWFTSRAKVPEKITVTVFKVDGETNTDDLSPAPDAWSRPDIPLHALAMLKNPRDGITPGKPGEVGPIKLLEELKAKGHPVAYVGDVVGTGSSRKSATNSVIWHTGEDIPFVPNKRFGGVCLGGKIAPIFFNTQEDSGALPIEVDVSALKMGDVVDILPYEGKIVKNGETVAEFELKSQVLLDEVQAGGRINLIIGRGLTAKAREALKLPASTAFRLPQAPAESKAGFTLAQKMVGRACGLPEGQGVRPGTYCEPRMTTVGSQDTTGPMTRDELKDLACLGFSADMVMQSFCHTAAYPKPVDVKTHKELPAFISTRGGVSLRPGDGVIHSWLNRLLLPDTVGTGGDSHTRFPIGISFPAGSGLVAFAAATGVMPLDMPESVLVRFSGKLQPGVTLRDLVNAIPLYAIKQGLLTVAKAGKKNIFSGRILEIEGLPDLKVEQAFELTDASAERSAAGCTVKLNKEPIIEYMKSNVVLMKNMIANGYQDPRTLERRIKAMEKWLANPELLEADKDAEYAAVIEINMDDIKEPIIACPNDPDDVCFMSERSGTKIDEVFIGSCMTNIGHFRAASKLLEGKADTPVRLWIAPPTKMDAKQLSDEGHYGVLGRAGARMEMPGCSLCMGNQAQVREGATVMSTSTRNFPNRLGKNTFVYLGSAELAAICSKLGKIPTVEEYQANIGIINEQGDKIYRYMNFNEIDSYNEVAETVNV

SEQ ID NO: 18970 - protein, 328 aa, Neisseria meningitidis
VSGAESYRHITVLLNEAVDALAVREDGVYVDGTFGRGGHSRLILSRLGDAGRLIVFDKDPQAIAVAEELARSDKRVGVVHGGFASFQTALDGLGIGKVDGALFDLGISSPQIDDGSRGFSFRFDAPLDMRMDTTRGMSAAEWIAVASEQDLHEVIKNYGEERFSRQIARAIVAQRAESPIDTTRKLAQIVAQNVRTRERGQDPATRTFQAIRIFINRELEEVGAVLPQVMCRLKEGGRLAVIAFHSLEDRIVKQFVKKYSQHAPLPRWAAVREADLPEPPLKIAGRALKPGEAEIAANPRARSAVLRVAERTAGPIPEQSQRKTSEWQ

SEQ ID NO: 18971 - protein, 566 aa, Neisseria meningitidis
MSVKIQTRSVNTDVFNHLLTAGADPLIARLCASRGVQSPAELDDKLASLLPYQTLTNCEAAARRLADAVERQEKILIVADYDADGATACAVGLDGLAAMGAKVDFLVPNRFEHGYGLTPELAEIAAAQGVDLLITVDNGIASIAGVARAQELGLDVIVTDHHLPAETVPDCIIVNPNQKGCGFQSKSLAGVGVIFYVLMALRAELRRRNYFSDGLKEPNLGDLLDLVALGTVADVVSLDHNNRILVSQGLKRMRSGKMRPGIRALFEVARRDWRKAQPFDMGFALGPRINAAGRLDDMSVGIACLLARDDVEAQELAAQLNNLNIERREIEQSMLQDALNAFPETLPSGQTTLVAYRDDFHQGVVGIVASRLKDRFYRPTIVFAPADNGEVRGSGRSIPNLHLRDALDLVSKRHPDLILKFGGHAMAAGLSILEHNIPAFQTSFEEAVREMVCEDDLSQTFITDGSLPACDITLEQAQNLARHVWGQGFAPPSFTDEFHVVRQQPLGAEGKHKKVWLQKDGCEFEAMFWRCSEDIPEYIRTVYRPVANEWRNNLELQLYIDYWEAV

SEQ ID NO: 18972 - protein, 82 aa, Neisseria meningitidis
MHPIETPDKTFHDGDGVSELGTILPAWWLNQVQSELLAVLTAAGIQPDKSQPNQLLAALNRLAVVITGDQTITGQKTFTAQT

SEQ ID NO: 18973 - protein, 315 aa, Neisseria meningitidis; identical to SEQ ID NO: 5319

SEQ ID NO: 18974 - protein, 143 aa, Neisseria meningitidis
MGSNAWLFWALASAGFASLTAVFAKMGLQGIDSDFATFIRTLVILAALLLFLTYTGKWQGVNGFTGHNWTFLILSGLATGASWLAYFKALQLGNASQVAPVDKFSLVLVALMAVVFLNERPSTQEWIGLGLVTAGVLVLALKR

SEQ ID NO: 18975 - protein, 149 aa, Neisseria meningitidis; identical to SEQ ID NO: 3543

SEQ ID NO: 18976 - protein, 250 aa, Neisseria meningitidis
VPVGEARIPPNPKAVKGTTVTLSQEQRLANGELIPKGSVVTWSDNAVKVVRPDGKKRRFNSRDWEQKALPKPQLPKDYRDDINIGGNNPRFNQQRHEKIESHNPNRIEEIRQRNAVSSAERQADALKRMQTSGRTRLPGQPQKGKPGAAREMSSSDNPNQTAEAFARRYLGRKPTLMERVEGEKLYGGKCVGCWKAQMPDGTFVVYRPAGNASITKGTTASVDINNPTLNNLNINLKGKPTELKFKFPAR

SEQ ID NO: 18977 - protein, 170 aa, Neisseria meningitidis
MKMFEQEDEWVSKTQMKKQMNGLQDLGMELTKLSSDTLKKIGLDEDLYEAVVTYKKITSNGALKRQAQFIGRLMRDTDPAPIEAFLAKLRGDDAVHNAFLQRVEQARVRLLADDGALTQFMSDFPHADAGKLRTLVRNTKKEQEQNKPPKNFRALFQELKTVMENGDAEI

SEQ ID NO: 18978 - protein, 65 aa, Neisseria meningitidis; identical to SEQ ID NO: 127

SEQ ID NO: 18979 - protein, 381 aa, Neisseria meningitidis
MQNNSYGYAVSVRVGGKEHRHWERYDIDSDFLIPADSFDFVIGRLGPEAAIPDLSGESCEVVIDGQIVMTGIIGSQRHGKSKGSRELSLSGRDLAGFLVDCSAPQLNVKGMTVLDAAKKLAAPWPQIKAVVLKAENNPALDKIDIEPGETVWQALTHIANSVGLHPWLEPDGTLVVGGADYSSPPVATLCWSRTDSRCNIERMDIEWDTDNRFSEVTFLAQSHGRSGDSAKHDLKWVYKDPTMTLHRPKTVVVSDADNLAALQKQAKKQLADWRLEGFTLTITVGGHKTRDGVLWQPGQRVHVIDDEHGIDAVFFLMGRRFMLSRMDGTQTELRLKEDGIWTPDAYPKKAEAARKRKGKRKGVSHKGKKGGKKQAETAVFE

SEQ ID NO: 18980 - protein, 108 aa, Neisseria meningitidis; identical to SEQ ID NO: 6420

SEQ ID NO: 18981 - protein, 213 aa, Neisseria meningitidis; identical to SEQ ID NO: 5657

SEQ ID NO: 18982 - protein, 584 aa, Neisseria meningitidis
VKPLRRLTNLLAACAVAAAALIQPALAADLAQDPFITDNTQRQHYEPGGKYHLFGDPRGSVSDRTGQINVIQDYTHQMGNLLIQQAAIQGNLGYTVRFSGHGYEEHAPFDNHAADSASKEQGNVDDGFTVYRLNWEGHEHHPADAYDGPKGGNYPKPTGARDEYTYHVNGTARSIKLNPTDTRSIRQRISDNYNNLGSNFSDRADEANKKIFEHNAKLDRWGNSMEFVNGIAAGALNPFISAGEALGIGDILYGTRYAIDKAAMRNIAPLPAEGKFAVIGGLGSVAGFEKNTREAVDRWIQENPNAAETVEALVNVLPFAKVKNLTKAAKPGKAAVSGDFSKSYTCSFHGSTLVKTADGYKAIAHIQAGDRVLSKDEASGETGYKPVTTRYGNPYQETVYIEVSDGIGNSQTLISNRIHPFYSQGKWIQAGRLKKGDTLLSESGAKQTVQNITLKQQPLKAYNLTVADWHTYFVKGDKAETEGVRVHNSCPPYKRPNNATTKAQRESVQGKPCVECGKLAEKMIADHKKPLVVEYYETGTIDKSKMRAIESVQPQCPTCSAKQGGRLSQYSKEQKRKLSNGNKK

SEQ ID NO: 18983 - protein, 146 aa, Neisseria meningitidis
VNIRRAVYADCAALAALDAVCNPSAWTQHQFESALVSPSEQVFLAEKDGRLAAFIVWQNLPDESELHLIATAPECRRRGVASALLEYWYAHLPEGTQRLLLEVRAGNTAAQALYAAHGFSIAGRRKNYYRTADGKTEDAVLMEKIC

SEQ ID NO: 18984 - protein, 347 aa, Neisseria meningitidis; identical to SEQ ID NO: 2159

SEQ ID NO: 18985 - protein, 305 aa, Neisseria meningitidis; identical to SEQ ID NO: 14673

SEQ ID NO: 18986 - protein, 644 aa, Neisseria meningitidis; identical to SEQ ID NO: 778

SEQ ID NO: 18987 - protein, 81 aa, Neisseria meningitidis; identical to SEQ ID NO: 1361

SEQ ID NO: 18988 - protein, 617 aa, Neisseria meningitidis
MNRYPLWKYLLIVFTIAVAAVYSLPNLFGETPAVQVSTNRQAIIINEQTQSKVDAALQNAGIQTDGMFVVDNSLKVRFKDTETQLKARDVIENTLGEGYITALNLLADSPEWMAKIKANPMFLGLDLRGGVHFTMQVDMKAAMQKTFERYSGDIRRELRREKIRSGTVRQAGNSLTVPLQDAGDVQKALPQLRKLFPEATLNSDGSNIVLTLSEEAVNKVRSDAVKQNITTLHNRVNELGVAEPVIQQSGADRIVVQLPGVQDTAKAKDIIGRTATLELRMVEDDPAKLREALEGNVPSGYELLSSGGDRPEILLISKQVELTGDNINDAQPSFDQMGAPAVSLSLDSAGGSIFGELTAANVGKRMAMVLIDQGKSEVVTAPVIRTAITGGRVEISGSMTTAEANDTSLLLRAGSLAAPMQIVEERTIGPSLGKENIEKGFHSTLWGFAIVAAFMVIYYRLMGFFSTIALSANILFLIGILSAMQATLTLPGMAALALTLGMAIDSNVLINERIREELRAGVPPQQAINLGFQHAWATIVDSNLTSLIAGIALLVFGSGPVRGFAVVHCLGILTSMYSSVVVFRALVNLWYGRRRKLQNISIGSVWKPKAEIAGGKE

SEQ ID NO: 18989 - protein, 106 aa, Neisseria meningitidis
LGEKIKDGKKTVLSCEEEQKICNTFTNKQAVEDFSVVIGYDEIKAKNHSLSAGQYFEVKIDYVDISADEFAQKMAGFSADLDKLFAESAELEKEIKDRLAMLKFNS

SEQ ID NO: 18990 - protein, 597 aa, Neisseria meningitidis
MQLDIDRLVAYFGGVNALAEALKQHDPENAATTAAIYKWRTRGSLPLAQLQKLTALAESQGRPLDLNAFLQKNESLERTEMTQANRVIIFDTTLRDGEQSPGAAMTKEEKIRVARQLEKLGVDIIEAGFAAASPGDFEAVNAIAKTITKSTVCSLSRAIERDIRQAGEAVAPAPKKRIHTFIATSPIHMEYKLKMKPKQVIEAAVKAVKIAREYTDDVEFSCEDALRSEIDFLAEICGAVIEAGATTINIPDTVGYSIPYKTEEFFRELIVKTPNGGKVVWSAHCHNDLGLAVANSLAALKGGARQVECTVNGLGERAGNASVEEIVMALKVRHDLFGLETGIDTTQIVPSSKLVSTITGYPVQPNKAIVGANAFSHESGIHQDGVLKHRETYEIMSAESVGWATNRLSLGKLSGRNAFKTKLADLGIELESEEALNAAFARFKELADKKREIFDEDLHALVSDEMGSMNAESYKFISQKISTETGEEPRADIVFSIKGEEKRASATGSGPVDAIFKAIESVAQSGATLQIYSVNAVTQGTESQGETSVRLARGNRVVNGQGADTDVLVATAKAYLSALSKLEFSAAKPKAQGSGTI

SEQ ID NO: 18991 - protein, 88 aa, Neisseria meningitidis; identical to SEQ ID NO: 1100

SEQ ID NO: 18992 - protein, 192 aa, Neisseria meningitidis; identical to SEQ ID NO: 2909

SEQ ID NO: 18993 - protein, 48 aa, Neisseria meningitidis; identical to SEQ ID NO: 6016

SEQ ID NO: 18994 - protein, 107 aa, Neisseria meningitidis; identical to SEQ ID NO: 2467

SEQ ID NO: 18995 - protein, 335 aa, Neisseria meningitidis
MSTFFQQTAQAMIAKHIDRFPLLKLDQVIDWQPIEQYLNRQKTRYLRDHRGRPAYPLLSMFKAVLLGQWHSLSDPELEHSLITRIDFNLFCRFDELSIPDYSTLCRYRNRLAQDDTLSELLKLINRQLTEKGLKVEKASAAVIDATIIQTAGSKQRQAIEVDEEGQISGQTTPSKDSDARWIKKNGLYKLGYKQHTRTDAEGYIEKLHITPANAHECKHLPPLLEGIAEGTTVYADKGYDSAENRQHLEEHQLQDGIMRKACRNRPLTETQTKRNRYLSKTRYVVEQSFGTLHRKFRYARAAYFGLIKVSAQSHLKAMCLNLLKAANRLSAPAAA

SEQ ID NO: 18996 - protein, 320 aa, Neisseria meningitidis
MQYAKISGTGSYLPANRVSNDDLAQKVDTSDEWITARTGIKFRHIAAENEKTSDLAAEAARRALDAAGLDSGEIDLIIVATATPDMQFPSTATIVQQKLGITNGCPAFDVQAVCAGFMYALTTANAYIKSGMAKNALVIGAETFSRIVDWNDRTTCVLFGDGAGAVVLSASDTPGIIHSKLKADGNYLKLLNVPGQIACGKVSGSPYISMDGPGVFKFAVKMLSKIADDVIEEAGYTAAQIDWIVPHQANRRIIESTAKHLGLSMDKVVLTVQDHGNTSAASIPLALDTGIRSGQIKRGQNLLLEGIGGGFAWGAVLLQY

SEQ ID NO: 18997 - protein, 241 aa, Neisseria meningitidis; identical to SEQ ID NO: 400

SEQ ID NO: 18998 - protein, 102 aa, Neisseria meningitidis
MKTVPTILISILLATALPASAHGIHKSKPLTMDELPPICQQYFKRAETCYNKAGNKANFARNNTKFLFQALPAADLGQRKQMCQIAMDSFAEKTRISNSNAV

SEQ ID NO: 18999 - protein, 157 aa, Neisseria meningitidis; identical to SEQ ID NO: 140

SEQ ID NO: 19000 - protein, 416 aa, Neisseria meningitidis
LPEMPFEGSSGFGRHIPSGCQTGKNKMKRDLSKMTCIEDLRRVAKRKMPRMFYDYIDSGSWTETTYRENTSDFKDIRFRQKVLVNMEGRSLETKMIGQDVKMPVAIAPTGFTGMAHADGEILAARAAEKFGIPFTLSTMSICSIEDVAENTSAPFWFQLYVMRDREFMENLIKRAKDAKCSALVLTADLQVLGQRHKDIKNGLSAPPKPTIANLINLATKPEWCMKMLNTERRTFRNIVGHAKNVGDLSSLSSWTSEQFDPRLSWDDVARIKDLWGGKLIIKGIMEPEDAEKAAKSGADALIVSNHGGRQLDDTVSAIKALPDIVSAVGSDIEVWMDSGIRSGQDILKAWALGAKGTMIGRAFLYGLGAYGEEGVTRALEILYKEMDISMAFTGHRDIQDVDASILRGKDWGRETV

SEQ ID NO: 19001 - protein, 739 aa, Neisseria meningitidis
MCKPNYGGIVLLPLLLASCIGGNFGVQPVVESTPTAYPVTFKSKDVPTSPPAGPSVETTPVNRPAVGAAMRLLRRNTAFHREDGTAIPDSKQAEEKLSFKEGDVLFLYGSKENKLQQLKSEIHKRDPNVKIRTSENENEKYSYKFVDAGYVFAKDGKDEIEKTSDEKQFSNRLGYDGFVYYLGEHPSQSLPSAGTVKYSGNWQYMTDAIRHRRGKGVSSVDLGYTTYYGNEIGAASYEARDADGREKHPAEYTVNFDKKNLEGKLIKNQYVQKRDDPKNPLTIYNITATLDGNRFTGSAEVNPDLAKNHAGKEHLFFHTNADRRLEGGFFGDNGEELAGRFISNDNSVFGVFAGKQKTEAANAADTKPALPSGKHTKILDSLKISVDEATDSNARKFAISPMPDFGHPDKLLVEGREIPLVNEEQIIKLADGRKMTVSACCDFLTYVKLGRIKTERPASKPKAEDKGEYEEGAGVGTVEEDEIGDEESTGDEVVEDEDEEEPEEEAEEEAEEEETKEKSPTEEGNGGSGSILPAPEASKGRDIDLFLKGIRTAETDIPQSGTAHYTGTWEARIGKPIQWDNHADKAAKAEFTVDFDKKSIFGTLKEQNGVEPAFHIENGKIEGNGFHATAHTRDTGINLSGTGSTNPQRFKASNLRVEGGFYGPQAEELGGIIFNNDGKSLGITEGTENKVDVDAEVDAEVDAEVDAEVDVDVEQLKPEAKPQFGVVFGAKKDNKEVEK

SEQ ID NO: 19002 - protein, 399 aa, Neisseria meningitidis
MPPAEVPSDGIVKNFIKNRIPIMSTPALLVLADGSVFHGTSIGYEGSTSGEVVFNTSMTGYQEILTDPSYCKQIVTLTYPHIGNTGTNAEDEESRSVYAAGLIIRDLPLLHSNFRASESLHDYLVRNKTVAIADIDTRRLTTLLREKGAQGGAILTGADATIEKAQELIAAFGSMVGKDLAKEVSCTETYEWTEGEWELGKGFVTPDEQPYHVVAYDFGVKTNILRMLASRGCRLTVVPAQTSAQDVLALNPDGVFLSNGPGDPEPCTYAIEAVQKLMESGKPIFGICLGHQLISLAIGAKTLKMRFSHHGANHPVQDLDSGKVVITSQNHGFAVDADTLPANARITHKSLFDNTLQGIELTDKPVFCFQGHPEASPGPQDVGYLFDKFIGNMKAAKRA

SEQ ID NO: 19003 - protein, 144 aa, Neisseria meningitidis
MNFALSVITFTLASFLPVPPAGAAVFTWKDGGGNSYSDVPKQLHPDQSQILNLRTRQNKPAVKPAQADAGKRTDGAAQENNPDTAEKNRQLEEEKKRIAETERQNKEENCRISKMNLKAVGNSNAKNKDDLIRKYNNAVNKYCR

SEQ ID NO: 19004 - protein, 240 aa, Neisseria meningitidis
MSEDTDMLRSILAASLLAVSFPAAAEALNYNIVEFSESAGVEVAQDTMSARFQVAAEGRDKNAVNAEFVKKFNSFNRKLKNGSFKTELVSRSAMPRYQYTNGRRIQTGWEERAEFKVEGRDFDALNRFIADVQTDASLEYTDFSVSRERRNEVIDQVSKDAILRFKTRAEKLAGILGASGYKIVKLNLGHIGSHIAGGGAAQAKMLRAMPMAASVNMEGADSAAQGVEEISISVNGTVQF

SEQ ID NO: 19005 - protein, 321 aa, Neisseria meningitidis; identical to SEQ ID NO: 2913

SEQ ID NO: 19006 - protein, 304 aa, Neisseria meningitidis; identical to SEQ ID NO: 3139

SEQ ID NO: 19007 - protein, 260 aa, Neisseria meningitidis; identical to SEQ ID NO: 2560

SEQ ID NO: 19008 - protein, 355 aa, Neisseria meningitidis
MFDGISVKMTAFPSEAESPVMYPLARRILFALDAEKAHHFTLDALYTVYKLGLIPVTGNRTKPVKLMGMDLPNPVGLAAGLDKNGEYIDALGALGFGFIEIGTVTPKPQPGNPQPRLFRVPEHQGIINRMGFNNHGIDTMIRNIEKSKFSGVLGINIGKNAVTPIENAADDYLICLEKAYAHASYITVNISSPNTKNLRALQGGDELSALLEALKNKQAQLASVYGKYVPLAVKIAPDLDEAQIEDIAHVVKSVEMDGIIATNTTIDKSSLGSHPLAGEQGGLSGRPVHEKSNRVLKLLADHIDGKLPIIGVGGIMEGRDAADKIRLGATAVQVYSGLIYKGPALVKECLKALAR

SEQ ID NO: 19009 - protein, 706 aa, Neisseria meningitidis
MNNPLVNQAAMVLPVFLLSACLGGGGSFDLDSVDTEAPRPAPKYQDVSSEKPQAQKDQGGYGFAMRFKRRNRHPMVTPKETEVKLDPNDWEVTGLPSNPKNLPERQKSVIDKVVTNGDDNIYFSPYLTPSNYQNGSAGNGANQPKNEVENYKDFKYVYSGWFYKHAKPIIDASQKKFQQGDDGYIFYHGKEPSRQLPASGKVTYKGVWHFVTDTKQGQKFNDILETSKGQGDRYSGFSGDEGETTSNRTDPNLNSNHEGYGFTSNLEVDFDDKKLTGKLIRNDKVTNATTGNKHTTQYYSLEAQVTGNRFNGKAIATDKPDTGKTKLHPFVSDSSSLSGGFFGPQGEELGFRFLSDDQKVAVVGSAKTQDKPGNGAAASGGAGAAASGGAADMPSENSKLTTVLDAVELTHGGTAIKNLDNFSNAAQLVVDGIMIPLLPKDSESGNNQANQGTNGGTAFTYKTTYTPKSDEKDAQAGTAANGDQAASNTAGDTNGKTKTYEVEVCCSNLNYLKYGLLTRKTAGNTGEGGNGSPTAAQTGAQSMFLQGERTDENKIPTDQNVVYRGSWYGHIANGTSWSGNASDKEGGNKADFTVNFADKKLNGTLTAGERTSPTFTITATIQGNGFSGTAKTADLGFDLDQSNTTGTPKAYITDAKVQGGFYGPKAEELGGWFAYPGDKQTKNATNASGNSSATVVFGAKRQQPVQ

SEQ ID NO: 19010 - protein, 796 aa, Neisseria meningitidis
MTEQKHEEYGADSIQVLEGLEAVRKRPGMYIGDTQDGSGLHHMVFEVLDNAIDEALAGHCDKITVTIHADHSVSVADNGRGMPTGIHPKEGRSAAEVIMTVLHAGGKFDNNSYKISGGLHGVGVSVVNALSDWVTLTIYRDGKEHFVRFVRGETEEPLNVVGDSDKKGTTVRFLASTETFGNVEYSFDILAKRIRELSFLNNGVDIELTDERDGKHESFALSGGVAGFVQYMNRKKTPLHEKIFYAFGEKDGMSVECAMQWNDSYQESVQCFTNNIPQRDGGTHLTALRQVMTRTINSYIETNEVAKKAKVETAGDDMREGLTCVLSVKLPDPKFSSQTKDKLVSGEIGPVVNEVISQALTDFLEENPAEAKIITGKIVDAARAREAARKAREITRRKGVMDGLGLPGKLADCQEKDPALSELYLVEGDSAGGSAMQGRDRKFQAILPLKGKILNVEKARFEKMLASQEVAALITALGAGIGKEEFNAEKLRYHRIIIMTDADVDGAHIRTLLLTFFYRQMPELVERGYIYIAQPPLYKAKYGKQERYLKDELEKDQWLLGLALEKAKIVSDGRTIEGAELADTAKQFLLAKTVIEQESRFVDELVLRAMLHASPIDLTSSENADKAVAELSGLLDEKEVALERIEGHEGHRFIKITRKLHGNVMVSYIEPKFLNSKAYQTLTQTAAALKGMVGEGAKLYKGENGYDADSFETALDILMSVAQKGMSIQRYKGLGEMNPEQLWETTMDPAVRRLLKVRIEDAIAADEVFVTLMGDEVEPRRAFIENNALIAQNIDA

SEQ ID NO: 19011 - protein, 226 aa, Neisseria meningitidis; identical to SEQ ID NO: 1949

SEQ ID NO: 19012 - protein, 37 aa, Neisseria meningitidis; identical to SEQ ID NO: 7611

SEQ ID NO: 19013 - protein, 181 aa, Neisseria meningitidis
MGKTVTLTAGHSNTDPGAVNGSDREADLAQDMRNIVASILRNDYGLTVRTDGEGKGNMPLRDAVKLIRGSDVAIEFHTNAAVSKAATGIEALSTVKNKRWCQVLSKAVAKKTGWKLRGEDGFKPDNAGQHSRLAYAQAGGIVFEPFFISNDTDLALFKTTKWGICRAIADAIAMELGAARV

SEQ ID NO: 19014 - protein, 126 aa, Neisseria meningitidis
MTAPDLIEVNRAMRRRMQAEIAALRAVQTAAAESGGLTANAVYTEAYQTAESLRAAAGSLNALVAAAINQKPPLIVRQAPIDGTIHQIAHEFYGDIARAAELVRLNPHIHHPAFIKRGTLVNSYAK

SEQ ID NO: 19015 - protein, 1067 aa, Neisseria meningitidis
MAKFFIDRPIFAWVISIFIIAAGIFGIKSLPVSQYPSVAAPTITLHATYPGASAQVMEDSVLSVIERNMNGVEGLDYLSTSADSSGSGSVSLTFTPDTDENLAQVEVQNKLSEVLSTLPATVQQYGVTVSKARSNFLMIVMLSSDVQSTEEMNDYAQRNIVPELQRIEGVGQVRLFGAQRAMRIWVDPKKLQNYNLSFADIGSALSAQNVQISAGSIGSLPAVRGQTVTATVTAQGQLGTAEEFGNVILRANTDGSNVYLKDVARVGLGMEDYSSSTRLNGVNTTGMAVMLSNSGNAMATAKAVKERMATLEKYFPQGMSWKTPYDTSKFVEISIEKVIHTLIEAMVLVFVVMYLFLQNIRYTLIPTIVVPISLLGGFAFISYMGMSINVLTMFAMVLVIGIVVDDAIVVVENVERIMAGEGLPPKEATKKAMGQISGAVIGITAVLISVFVPLAMFSGATGNIYKQFALTMASSIAFSAFLALTLTPALCATMLKTIPKGHHEEKKGFFGWFNKKFNSWTHGYEGRVAKVLRKTFRMMVVYIGLAVVGVFLFMRLPTSFLPTEDQGFVMVSVQLPAGATQERTNATLAQVTQLAKSIPEIENIITVSGFSFSGSGQNMAMGFAILKDWNERTAPGSDAVAIAGKLTGMMMGTLKDGFGIAVVPPPILELGNGSGLSINLQDRNNTGHTALLAKRNELIQKMRASGLFDPSTVRAGGLEDSPQLKIDINRAAAAAQGISFADIRTALASALSSSYVSDFPNQGRLQRVMVQADASARMQPADILNLTVPNKSGVAVPLSTIATVSWENGTEQSVRFNGYPSMKLSASPATGVSTGQAMAAVQKMVDELGGGYSFEWGGQSREEAKGGSQTLILYGLAVAAVFLVLAALYESWSIPLAVILVIPLGLIGAAAGVTGRNLFEGLLGSVPSFANDIYFQVGFVTVMGLSAKNAILIIEFAKDLQAQGKSAVEAALEAARLRFRPIIMTSFAFILGVVPLYIAGGASSASQRAIGTTVFWGMLIGTLLSVFLVPLFYVVVRKFFKETAHEHEMAVKHAAEAGITGSDDSQH

SEQ ID NO: 19016 - protein, 378 aa, Neisseria meningitidis
MKNISLSPPAMLGILGGGQLGRMFTVAAKTMGYKVTVLDPDPDAPAAEFADCHLCAPFNDQAALDELAKCAAVTTEFENVNADAMRFLAKHTNVSPSGDCVAIAQNRIQEKAWIRKAGLQTAPYQVVCKAEDITEASAQFLPGILKTATLGYDGKGQIRVKTVDELKAAFAEHGGVDCVLEKMVDLRSEISVIVCRLNNDNVQTFDPAENIHENGILAYSIVPARLSADVQQQARQMAQRLADELDYVGVLAVEMFVVDDTHELVVNEIAPRPHNSGHHTVDACAADQFQQQVRLMCNLPPADTKLLSSCCMANILGDVWQEDGGKPDWFPLQSRPDTRLHLYGKKTAHKGRKMGHFTVLTTDSDTAFQEAKKLHQSL

SEQ ID NO: 19017 - protein, 335 aa, Neisseria meningitidis
MSTFFQQTAQAMIAKHIDRFPLLKLDQVIDWQPIEQYLNRQKTRYLRDHRGRPAYPLLSMFKAVLLGQWHSLSDPELEHSLITRIDFNLFCRFDELSIPDYSTLCRYRNRLAQDDTLSELLKLINRQLTEKGLKVEKASAAVIDATIIQTADSKQRQAIEVDEEGQINGQTTPSKDSDARWIKKNGLYKLGYKQHTRTDAEGYIEKLHITPANAHECKHLSPLLEGLPKGTTVYADKGYDSAENRQHLEEHQLLDGIMRKACRNRPLSEVQTKRNRYLSKTRYVVEQSFGTLHRKFRYARAAYFGLIKVSAQSHLKAMCLNLLKAANRLSAPAAA

SEQ ID NO: 19018 - protein, 239 aa, Neisseria meningitidis; identical to SEQ ID NO: 3265

SEQ ID NO: 19019 - protein, 169 aa, Neisseria meningitidis
MSNFEKKYILELNDALSHLNHNSTSFDLLKVLISWLSNDIVIDKFKILGYDLSKYIEMNPDDYPVEKSILNREEIIYLKNNIYRKISSGNFKFQYFVQYIRDILEYLFIEHIERVCPYCEWGEMQKLEEQNTHETVYLCTQCGCAFYNDNSQFLLKTPLTIPMKRDEFK

SEQ ID NO: 19020 - protein, 206 aa, Neisseria meningitidis
MTKLYAEIAKMETQDDDTVKVWGYASSEEIDSDGEVIAAAAMKAAIPDYMKFGAGREMHGSNAAGTAIEINVEDDGITFFGAHIIDPVVVSKVKTGVYKGFSIGGSVTARDDLNKSQITGLKLTEISLVERPANPDAVSTCFKADKGAEAVNNDTEHNATYFSHFPSKQKSTDGGRCPFPYRFPYFFTAVVAGLAGALGAGAPTEA

SEQ ID NO: 19021 - protein, 161 aa, Neisseria meningitidis; identical to SEQ ID NO: 3482

SEQ ID NO: 19022 - protein, 473 aa, Neisseria meningitidis
MRHLPLFSLMLFPASVYAADLDGANLNLLWSLPFALILLSIALGPLFFSHTWHHHYGKITAFWTLLFLIPFSLVFGASAGIHTVAHALVEEYIPFILLLLALYTISGGILVWGDLNGTPKLNTALLAVGTALASIMGTTGAAMLMIRPLLKANQNRTRRVHIVIFFIFLVANIGGGLTPLGDPPLFLGFLKGVDFMWTVKHMFAPVLISTAVLLTAFYFIDNRFFKQESIAQDTPAQQEKPEKIAIFGKWNFLLLSGVVGAVLMSGLWKPEHPGFEILGSRYALQNLVRDVILIALTAVSMAITPKQVRAGNEFNFEPIAEVGKLFLGIFITIFPVLSILKAGEAGALGGVVSLVHDTAGHPINVMYFWMSGILSAFLDNAPTYLVFFNMAGGDAQALMTGTLFHSLLAVSMGSVFMGALTYIGNAPNFMVKAIAEQRGVPMPTFFGYMMWSVAFLTPVFIVHTLIFFVFKLL

SEQ ID NO: 19023 - protein, 306 aa, Neisseria meningitidis; identical to SEQ ID NO: 14851

SEQ ID NO: 19024 - protein, 266 aa, Neisseria meningitidis
MNAFNLIIIGDEILHGSRQDKHFVFFKSLLESKGLKLNQVQYLPDEPDLLVRQLRRSFSDGIPTFVTGGIGATPDDHTRQAAAAALELPVVRHPEAAKFIEGVTLKRGEPLDSPEHAQRLKMADFPEGAELVPNPFNNIAGFSIREHYFFPGFPVMAHPMAEWVLDTYYVGRFNQTKRGSRSVYVFEQPESRITPLMEHIEQTYPGVRSYSLPSVGWTHSDGTQVKPHIEFGIKAEGEAVNLLDAAWAEVLHSLDGLGAELKNRVN

SEQ ID NO: 19025 - protein, 257 aa, Neisseria meningitidis
  misc_feature 3, 4: 'Xaa' is any amino acid
VCXXSLLFSSLLFSSLLSAAQAASEDGSRSPYYVQADLAYAAERITHDYPKATGANNTSTVSDYFRNIRAHSIHPRVSVGYDFGGWRIAADYASYRKWKESNSSTNAENRDSIQNYVKIETKHQGNGSFHAVSSLGLSAIYDFKLNDKFKPYIGARVAYGHVRHQVHSVESKNTIITSKPTGNTPAGGPVPTGFVPKSAYHESHSISSLGLGVIAGVGFDITPKLTLDTGYRYHNWGRLENTRFKTHEVSLGVRYHF

SEQ ID NO: 19026 - protein, 158 aa, Neisseria meningitidis; identical to SEQ ID NO: 9372

SEQ ID NO: 19027 - protein, 103 aa, Neisseria meningitidis; identical to SEQ ID NO: 4598

SEQ ID NO: 19028 - protein, 544 aa, Neisseria meningitidis; identical to SEQ ID NO: 7248

SEQ ID NO: 19029 - protein, 485 aa, Neisseria meningitidis
MPSEAVFLQFRQTRKIMKYISTRGETAHKPFSEVLLMGLAPDGGLMLPEHYPQIGREALDKWRGLAYPELAFEIMRLFVTDIPEDDLRDILNRTYTEAAFGTKEITPVRTLSDGIKIQALSNGPTLAFKDMAMQFLGNAFEYVLNKEGKKLNILGATSGDTGSAAEYALRGKKGVNVFMLSPDGKMSAFQRAQMYSLQDGNIHNIAVKGMFDDCQDIVKAVQNDAAFKEKYHIGTVNSINWGRIVAQVVYYFAGYFKATQSNDEQVSFCVPSGNFGNVCAGHIAKQMGLPIRRLIVATNENDVLDEFFKTGAYRPRNSAHTYVTSSPSMDISKASNFERFVFDLMDRDPQEINTLWAEVAAGKGFDLRFALEKVGGKYGFTSGKSTHPDRLATIRQVYEQDQELIDPHTADGVKVAREVREEGETVVCLETALAAKFDATIREAVGDAAIPRPAALEGLETLPQRVQTVPNSADAVKGIIEQTLA

SEQ ID NO: 19030 - protein, 599 aa, Neisseria meningitidis
LEVGAKPAFFALQSAPDLLLNLPVWKNTFMKASQFFISTLKEAPAEAALASHKLMIRAGLIKANASGLYTWMPMGLRVLRKVENVVREEMARAGSVELLMPVVQPAELWQESGRWEFYGKELLRLKDRHDRDFCMGPTCEEVIADIVRKEINSYKQLPKNFYHIQTKFRDEVRPRFGVMRAREFVMKDAYSFHADYASLQTTYDAMYDAYCRIFTRLGLAFRPVAADTGSIGGTGSHEFQVLAESGEDVIAYSDTSDYAANIELAPTLPLKGERTAAQAELTKVHTPNVKTIESLVEFLNIPVEQTLKSIVVEGENEGEIVLLLLRGDHEFNDIKAEKLAGVRSPLTMASPAAIVEQFGANGGSLGPVSFAGKVYADFATEKGADWVIGANEDGYHYTSFNFGRDAAEPEFVDLRNVVEGDESPDGQGRLKLARGIEVGHVFQLRDKYTQAMNVSFLDNNGKSQIMEMGCYGIGITRVVAAAIEQNNDEKGIIWTKAMAPFEVVIVPMNYKKSDTVREAADKIYAELLAAGADVLLDDRDERAGVLLNDSELLGIPHRIVIGDRALKEGNVEYAERRNNEAQAVAIGEIVARVTALLNG

SEQ ID NO: 19031 - protein, 283 aa, Neisseria meningitidis
MNTLKFTKMHGLGNDFMVIDAVSQDFTPEDAPIAAWADRFRGVGFDQLLVVGRSETEGVDFRYRIFNADGSEVEQCGNGARCFARFVADKGLTDKKEICVETANGVIFPKLSDNGMVTVNMGKPRFMPSEIPFVPESGEGDDACIYGVHLESGIQPVSCVNMGNPHAVIVVDDVECAPVRETGSLIEPHRQFPERVNVGFMQIVSRTAIRLRVFERGVGETQACGTGACAAVVAGIRLGLLDEGKTVEVILPGGTLYIEWACGGDVMMTGPAEAVFEGELAYS

SEQ ID NO: 19032 - protein, 210 aa, Neisseria meningitidis; identical to SEQ ID NO: 3262

SEQ ID NO: 19033 - protein, 273 aa, Neisseria meningitidis; identical to SEQ ID NO: 14267

SEQ ID NO: 19034 - protein, 231 aa, Neisseria meningitidis; identical to SEQ ID NO: 3708

SEQ ID NO: 19035 - protein, 476 aa, Neisseria meningitidis
MTWETVIGLEIHVQLNTKSKIFSGASTAFGAEPNAHAGVVECALPGVLPVMNREVVEKAIKLGLALDAKINRKNVFDRKNYFYPDLPKGYQISQLDLPIVEHGKLEIVVGDDVKTINVTRAHMEEDAGKSVHEGLNGATGIDLNRAGTPLLEVVSEPEMRSAAEAVAYAKALHSLVTWLNICDGNMAEGSFRVDANVSVRPKGQAEFGTRREIKNLNSFRFLEQAINYEAEAQIEILEDGGKVQQATMLFDPEKGETRVMRLKEDAQDYRYFPDPDLLPVIISDAQMQKAKAEMPELPKEMAARFVADYGVSEYDARLLTASRAQAAYFEEAAKESGQGKPTANWMNGELAAALNKEGMELADSPITAPRLAALVGKIADGTLSSKLAKKAFEAMWAEPEATIAEIIEKHGLQQMTDTGAIEAMVDEVLANNAKAVEQFKSGNEKALNAIVGQVMKASKGKANPAQVQELIKAKLA

SEQ ID NO: 19036 - protein, 236 aa, Neisseria meningitidis
MTSCEPVNEQTSFNNPEPMTGFEHTVTFDFQGTKMVIPYGYLARYTQDNATKWLSDTPGQDAYSINLIEISVYYKKTDQGWVLEPYNQQNKAHFIQFLRDGLDSVDDIVIRKDACSLSTTMGERLLTYGVKKMPSAYPEYEAYEDKRHIPENPYFHKLYYIKKGENPAIITHRNNRINQTEEDNYSTSVGSCINGFPVRYYPFIREKQQLTQQELVGYHQQVEQLVQSFVNNSSKK

SEQ ID NO: 19037 - protein, 215 aa, Neisseria meningitidis
MKTKFYNHQGEHLILYFAGWGTPPDAVNHLILPENHDLLICYDYQDLNLDFDFSAYRHIRLVAWSMGVWAAERALQGIRLKSATAVNGTGLPCDDNFGIPFTVFKGTLENLTGNTRLKFERRMCGDKASFEDYQQFSARPFDEIHQELTALFAMIGQDRRADLIRWTNALVGSGDKIFMPANQYRYWTARCTVREIDGGHYLFSRFTHWSALWNH

SEQ ID NO: 19038 - protein, 336 aa, Neisseria meningitidis
MSIKILIISPSWIGDCVMTQPLFRRLKELHPGCTIDVFAPKWSMAVFERMPEVNEILENSFGHGALELKRRWRVGRDLGRRGYDQVIVLPGSLKSAIIALATGIGKRTGYVGESRYFLLNDIRRLDKERLPLMVDRYTALAHPSQEDFDGHSGFPEFSIDERRREISVETFGLNLGKPVLAFCPGAEFGPAKRWPTRHFAELGKHYLAAGWQVWLFGSQKDDEIAEEINRLSDGICVNLCGKTDLSQAMDLLSLADTVVCNDSGLMHLAAALGRKVVAVYGSSSPTHTPPLSDRAKIVSLHLECSPCFKRECPLGHTDCLNRLYPEKIVQAVEEAV

SEQ ID NO: 19039 - protein, 183 aa, Neisseria meningitidis
MPSERRPFQTAFLSNRKTVGKLAERVQSRYDGLHKFKHICSAAMALIKEPLDKAKQRNEELEAAEEAAAQEALGREQEVDRVSEWEERYKLSRSEFEQFWKGLPQTVQNKLQASQKTWKSGMDKICANNAKAEGETPNGIKFSELACKTAETEARLEELHNRKKALIDEMVREADKKELPKRL

SEQ ID NO: 19040 - protein, 149 aa, Neisseria meningitidis; identical to SEQ ID NO: 2323

SEQ ID NO: 19041 - protein, 119 aa, Neisseria meningitidis; identical to SEQ ID NO: 9294

SEQ ID NO: 19042 - protein, 111 aa, Neisseria meningitidis; identical to SEQ ID NO: 233

SEQ ID NO: 19043 - protein, 365 aa, Neisseria meningitidis
MNQTFTLPDTRPYPQNPIKNHLLLNAYQLAHNSSQASRKLSSGQLQTEIRGMLEQNHYINLSLALTMSPDAGTYAALLSSVNAVLDCEKEGEVQWFALPVVLVSGCKKERAIEMKLPTEALFACLQNYPHLRVLTQETQWLPYLVHSSDLSAVAPDEWWRAKQNTEAAAQHLRRFAPRPLLLPEGQSVHVVYALGFGSGKVQTALGQNLLQAGLPLMQVWQENLASEGVTLFANPLSPDSPVRALSEGSHTRQRMAMDVFAANAIRAVRMQSPRVGVVAAAKVGGQILFGFNATDGAFEVVPQVFSWQLSFTDNIAVVQQNFLDLMAECRVEHVYLLHNPLGEQESIPSYAEALKREGHNPFFSA

SEQ ID NO: 19044 - protein, 95 aa, Neisseria meningitidis; identical to SEQ ID NO: 440

SEQ ID NO: 19045 - protein, 322 aa, Neisseria meningitidis
MNEKTIILANPRGFCAGVDRAISIVERALEEFGAPIYVRHEVVHNKFVVDNLREKGAVFIEDLAEVPPGATLVYSAHGVSKAVRQEAAERGFRVFDATCPLVTKVHKEVARLDAQDCEIIMIGHKGHVEVEGTMGQLAPGKMLLVETVGDVAKLEVRNPDKLAYVSQTTLSVDETKDIIAALNARFPNIRNPHKEDICYATTNRQTAAKELAEQCDIVIVVGSPNSSNSNRLREVAAGIGTDAYMVDNAGYLQRAWFEGKNKVGVTAGASAPEVLVQEVLATIRGWGHETVREGEGAEESIVFVLPKELRREGETKPDLCKR

SEQ ID NO: 19046 - protein, 279 aa, Neisseria meningitidis; identical to SEQ ID NO: 2627

SEQ ID NO: 19047 - protein, 336 aa, Neisseria meningitidis
MNHTVTLPDQTTFAANDGETVLAAAARQNLNLPHSCKSGVCGQCKAELVSGDIQMDGHSEQALSEAEKAQGKILMCRTTAQSDISINIPGYKADALPVRTLPARIESIIFKHDVALLKLALPKAPPFAFYAGQYIDLLLPGNVSRSYSIANPPDQEGILELHIRRRKNGVCSEMIFGSEPKVKEKGIVRVKGPLGSFTLQEDSGKPVILLATGTGYAPIRSILLDLIRQNSSRAVHFYWGARHQDDLYALEEAQGLACRLKNACFTPVLSRPGEGWQGRKGHVQDIAAQDHPDLSEYEVFACGSPAMTEQAKNLFVQQHKLPENLFFSDAFTPSAS

SEQ ID NO: 19048 - protein, 260 aa, Neisseria meningitidis
MTDILNKILATKAQEVAAQKAAVNAEHIRALAENAPPVRSFIDSIRGKHRLNLPAVIAEIKKASPSKGLIRPDFRPAEIARAYENAGAACLSVLTDEPYFQGSPEYLKQAREAVSLPVLRKDFIIDEYQVYQARAWGADAVLLIAAALEQEQLERFEAVAHELGMTVLLELHDETELEKCRNLTTPLWGVNNRNLRTFEVSLDQTLSLLPALEGKTVVTESGITGKADVEFMRARGVHTFLIGETFMRADDIEAEVGKLF

SEQ ID NO: 19049 - protein, 127 aa, Neisseria meningitidis
MTFAYWCILIAYLLPLFCAAYAKKAGGFRFKDNHNPRDFLARTQGTAARAHAAQQNGFEAFAPFAAAVLTAHATGNAGQATVNTLAGLFILFRLAFIWCYIADKAALRSLMWAGGFVCTVGLFVAAA

SEQ ID NO: 19050 - protein, 431 aa, Neisseria meningitidis
MLDIQLLRSNTAAVAERLAARGYKFDAARFNALEEQRKAVQVKTEELQASRNSISKQIGALKGQGKHEEAQAAMDQVAQIKTDLEQAAADLEAVQKELDAWLLSIPNLPHEDVPFGKDETENVEVRKVGTPREFDFEIKDHVDLGEPLGLDFEGGAKLSGARFTVMRGQIARLHRALAQFMLDTHTLKHGYTEHYTPYIVDDTTLQGTGQLPKFAEDLFHVTRGGDESKTTQYLIPTAEVTLTNTVAGSIIPSEQLPLKLTAHSPCFRSEAGSYGKDTRGLIRQHQFDKVEMVQIVHPEKSYETLEEMVGHAENILKALELPYRVITLCTGDMGFGATKTYDLEVWVPAQNTYREISSCSNCEDFQARRMKARFKDENGKNRLVHTLNGSGLAVGRTLVAVLENHQNADGSINIPAALQPYMGGVAKLEVK

SEQ ID NO: 19051 - protein, 179 aa, Neisseria meningitidis
MDFLEIFIMSAFRKILLIISCLLIASCSFVETIFYMAISPEPVVVDFPLGKKTKRSIELKQKIGKPYAISLGTNFIHYDPKQGERWIDDKLNYPYNISVKIFKVEEDGKKLIIDELLTERSRKLGGGVFGAGGKYSMYIYDFYLPEGEYLFEISDNSEYIPLYDEINNSIRIVVNARIQ

SEQ ID NO: 19052 - protein, 603 aa, Neisseria meningitidis; identical to SEQ ID NO: 6451

SEQ ID NO: 19053 - protein, 205 aa, Neisseria meningitidis
MVIAAIMAMIALPNMSQWIASRRIASHAERIANLLRFSRGEAVRLNLPVYICPVQVKKGGAPNNKCDFGKKGQGMLAFGDKNGNKTYDGDTADVLLRSVVLNDDINDKRINYAFNHIAFGQTQPTADRVVWTFNQNGTFGYTNDQHLTSQSSFSYSDGYIQIVLTDARAVSDADKKFRSAVVLINSSGRVEVCPRNDRRTVCQYK

SEQ ID NO: 19054 - protein, 77 aa, Neisseria meningitidis; identical to SEQ ID NO: 3979

SEQ ID NO: 19055 - protein, 205 aa, Neisseria meningitidis
MTFPPLKSPLKFYAVVPTADWVGRMVKAGADTVQLRCKALHGDELKREIARCVAACQGSRTQLFINDHWHEAIEAGAYGVHLGQEDMDTADLAAIAAAGLRLGLSTHSVAELDRALSVHPSYVASGAIFPTTTKQMPTAPQGLDKLCEYVKQAGGTPVVAIGGIDLNNAQAVLATGVSSLAVVRAVTEAANPEAVVKAFQALWDG

SEQ ID NO: 19056 - protein, 1361 aa, Neisseria meningitidis
  misc_feature 1356, 1357: 'Xaa' is any amino acid
MNKGLHRIIFSKKHSTMVAVAETANSQGKGKQAGSSVSVSLKTSGDLCGKLKTTLKTLVCSLVSLSMVLPAHAQITTDKSAPKNQQVVILKTNTGAPLVNIQTPNGRGLSHNRYTQFDVDNKGAVLNNDRNNNPFVVKGSAQLILNEVRGTASKLNGIVTVGGQKADVIIANPNGITVNGGGFKNVGRGILTTGAPQIGKDGALTGFDVRQGTLTVGAAGWNDKGEADYTGVLARAVALQGKLQGKNLAVSTGPQKVDYASGEISAGTAAGTKPTIALDTAALGGMYADSITLIANEKGVGVKNAGTLEAAKQLIVTSSGRIENSGRIATTADGTEASPTYLSIETTEKGAAGTFISNDGRIESKGLLVIDTGEDIGLRNGAVVQNNGNRPAATVLNAGRNLVIESKANVNNAKGSTNLSTGGRTVIKEASIQTGTTVYSSSKGNAELGNNTRITGADVTVLSNGTISSSAVIDAKDTAHIEAGKPLSLEASTVTSDIRLNGGSIKGGKQLALLADDNITAKTTNLNTPGNLYVHTGKDLNLNVDKDLSAASIHLKSDNAAHITGTSKTLTASKDMGVEAGSLNVTNTNLRTNSGNLHIQAAKGNIQLRNTKLNAAKALETTALQGNIVSDGLHAVSADGHVSLLANGNADFTGHNTLTAKADVNAGSVGKGRLKADNTNITSSSGDITLVAGNGIQLGDGKQRNSINGKHISIKNNGGNADLKNLNVHAKSGALNIHSDRALSIENTKLESTHNTHLNAQHERVTLNQVDAYAHRHLSITGSQIWQNDKLPSANKLVANGVLALNARYSQIADNTTLRAGAINLTAGTALVKRGNINWSTVSTKTLEDNAELKPLAGRLNIEAGSGTLTIEPANRISAHTDLSIKTGGKLLLSVKGGNAGAPSAQVSSLEAKGNIRLVTGETDLRGSKITAGKNLVVATTKGKLNIEAVNNSFSNYFPTQKAAELNQKSKELEQQIAQLKKSSPKSKLIPTLQEERDRLAFYIQAINKEVKGKKPKGKEYLQAKLSAQNIDLISAQGIEISGSDITASKKLNLHAAGVLPKAADSEAAAILIDGITDQYEIGKPTYKSHYDKAALNKPSRLTGRTGVSIHAAAALDDARIIIGASEIKAPSGSIDIKAHSDIVLEAGQNDAYTFLKTKGKSGKIIRKTKFTSTRDHLIMPAPVELTANGITLQAGGNIEANTTRFNAPAGKVTLVAGEELQLLAEEGIHKHELDVQKSRRFIGIKVGKSNYSKNELNETKLPVRVVAQTAATRSGWDTVLEGTEFKTTLAGADIQAGVGEKARVDAKIILKGIVNRIQSEEKLETNSTVWQKQAGRGSTIETLKLPSFESPTPPXXHTLN

SEQ ID NO: 19057 - protein, 295 aa, Neisseria meningitidis
MYTGRFAPSPTGLLHIGSLLTAAASYADARSNGGKWLVRMEDLDPPREMPGAASHILHTLEAFGFEWDGEVAYQSRRYALYEETLCRLKTAGLVYPCHCSRKDWQAGARRGADGFVYNGRCRHPGQRPAPQGKQPAWRIRVPDRVIGFSDGIVGGYAQNLAGDIGDFVLLRADGYWAYQLAVVADDAEQSVTHIVRGQDLLVSTPRQIYLQQCLGVPTPQYAHLPLLTNAQGQKWSKQTLAPALDLNRREQLLRQVFRYLKLPEAPETDRPAELLDWAVAHWDMGKVPKHAITAP

SEQ ID NO: 19058 - protein, 558 aa, Neisseria meningitidis
MSFKTDAEIAQSSTMRPIGEIAAKLGLNVDNIEPYGHYKAKINPAEAFKLPQKQGRLILVTAINPTPAGEGKTTVTIGLADALRHIGKDSVIALREPSLGPVFGVKGGAAGGGYAQVLPMEDINLHFTGDFHAIGAANNLLAAMLDNHIYQGNGLNIDPKRVLWRRVVDMNDRQLRHIIDGMGKPVDGVMRPDGFDITVASEVMAVFCLAKDISDLKERLGNILVAYAKDGGPVYAKDLKAHGAMAALLKDAIKPNLVQTIEGTPAFVHGGPFANIAHGCNSVTATRLAKHLADYAVTEAGFGADLGAEKFCDIKCRLAGLKPDAAVVVATVRALKYNGGVERANLGEENLDALEKGLPNLLKHISNLKNVFGLPVVVAINRFVSDSDAELAMIEKACAEHGVEVSLTEVWGKGGAGGADLAHKVVNAIENQPNNFKFAYDVELSIKDKIRAIAQKVYGAEDVDFSAEASAEIASLEKLDLDKMPICMAKTQYSLSDNAKLLGCPEGFRITVRGITVSSGAGFIVALCGNMMKMPGLPKVPAAEKIDVDEHGVIHGLF

SEQ ID NO: 19059 - protein, 558 aa, Neisseria meningitidis
MSQQYVYSMLRVSKVVPPQKTIIKDISLSFFPGAKIGLLGLNGAGKSTVLRIMAGVDKEFEGEAVPMGGIKIGYLPQEPELDPEKTVREEVESGLGEVAAAQKRLEEVYAEYANPDADFDALAEEQGRLEAIIAAGSSTGGGAEHELEIAADALRLPDWDAKIGHLSGGEKRRVALCKLLLSKPDMLLLDEPTNHLDAESVEWLEQFLVRFPGTVVAVTHDRYFLDNAAEWILELDRGHGIPWKGNYSSWLEQKEKRLENEAKSEAARVKAMKQELEWVRQNAKGRQAKSKARLARFEEMSNYEYQKRNETQEIFIPVAERLGNEVIEFVNVSKSFGDKVLIDDLSFKVPAGAIVGIIGPNGAGKSTLFKMISGKEQPDSGEVKIGQTVKMSLIDQSREGLQNDKTVFDNIAEGRDILQVGQFEIPARQYLGRFNFKGSDQSKIAGQLSGGERGRLHLAKTLLSGGNVLLLDEPSNDLDVETLRALEDALLEFAGSVMVISHDRWFLDRIATHILACEGDSKWVFFDGNYQEYEADKKRRLGEEGAKPKRIKYKPVTR

SEQ ID NO: 19060 - protein, 410 aa, Neisseria meningitidis
MGLKHFLEKIEPHFLPGGKHEKWYALYEAAATIFYTSGAVTRKAAHVRDALDSKRMMILVWLALFPAMFYGMYNVGAQAFGALTPDLLQQSIANDWHYTLADALGINMSSEAGVSGKMLFGAIYFLPIYATVFVVGGFWEVLFATVRKHEINEGFFVTSILFALIVPPTLPLWQAALGITFGVVVAKEVFGGTGKNFMNPALAGRAFLFFAYPANLSGDAVWTAVDGYSGATALAQWAAHGADGLKNAVTGQTITWMDAFIGKLPGSIGEVSTLALLIGGAFIVFARIASWRIIAGVMIGMIAMSSLFNFIGSDTNAMFAMPWYWHLVVGGFAIGMLFMATDPVSASFTNVGKWWYGALIGVMCVLIRVVNPAYPEGMMLAILFANLFAPIFDYFVAQANIKRRKARSNG

SEQ ID NO: 19061 - protein, 98 aa, Neisseria meningitidis; identical to SEQ ID NO: 2571

SEQ ID NO: 19062 - protein, 386 aa, Neisseria meningitidis
MKRQALAAMIASLFALAACGGEPAAQAPAASAEAASSAAQAAAETPAGELPVIDAVTTHAPEVPPAIDRDYPAKVRVKMETVEKTMTMEDGVEYRYWTFDGDVPGRMIRVREGDTVEVEFSNNPSSTVPHNVDFHAATGQGGGAAATFTAPGRTSTFSFKALQPGLYIYHCAVAPVGMHIANGMYGLILVEPKEGLPKVDKEFYIVQGDFYTKGKKGAQGLQPFDMDKAVAEQPEYVVFNGHVGAIAGDNALKAKAGETVRMYVGNGGPNLVSSFHVIGEIFDKVYVEGGKLINENVQSTIVPAGGSAIVEFKVDIPGSYTLVDHSIFRAFNKGALGQLKVEGAENPEIMTQKLSDTAYAGNGAAPAASAPAASAPAASAPAKSDY

SEQ ID NO: 19063 - protein, 404 aa, Neisseria meningitidis
MTVKTPVYLDYAATTPVDKRVAEKMIPYLTETFGNPASNSHAFGWEAEEAVEKARADIAALINADPKEIVFTSGATESDNLAIKGAANFYKTKGKHLITVKTEHKAVLDTMRELERQGFEVTYLGVQENGLIDLEELKAAIRDDTILISVMWVNNEIGVVQDIPAIGEICRERKIVFHVDAAQACGKVPVDVEAAKIDLLSMSAHKVYGPKGIGALYVRRKPRVRLEAQMHGGGHERGFRSGTLPTHQIVGMGEAFRIAKEELEQDMAHYRKLRDIFLKGIEGIEEVYINGDLGHRAPNNLNVSFNFVEGESLIMAVKELAVSSGSACTSASLEPSYVLRALGRNDELAHSSLRITFGRMTTEEEVQFAAELIKSKIGKLRELSPLWEMFKDGIDLNSIEWAAH

SEQ ID NO: 19064 - protein, 99 aa, Neisseria meningitidis
MTASMYILLVLALIFANAPFLTTRLFGVAALKRKHFGHHMIELAAGFALTAILAYILESRAGSVHDQGWEFYATVVCLYLIFAFPCFVWRYFWHTRNRE

SEQ ID NO: 19065 - protein, 63 aa, Neisseria meningitidis; identical to SEQ ID NO: 980

SEQ ID NO: 19066 - protein, 114 aa, Neisseria meningitidis; identical to SEQ ID NO: 565

SEQ ID NO: 19067 - protein, 148 aa, Neisseria meningitidis; identical to SEQ ID NO: 4053

SEQ ID NO: 19068 - protein, 421 aa, Neisseria meningitidis
MNTLQRRKTHQVRIDHITVGSEAPVVIQSMTNTDTADAKATALQIKELSDAGSEMVRITVNSPEAASKVAEIRRRLDDMGYATPLIGDFHFNGERLLAEFPECGKALSKYRINPGNVGKGVKGDEKFAFMIRTAAENDKAVRIGVNWGSLDQSLAKRMMDANLAFSAPKPPEEVTKEALIVSALESAEKAVLLGLPEDKIILSCKVSAVQDLIQVYRELGSRCAYPLHLGLTEAGMGSKGIVASTAALSVLLQEGIGDTIRISLTPEPGSPRTQEVVVGQEILQTMGLRSFTPMVTACPGCGRTTSTVFQELAQDVQNYLRQKMSIWRTLYPGVESLNVAVMGCVVNGPGESKLADIGISLPGTGETPVAPVYVDGERKVTLKGDNIATEFLAIVEEYVKTNYGENGSKRNQNKIIPIQSL

SEQ ID NO: 19069 - protein, 469 aa, Neisseria meningitidis
MTSTFPRRLARKIRQTRRLSRKSIAFLFLLAGSALVALTALFFAHLADFALELNAKLVQQYPWFAWVALPLGLPLIAWLTRKFAPFTAGSGIPQVIASLSLPYGAQKTRLIRLGQTLLKIPLTFLGMLFGASIGREGPSVQVGAAVMGAWGAWCKKHGLAFKGMQENDLMAAGAAGGLAAAFNAPLAGVIFAIEELGRGIMLRWERQILLGVLASGFIQVAIQGNNPYFSGFNGGVLEHIFLWVALSGLVCGAAGGLFGRLLYRGAAAFAPRKIRGFIRNRPLLLAALMGLLLALLGTFYQGKTYGTGYHEAAQALHGIYEAPFGLAAAKWLATVFSYWAGVPGGIFTPSLTIGAVLGEHIAAIADISQGANIIVLICMAAFLAGATQSPITSAVVVMEMTGGQSLLFWMLIACIFASQVSRQFSPRPFYHASGMRFRQRVLQETTAQTGNAPARPQTANSKTGMPSEN

SEQ ID NO: 19070 - protein, 144 aa, Neisseria meningitidis; identical to SEQ ID NO: 4464

SEQ ID NO: 19071 - protein, 70 aa, Neisseria meningitidis; identical to SEQ ID NO: 232

SEQ ID NO: 19072 - protein, 212 aa, Neisseria meningitidis
MKKINVAPENPQYRIVEIFESLQGEGWNTGMPAVFVRLGKCNLACGWCDTDYLTFGMMSLSDILGRLKAYAARNIIITGGEPTIQPHLDMLLDMLKAEGYFLCIETNGLNPAPPQIDYVATSPKACYAAKYENSCIETADEVRIVADGDVLAFCENMERKIRAHHYYLSPCEQDGAMNIYDTIRQIGILNSRPDAPVHWQLSVQTHKWAGIE

SEQ ID NO: 19073 - protein, 332 aa, Neisseria meningitidis; identical to SEQ ID NO: 6228

SEQ ID NO: 19074 - protein, 193 aa, Neisseria meningitidis; identical to SEQ ID NO: 3067

SEQ ID NO: 19075 - protein, 113 aa, Neisseria meningitidis; identical to SEQ ID NO: 6572

SEQ ID NO: 19076 - protein, 868 aa, Neisseria meningitidis
MAANQRYRKPLPGTDLEYYDARAACEDIKPGSYDKLPYTSRILAENLVNRADKVDLPTLQSWLGQLIEGKQEIDFPWYPARVVCHDILGQTALVDLAGLRDAIAEKGGDPAKVNPVVQTQLIVDHSLAVECGGYDPDAFRKNREIEDRRNEDRFHFINWTKTAFENVDVIPAGNGIMHQINLEKMSPVVQVKNGVAFPDTCVGTDSHTPHVDALGVISVGVGGLEAETVMLGRASMMRLPDIVGVELTGKRQPGITATDIVLALTEFLRKERVVGAFVEFFGEGARSLSIGDRATISNMTPEFGATAAMFAIDEQTIDYLKLTGRDDAQVKLVETYAKTAGLWADALKTAVYPRVLKFDLSSVTRNMAGPSNPHARFATADLAGKGLAKPYEEPSDGQMPDGAVIIAAITSCTNTSNPRNVVAAALLARNANRLGLQRKPWVKSSFAPGSKVAEIYLKEAGLLPEMEKLGFGIVAFACTTCNGMSGALDPKIQKEIIDRDLYATAVLSGNRNFDGRIHPYAKQAFLASPPLVVAYALAGSIRFDIENDVLGVADGKEIRLKDIWPADEEIDAVVAEYVKPQQFRDVYVPMFDTGTAQKAPSPLYDWRPMSTYIRRPPYWEGALAGERTLRGMRPLAILPDNITTDHLSPSNAILAVSAAGEYLAKMGLPEEDFNSYATHRGDHLTAQRATFANPKLFNEMVKNEDGSVRQGSFARVEPEGETMRMWEAIETYMNRKQPLIIIAGADYGQGSSRDWAAKGVRLAGVEAIVAEGFERIHRTNLIGMGVLPLQFKPGTNRHTLQLDGTETYDVVGERTPRCDLTLVIHRKNGETVEVPVTCRLDTAEEVLVYEAGGVLQRFAQDFLEGVVA

SEQ ID NO: 19077 - protein, 356 aa, Neisseria meningitidis
MNLISRYIIRQMAVMAVYALLAFLALYSFFEILYETGNLGKGSYGIWEMLGYTALKMPARAYELMPLAVLIGGLLSLSQLAAGSELTVIKASGMSTKKLLLILSQFGFIFAIATVALGEWVAPTLSQKAENIKAAAINGKISTGNTGLWLKEKNSIINVREMLPDHTLLGIKIWARNDKNELAEAVEADSAVLNSDGSWQLKNIRRSTLGEDKVEVSIAAEENWPISVKRNLMDVLLVKPDQMSVGELTTYIRHLQNNSQNTRIYAIAWWRKLVYPAAAWVMALVAFAFTPQTTRHGNMGLKLFGGICLGLLFHLAGRLFGFTSQLYGIPPFLAGALPTIAFALLAVWLIRKQEKH

SEQ ID NO: 19078 - protein, 252 aa, Neisseria meningitidis
MKKVSVLIVARNEANHIRECIESCRFDKEVIVIDDHSTDNTAEIAEGLGAKVFQRHLNGDFGAQKTFAIEQAGGEWVFLIDADERCTPELSDEISKIVQTGDYAAYFVERRNLFPNHPATHGAMRPDSVCRLMPKKGSSVQGKVHETVQTPYPKRRLKHFMYHYTYDNWEQYFNKFNKYTSISAEKYREQGKPVRFVRDIILRPIWGFFKIYILNKGFLDGKMGWIMSVNHSYYTMIKYVKLYYLYKSGGKF

SEQ ID NO: 19079 - protein, 548 aa, Neisseria meningitidis
MKQSARIKNMDQTLKNTLGICALLAFCFGAAIASGYHLEYEYGYRYSAVGALASVVFLLLLARGFPRVSSVVLLIYVGTTALYLPVGWLYGAPSYQIVGSILESNPAEAREFVGNLPGSLYFVQALFFIFGLTVWRYCVSGGVFADVKNYKRRSKIWLTILLTLILSCAVMDKIASDKDLREPDAGLLLNIFDLYYDLASAPAQYAAKRAHILEAAKKASTWHIRHVAPKYKNYVVVIGESARSDYMNVYGFPLPDTPFLSQTKGLLINGYQSTAHATNLSLPQTLGLPGEPNNNIVSLAKQAGFRTAWLSNQGMLGHFANEISTYALRSDYPWFTQRGDYGKSAGLSDRLLLPAFKRVLIGNAGTKPRLIVMHLMGSHSDFCTRLDKDARRFQYQTEKISCYVSTIAQTDKFLEDTVKILNENKESWSLVYFSDHGLMHVGKGGERTLTHGAWKRQSYGVPLVKISSDDTRREMIKVRRSAFNFLRGFGSWTGIETDELPDDGYDFWGNVPDVPGEGNNLAFIDGLPDDPAPWYAGKGKSTKNTSKK

SEQ ID NO: 19080 - protein, 163 aa, Neisseria meningitidis
MKYRRFYRNGGTYFFTVVANKRQKILTDDAVRLALRQAVMAVRERYPFEILAWVLMPDHLHTIWRLPDNDSAYSERWRQIKRHSKYLIGGNLRLWQKRFWEHTIRDEADFACHFDYLHFNPVKHGYVGQISDWRFSTFHRYVKQGIYPHNWGGGNADFSIEYD

SEQ ID NO: 19081 - protein, 206 aa, Neisseria meningitidis; identical to SEQ ID NO: 320

SEQ ID NO: 19082 - protein, 42 aa, Neisseria meningitidis
MNEQELDLDNLDNLLDDFDGVTVEGGVDSENDEGCEGGACKI

SEQ ID NO: 19083 - protein, 407 aa, Neisseria meningitidis
MSGNASSPSSSAAIGLIWFGAAVSIAEISTGTLLAPLGWQRGLAALLLGHAVGGALFFAAAYIGALTGRSSMESVRLSFGKRGSVLFSVANMLQLAGWTAVMIYAGATVSSALGKVLWDGESFVWWALANGALIVLWLVFGARKTGGLKTVSMLLMLLAVLWLSAEVFSTAGSTAAQVSDGMSFGTAVELSAVMPLSWLPLAADYTRHARRPFAATLTATLAYTLTGCWMYALGLAAALFTGETDVAKILLGAGLGAAGILAVVLSTVTTTFLDAYSAGASANNISARFAETPVAVGVTLIGTVLAVMLPVTEYENFLLLIGSVFAPMAAVLIADFFVLKRREEIEGFDFAGLVLWLAGFILYRFLLSSGWESSIGLTAPVMSAVAIATVLVRLFFKKTQSLQRNPS

SEQ ID NO: 19084 - protein, 330 aa, Neisseria meningitidis
VYACLPLKTNTQRIIMNILSKISSFIGKTFSLWAALFAAAAFFAPDTFKWAGPYIPWLLGIIMFGMGLTLKPSDFDILFKHPKAVIIGVIAQFAIMPATAWLLSKLLNLPAEIAVGVILVGCCPGGTASNVMTYLARGNVALSVAVTSVSTLISPLLTPAIFLMLAGEMLEIQAAGMLMSIVKMVLLPIVLGLIVHKVLGSKTEKLTDALPLVSVAAIVLIIGAVVGASKGKIMESGLLIFAVVVLHNGIGYLLGFFAAKWTGLPYDAQKTLAIEVGMQNSGLAAALAAAHFAAAPVVAVPGALFSVWHNISGSLLATYWAAKAGKHKKP

SEQ ID NO: 19085 - protein, 248 aa, Neisseria meningitidis
MMSEHRVNHEPVFLLASSPWRESSLRVEAFSRRYGRVALLARSARKRQSELRGVLVPFVPVSVSWYGSQELKTLHRAEWIGGWPQPQGRALFSGLYVNELVLKLTAREDPMPELYDALAKVMEAVCREANHIADLRRFEWKLLNALGVAPDLHADGTGGDILADKTYRLMPEEAVMPVCEDADALSHEAGAIVEGQSLIDLREGSFRTAESLQQALKITRLFIRHLLPEGLKSRQVLEQIRQFDRNTA

SEQ ID NO: 19086 - protein, 371 aa, Neisseria meningitidis
MLKFTLHKKDGYARRGTLELNHGKIETPVFMPVGTYGSVKAMNPQNLHDIKAQIILGNTYHLWLRPGLEVVEQFGGLHGFIGWDKPILTDSGGFQVFSLSDMRKLTEEGCTFKSPINGDKLFLSPEISMKIQTVLNSDIAMQLDECTPGEATREQARKSLQMSLRWAERSKKAFEDLKNPNALFGIVQGAMYEDLREESLKGLEELDFPGLAIGGLSVGEPKPEMYRMLRAVGPILPEHKPHYLMGVGTPEDLVYGVAHGVDMFDCVMPTRNARNGWLFTRFGDLKIKNAKHKLDKRPIDESCTCYACQNFSRAYLHHLHRAGEILGAQLNTIHNLHFYQVIMAEMRDAIEQGKFADWQARFHENRARGTD

SEQ ID NO: 19087 - protein, 111 aa, Neisseria meningitidis; identical to SEQ ID NO: 7069

SEQ ID NO: 19088 - protein, 427 aa, Neisseria meningitidis; identical to SEQ ID NO: 146

SEQ ID NO: 19089 - protein, 365 aa, Neisseria meningitidis; identical to SEQ ID NO: 11

SEQ ID NO: 19090 - protein, 407 aa, Neisseria meningitidis; identical to SEQ ID NO: 5647

SEQ ID NO: 19091 - protein, 93 aa, Neisseria meningitidis
MPSEARYGKLRQKQKPESHHSHSRESGFLGFRCFSVSMNFQAAVPDKYPQSKIPSFPRRWESRFIRTETDMPSFPRKRESRPFGFSFLVSGNF

SEQ ID NO: 19092 - protein, 46 aa, Neisseria meningitidis; identical to SEQ ID NO: 9631

SEQ ID NO: 19093 - protein, 517 aa, Neisseria meningitidis; identical to SEQ ID NO: 8070

SEQ ID NO: 19094 - protein, 581 aa, Neisseria meningitidis; identical to SEQ ID NO: 2972

SEQ ID NO: 19095 - protein, 320 aa, Neisseria meningitidis
MKILLVRLSSMGDLIHTLPAIEDLARQCPDVELHWLCEAGFADIARLHPFVKKIHVMKWRQWRKHLFRAETWREMGHLKQTLRQEVFDFVLDSQGLIKSACFAKMAKSPIYGLDKNSAREGWAALAYVKTYAVPKGKNAVWRNRELFAQVFGYVMPETQVFGLTVPEAGRLKNLAQPYYAALHATSRDSKLWPVENWRSLLQKLNEEQQCNIYLPWGNEDEKTRAKQIADGLPFAIVCDKINLLQAAYLLKYAVGIVGVDTGLLHLANALEKPVVGIYTDTDPIKTGVQVSPIAKNLGNIGQIPTADLVYQALMDCVAAD

SEQ ID NO: 19096 - protein, 380 aa, Neisseria meningitidis
MNTLYTLFATCPRGLETVLSQELESLGCTDVQVFDGGVSCRGGLEQVYAANLHSRTASRILLRLTKGTYRNERDIYKLAKNINWFNWFTLQQTFKVKVEAKRANVKSIQFVGLTVKDAVCDAFRDIYDARPSVDKAAPDVRIHAFLDERNVEIFIDTSGEALFKRGYRLDTGEAPLRENLAAGLLLSAGYDGTQPFQDPFCGSGTIAIEAAWIAARRAPGMMRRFGFEKLQNFDKTLWADLRRRAEAQVNPAFAPISGSDNDRRIIQTALANARSAGVDDIVSFSVADAQSVRPNGVGGIMVSNPPYGVRLEEVRALQALYPQLGTWLKKYYAGWLAAMFTGDREMPKFMRLSPKRKIPLYNGNLDCRLFLIDMVQGSNR

SEQ ID NO: 19097 - protein, 859 aa, Neisseria meningitidis
MRYDKLTAKFQQALAEAQSLALAADGSYLEAGFVLKALLDDQNSGAAALLAHAGVNVPQVKQRLQQHLNSLPKVSGQGGDIMPSRELQAVLNLMDKAATKRGDAYIASELFLLALVQQNDATGKILKEAGATEQNINAAIDAVRGGQNVNDANAEDQRDALKKYTLDLTQRARDGKLDPVIGRDDEIRRAIQVLQRRTKNNPVLIGEPGVGKTAIVEGLAQRIVNGEVPESLRNKRLLVLDLAALIAGAKYRGEFEERLKGVLNDLAKDDGNTLIFIDEIHTLVGAGKTDGAMDAGNMLKPALARGELHCIGATTLDEYRQYIEKDAALERRFQKVLVGEPSVEDTIAILRGLQERYEIHHGIDITDPAIVAAAELSDRYITDRFLPDKAIDLIDEAASRVKMEKETKPEAMDKIDRRLIQLRMEKAHVEKEKDDASKKRLELIDEEINGLQKEYADLDEIWKAEKAISDGAANIKKQIDEVKIKIEQAKRQGDLALASKLMYEDLEHLEKQRAAAERADTDSTKPANKLLRNNVGAEEIAEVVSRMTGIPVSKMMEGERDKLLKMEEVLHRRVVGQDEAVRAVSDAIRRSRSGLADPNKPYGSFLFLGPTGVGKTELCKALAGFLFDSEDHLIRIDMSEYMEKHAVARLIGAPPGYVGYEEGGYLTEQVRRKPYSVILLDEVEKAHPDVFNILLQVLDDGRLTDGQGRTVDFKNTVIVMTSNIGSQHIQQMGTQDYEAVKEVVMEDVKEHFRPEMINRIDEVVVFHGLDQDNIRNIAKIQLKGLEKRLEKQNLRLTVSDAALDIIAKAGFDPIYGARPLKRAIQSEIENPLAKALLAGNYAPESEIRVEADGDRLKFA

SEQ ID NO: 19098 - protein, 99 aa, Neisseria meningitidis; identical to SEQ ID NO: 1110

SEQ ID NO: 19099 - protein, 296 aa, Neisseria meningitidis; identical to SEQ ID NO: 6580

SEQ ID NO: 19100 - protein, 89 aa, Neisseria meningitidis; identical to SEQ ID NO: 1367

SEQ ID NO: 19101 - protein, 761 aa, Neisseria meningitidis
MNTKLTKIISGLFVATAAFQTASAGNITDIKVSSLPNKQKIVKVSFDKEIVNPTGFVTSSPARIALDFEQTGISMDQQVLEYADPLLSKISAAQNSSRARLVLNLNKPGQYNTEVRGNKVWIFINESDDTVSAPARPAVKAAPAAPAKQQATAPSTKSAVSVSKPFTPAKQQAAAPFTESVVSVSAPFSPAKQQAAASAKQQTAAPAKQQAAAPAKQTNIDFRKDGKNAGIIELAALGFAGQPDISQQHDHIIVTLKNHTLPTTLQRSLDVADFKTPVQKVTLKRLNNDTQLIITTAGNWELVNKSAAPGYFTFQVLPKKQNLESGGVNNAPKTFTGRKISLDFQDVEIRTILQILAKESGMNIVASDSVNGKMTLSLKDVPWDQALDLVMQARNLDMRQQGNIVNIAPRDELLAKDKAFLQAEKDIADLGALYSQNFQLKYKNVEEFRSILRLDNADTTGNRNTLVSGRGSVLIDPATNTLIVTDTRSVIEKFRKLIDELDVPAQQVMIEARIVEAADGFSRDLGVKFGATGKKKLKNDTSAFGWGVNSGFGGDDKWEAETKINLPITAAANSISLVRAISSGALNLELSASESLSKTKTLANPRVLTQNRKEAKIESGYEIPFTVTSIANGGSSTNTELKKAVLGLTVTPNITPDGQIIMTVKINKDSPAQCASGNQTILCISTKNLNTQAMVENGGTLIVGGIYEEDNGNTLTKVPLLGDIPVIGNLFKTRGKKTDRRELLIFITPRIMGTAGNSLRY

SEQ ID NO: 19102 - protein, 247 aa, Neisseria meningitidis
MLIIRNLIYWLILCSTLIFLFPFMLLASPFRDGAHKMARVWVKILNLSLKHIVGLKYRIIGAENIPDRPAVICAKHQSGWETLALQDIFPPQVYVAKRELFKIPFFGWGLKLVKTIGIDRNNRREANEQLIKQGLARKNEGYWITIFPEGTRLAPGKRGKYKLGGARMAKMFEMDIVPVALNSGEFWPKNSFLKYPGEITVVICPTIPHASGSEAELMEKCEHLIETQQPLISGAGPFAAKMPSETV

SEQ ID NO: 19103 - protein, 332 aa, Neisseria meningitidis
MKIAIYGTKSYDREHFTRANRHFGFELEFFDFMLDAKTAKMAEGAEAVCIFVNDDGSRPVLEKLAQIGVKTVALRCAGFNNVDLKAAEELGLKVVRVPAYSPESVAEHTVGLMLTLNRRIHKAYQRTRDANFSLEGLTGFNMYGKTAGVIGTGKIGIATMRILKGFGMNLLAYDPFCNPEAEKIGGRYVELNELYARSDIITLHCPSTPENHYMLNEAAFDKMKDGVMIINTSRGGLIDSSAAIEALKRRKIGALGMDVYENERELFFEDKSNDVITDDVFRRLSSCHNVLFTGHQAFLTEEALGNISEVTLSNIREVGQTGDCGNAVRADG

SEQ ID NO: 19104 - protein, 498 aa, Neisseria meningitidis
VRKFSFLPSVLMKETAFKTGMCLGSNNLSRLQKAAQQILIVRGYLTSQAIIQPQNMDSGILKLRVSAGEIGDIRYEEKRDGKSAEGSISAFNNKFPLYRNKILNLRDVEQGLENLRRLSSVKTDIQIIPSEEEGKSDLQIKWQQNKPIRFSIGIDDAGGKTTGKYQGNVALSFDNPLGLSDLFYVSYGRGLAHKTDLTDATGTETASGSRSYSVHYSVPVKKWLFSFNHNGHRYHEATEGYSVNYDYNGKQYQSSLAAERMLWRNRLHKTSVGMKLWTRQTYKYIDDAEIEVQRRRSAGWEAELRHRAYLNRWQLDGKLSYKRGTGMRQSMPAPEENGGGTIPGTSRMKIITAGLDAAAPFMLGKQQFFYATAIQAQWNKTPLVAQDKLSIGSRYTVRGFDGEQSLFGERGFYWQNTLTWYFHPNHQFYLGADYGRVSGESAQYVSGKQLMGAVVGFRGGHKVGGMFAYDLFAGKPLHKPKGFQTTNTVYGFNLNYSF

SEQ ID NO: 19105 - protein, 742 aa, Neisseria meningitidis; identical to SEQ ID NO: 1054

SEQ ID NO: 19106 - protein, 196 aa, Neisseria meningitidis; identical to SEQ ID NO: 1629

SEQ ID NO: 19107 - protein, 112 aa, Neisseria meningitidis; identical to SEQ ID NO: 191

SEQ ID NO: 19108 - protein, 487 aa, Neisseria meningitidis; identical to SEQ ID NO: 9402

SEQ ID NO: 19109 - protein, 389 aa, Neisseria meningitidis
MPQIKIPAVYYRGGTSKGIFFKRTDLPEAAQQAGEARDKILLRVLGSPDPYGKQIDGLGNASSSTSKAVILDKSERADHDVDYLFGQVSIDKPFVDWSGNCGNLTAAVGAFSIEQGLVDKGKIPSDGICTVKIWQKNIGKTIIAHVPMQNGAVLETGDFELDGVTFPAAEVQIEFLDPADGEGSMFPTGNLVDEIDVPNIGRLKATLINAGIPTVFLNAADLGYTGKELQDDINNDAAALEKFEKIRAYGALKMGLISDVSEAAARAHTPKVAFVAPAADYTASSGKTVNAADIDLLVRALSMGKLHHAMMGTASVAIATAAAVPGTLVNLAAGGGTRKEVRFGHPSGTLRVGAAAECQDGQWTATKAVMSRSARVMMEGWVRVPEDCF

SEQ ID NO: 19110 - protein, 283 aa, Neisseria meningitidis; identical to SEQ ID NO: 9200

SEQ ID NO: 19111 - protein, 287 aa, Neisseria meningitidis; identical to SEQ ID NO: 2947

SEQ ID NO: 19112 - protein, 695 aa, Neisseria meningitidis
MDYLSRLSFGFNKKLPVILQTEVAECGLACLTSILSYYGFHTDLRTLRQKYTLSLKGANLADIMRFGNEMNLTPRALRLELDELSNLQLPCILHWNLNHFVVLCSISKDSIVIMDPAVGMRKIKMDEVSQKFTGIALELFPNTHFEEKKETKKIKILSLLRGISGLKRSLIQMLILAISLEVFALVSPFFMQWVIDHVIVTADKNLLLTLTLGFGLLAILQQLISLLQAWVGMHLSTTLNLQWKANIFKRLLDLPNDYFSKRHLGDVISRFGSIDHIQETLTSTFFVLVLNSLMAVFTFVLMTIYSTQLSLIVLLTLVLYILIRWLAYYPLRNATEENIVHEAKQNSYFMETIRGIQSVKLFDKHYQRHGTWMSLFVNTVNTKLTTDKLSALFEFSNKLLFSMENIIIIYLGASAILDGSFTVGVLMAFLAYKGQFESRTASLVDQYIQIKMLGLHAERLADITLNETETEIIKYNHIPKLDNEQLVLKVENVSFRYADNEPYLFENINLEFKDNEAVVLTGQSGRGKSTLLNILTGSLKPETGTVSINGHDIYQVSPSFIRGLSGIVRQDDVLFAGSIGENISFFDESPNMELIEQCAKMAQIHDDILKMPMGYETLIGDMGNILSGGQKQRVILARALYKRPKILFLDEASSHLDVENEQKINHNLKSLGIMKIMVAHRQETIQSADKILNLG

SEQ ID NO: 19113 - protein, 242 aa, Neisseria meningitidis; identical to SEQ ID NO: 14445

SEQ ID NO: 19114 - protein, 64 aa, Neisseria meningitidis; identical to SEQ ID NO: 6143

SEQ ID NO: 19115 - protein, 391 aa, Neisseria meningitidis
MQNIFDPLVIRGKSLTPIVQGGMGVGVSASGLSSAVARENGIGTIASVDLRHLHEDLLAESQINPSEEKYTSLNCTALDREIQKAKSASEGKGLIAVNVMKAVKDYAAYVRQACESGADAVVMGAGLPLDLPEMTEGYHKYVALLPILSESRGINIVLKRWMKKGILPDAIVVEHPAHAAGHLGASTVEGVNDAKFDFKRVIEETFEVFKSLGLESEKIPLILAGGMANFEKVKTALKNWGASAVQIGTAFAVTEEGDAHLNFKKTLAGAETEKVVEFMSVAGLPARGVRTKFLDSYIKRESKLQTNAKADPRRCTQGLNCLTSCGLRDGLSKAGQFCIDIQLAAAFRGEVDKGLFFRGKDPLPFGNAIRTVRETIQYLLTGSEPVATVGR

SEQ ID NO: 19116 - protein, 216 aa, Neisseria meningitidis; identical to SEQ ID NO: 2506

SEQ ID NO: 19117 - protein, 248 aa, Neisseria meningitidis
MSTQDLSGKIALVTGASRGIGAAIADTLAAAGAKVIGTATSESGAAAISERLAQWGGEGRVLNSAEPETVENLIADIEKTFGKLDILVNNAGITRDNLLMRMKEEEWDDIMQVNLKSVFRASKAVLRGMMKQRAGRIINITSVVGVMGNAGQTNYAAAKAGLIGFSKSMAREVGSRGITVNCVAPGFIDTDMTRALPEETRQAFTAQTALGRFGDAQDIADAVLFLASDQAKYITGQTLHVNGGMLMP

SEQ ID NO: 19118 - protein, 1069 aa, Neisseria meningitidis
MFYLYQSNRLETLAALFARIQKVKPLKSVLQPEQIIVQSQGMRRYLNTCLARDLGVAANLSFSLPAGLTWKLMKKLIPGIPELSPFAPEVMRWRLLDLFRSEAFRNTAEFEDVRNVLQDYLGSGESADYQLAGQLADIFDQYLVYRPQWIDAWQQGRILSLGDDEIWQSKLWRYLDDGRQSAPHRVALWEKLLESLSSDKLPERYFVFGISTMAPMYLQLLHKLSEHCDVFVFALNPSGMYWGNVIEAAQILKGGGDPDLTQAGHPLLASLGKQGRDFFDFLNEMEIEGETPVFEEGSRDTLLHALQTDIQNLDMPSEKAGNINTDDGSIRIVSAHSPLRELQILKDKLLKILHEHPDWQPHDIAVLTPNIESYTPFIEAVFGQAQPGAQALPYSVSDVKISRRQPFFYTLECLSDLLESRFEVDKVLVLLETAPVLRRFGLTEDDLPLLHDMVADLNVRWGLDGEMRGGTDQLFTWKQAVERMILGWMLPEGGNPMWQDVSAWYADVNQTALFGRFAALLETLSDIVRIWQQPATVGEWVARCRDLLETLFQTEADDQKAVQNLENEWVKWQAETELAQFSGQLPPHTVIRHIRRFLDSESEAGFLRGGITFCSMVPMRSLPFKVICLLGLNDGDFPRNTKAAVFDLIAKHPAKGDRARRDDDRYLFLEALISAREILYLSYIGRDIRKDEELAPSSLLGELIDTVAAMAGIGSRQLAQNWIEQHPLQAFSRRYFQEGGRSDGIFGTRTDYATALGQTPEPPQPFFDQPVENAEPVAEIGQDEFIRFWRNPVKVWLQQQLAWSEPHIGEAWEPAEPFEPQHADQIAEIYIEARREGQDFSQTAARIRAESLLPSGELGRLWQQDFQTAAKQIDTAVLNSPKLPPLPYAIPSDGQILKGSLGNLYRCGQVFYAYGKPNAPQRIAFLLEHLIFCAVMPSEAEMRQTFIVQSGETEILAEIAQDRALQLLSEWMAFFNIGQNRPLPFFAKTSLAAAEAFAQKQDWEAALKKAQTAYYGSKVSKGQKDYTEVALVFGNASQNPLEQPLFENLVRLLADTFAAAEKKEEAGAA

SEQ ID NO: 19119 - protein, 164 aa, Neisseria meningitidis
LAEGQKSAVTEYYLNHGIWPKNNTSAGVASSATDIKGKYVKSVEVKNGVVTAEMKSSGVNKEIQGKKLSLWAKRQDGSVKWFCGQPVTRTAADSDDVAAANGKTADNINTKHLPSTCCDASSAVCIETPRADFKHFQKISRHRVLPESRHMARRQQFCRRGNLL

SEQ ID NO: 19120 - protein, 199 aa, Neisseria meningitidis; identical to SEQ ID NO: 1276

SEQ ID NO: 19121 - protein, 164 aa, Neisseria meningitidis
MENRFAKIVKDIFSFTQFVSEAENKIPNQSSRYYDCWWELEILNASALEDWEISGKPEKWEKWTEKYQTEALQSVKHLFAEEVPENNIVCDISHFLHFADWAEADIPNQSRLYAEYWWEMEMFKMSVLEDWERSGKPLDWKKWQRQYRSEAFELVKKLNRSKQE

SEQ ID NO: 19122 - protein, 397 aa, Neisseria meningitidis
MFFKHIEAAPADPILGLGEAFKAETRPEKVNLGIGVYKDASGATPLVKAVKEAEKRLLESETTKNYLTIDGVADYNEQTQILLFGKDHEIIASRRAKTAQSLGGTGALRIATEFAKRQLNAQTIWISNPTWPNHNAIAKAVGIQDKPYRYYDAAKHGLDWDGMIEDLSQAQKGDIVLLHGCCHNPTGIDPTPEQWETLAKLSAEKGWLPLFDFAYQGFGNGLEEDAYGLRVFLKHNTELLIASSYSKNFGMYNERVGAFTLVAEDEETAARAHSQVKTIIRTLYSNPASHGANTIALVLKNDDLKAQWIAELDEMRGRIKAMRQKFVELLKAKGASQNFDFIIEQNGMFSFSGLTPEQVDRLKNEFAIYAVRSGRINVAGITDDNIDYLCESIVKVL

SEQ ID NO: 19123 - protein, 280 aa, Neisseria meningitidis
MDKERILTPAVVFSVALLHLAMVALLWQAHKLPVIESGNVIEFVDLGDFGGGDGAPEGAGAPAAPEPQPEPEPPKPVEPPKPVLKPVVTKKADADIQQPKEEPKPEEKPKPEEKPKPEPKPEAKPVPKPAEKPVERPSEKPAEHPSNASAKADSEQGNGEDKGTGTKGDGTGRGEGSGKGSGGVKGEHGEGAGSSKGNPLRANGSIPRPAYPTLSMENDEQGTVVLSVLVSPGGHVESVKIVKSSGFSRLDNAARKAAQNGHFQANAWTEFKVPVKFELN

SEQ ID NO: 19124 - protein, 201 aa, Neisseria meningitidis; identical to SEQ ID NO: 1094

SEQ ID NO: 19125 - protein, 76 aa, Neisseria meningitidis
VRTAHTLHVDFEVPCNSQVGCVAQPRTRCWVCRLRLAAAETPEEKAKDAAEEAKEEAKDAAEDAKEAAEDAKEEAK

SEQ ID NO: 19126 - protein, 506 aa, Neisseria meningitidis
MFFISIRYIFVRKLWRANGQPFKITPLRIENPPERNIMMKNRVTNIHFVGIGGVGMSGIAEVLHNLGFKVSGSDQARNAATEHLGSLGIQVYPGHTAEHVNGADVVVTSTAVKKENPEVVAALEQQIPVIPRALMLAELMRFRDGIAIAGTHGKTTTTSLTASILGAAGLDPTFVIGGKLNAAGTNARLGKGEYIVAEADESDASFLHLTPIMSVVTNIDEDHMDTYGHSVEKLHQAFIDFIHRMPFYGKAFLCIDSEHVRAILPKVSKPYATYGLDDTADIYATDIENVGAQMKFTVHVQMKGHEQGSFEVVLNMPGRHNVLNALAAIGVALEVGASVEAIQKGLLGFEGVGRRFQKYGDIKLPNGGTALLVDDYGHHPVEMAATLAAARGAYPEKRLVLAFQPHRYTRTRDLFEDFTKVLNTVDALVLTEVYAAGEEPIAAADSRALARAIRVLGKLEPIYCENVADLPEMLLNVLQDGDIVLNMGAGSINRVPAALLELSKQI

SEQ ID NO: 19127 - protein, 154 aa, Neisseria meningitidis; identical to SEQ ID NO: 6562

SEQ ID NO: 19128 - protein, 284 aa, Neisseria meningitidis; identical to SEQ ID NO: 506

SEQ ID NO: 19129 - protein, 429 aa, Neisseria meningitidis; identical to SEQ ID NO: 2821

SEQ ID NO: 19130 - protein, 107 aa, Neisseria meningitidis; identical to SEQ ID NO: 1495

SEQ ID NO: 19131 - protein, 344 aa, Neisseria meningitidis
MPNCFKFHTVIERHWQKPYPVLSFLLKPLSGLFAKIAAKRRTDFLSGKRQSEKLPVPVVVVGNIHAGGTGKTPIAAALVSGLQEKGVKVGIISRGYGRKSKAVHVLNAASRAEDAGDEPLLLFSKTGAPTAVGSSRAEAGRALLAAHPDIGLIVADDGLQHYALRRDVEIAVFPAADTGRTDLDLLPNGNLREPLSRLDSVDTVVVSGGKADALFRPSENMFHSRIEAGRIYRLNNPSEILDTGRLKNQTVVAVAGIAKPARFFDSLRNMGITVKRTVALPDHADISAADLPDADAVIITEKDAVKFSDGICTDNVWVLPVCAIIEPDLAAFVLERLEDVPKAV

SEQ ID NO: 19132 - protein, 318 aa, Neisseria meningitidis
MKEFDFIKRYLQTGTDNDVVLGIGDDAAIVRPREGFDLCFSADMLLKDRHFFANVKPEDLAWKVLAVNVSDMAAMGAIPRWVLLSAALPELDEVWLKRFCGSFFGLAKKFGVTLIGGDTTKGDMAFNVTIIGELPKGRALRRDAAVAGDDIWVSGRVGMAAAALNCRLKRCVLPDDVFAECEQKLLRPEPRVGLGLALLPFARAAQDVSDGLAQDLGHILTASGVGAEIWADSLPSLSVLKDILPRAQWLSYTLAGGDDYELVFTAPESCRSRVLDAAERCGVPVTRIGKINGGCRLKVLDADGRELELHSLGFDHFG

SEQ ID NO: 19133 - protein, 331 aa, Neisseria meningitidis; identical to SEQ ID NO: 12175

SEQ ID NO: 19134 - protein, 1071 aa, Neisseria meningitidis
MPKRTDLKSILIIGAGPIVIGQACEFDYSGAQACKALREEGYKVILVNSNPATIMTDPEMADVTYIEPIMWQTVEKIIAKERPDAILPTMGGQTALNCALDLARNGVLAKYNVELIGATEDAIDKAEDRGRFKEAMEKIGLSCPKSFVCHTMNEALAAQEQVGFPTLIRPSFTMGGSGGGIAYNKDEFLAICERGFDASPTHELLIEQSVLGWKEYEMEVVRDKNDNCIIICSIENFDPMGVHTGDSITVAPAQTLTDKEYQIMRNASLAVLREIGVDTGGSNVQFAVNPENGEMIVIEMNPRVSRSSALASKATGFPIAKVAAKLAVGFTLDELRNDITGGKTPASFEPSIDYVVTKIPRFAFEKFPAADDRLTTQMKSVGEVMAMGRTIQESFQKALRGLETGLCGFNPRSSDKAEIRRELANPGPERMLFVADAFRAGFTPEEIHEICAIDPWFLAQIEDLVKEEKSVSDGILSDLDFAALRRLKRKGFSDKRIAQLLGVKEKEVREHRYALKLHPVYKRVDTCAAEFATETAYLYSTYEEECESRPSDRKKVMILGGGPNRIGQGIEFDYCCVHAALALRESGFETIMVNCNPETVSTDFDTSDRLYFEPLTLEDVLEIVRTENPWGVIVHYGGQTPLKLANALVENGVNIIGTSADSIDAAEDRERFQKVLNDLGLRQPPNRIAHNEEEALVKAEEIGYPLVVRPSYVLGGRAMQIVHSAEALQKYMREAVQVSEDSPVLLDFFLNNAIEVDVDCVSDGKDVVIGGIMQHVEQAGIHSGDSGCSLPPYSLSEEIQDEIRRQTKAMAYALGVVGLMNVQFAVQDGVVFVLEVNPRASRTVPFVSKATGVPLAKVGARCMAGISLKEQGVEKEVVPDFYAVKEAVFPFIKFPGVDTILGPEMRSTGEVMGVGASFGEAYYKAQLGAGERLNPTGKIFLSVREEDKERVIKTAKNFQALGYGICATRGTAQYLTEHGLIVQTINKVPEGRPHIGDALKNGEIALVVNTVSSDPQSVSDSHIIRQSALQQRVPQYTTTAGGEAMSEGAKSRDHLGVYSVQELHGRLKNRS

SEQ ID NO: 19135 - protein, 87 aa, Neisseria meningitidis
MNLKDFLYIRRVLEEYMRYLHNPDHYPDIEAIQNFLGDASSGGGFECLSTAIYNKVYKVDLPAKIEKMIDDGLFEHPLYPSYYKKNE

SEQ ID NO: 19136 - protein, 186 aa, Neisseria meningitidis; identical to SEQ ID NO: 104

SEQ ID NO: 19137 - protein, 559 aa, Neisseria meningitidis
MEIINDAELIRSMQRQQHIDAELLTDANVRFEQPLEKNNYVLSEDETPCTRVNYISLDDKTVRKFSFLPSVLMKETAFKTGMCLGSNNLSRLQKAAQQILIVRGYLTSQAIIQPQNMDSGILKLRVSAGEIGDIRYEEKRDGKSAEGSISAFNNKFPLYRNKILNLRDVEQGLENLRRLSSVKTDIQIIPSEEEGKSDLQIKWQQNKPIRFSIGIDDAGGKTTGKYQGNVALSFDNPLGLSDLFYVSYGRGLAHKTDLTDATGTETASGSRSYSVHYSVPVKKWLFSFNHNGHRYHEATEGYSVNYDYNGKQYQSSLAAERMLWRNRLHKTSVGMKLWTRQTYKYIDDAEIEVQRRRSAGWEAELRHRAYLNRWQLDGKLSYKRGTGMRQSMPAPEENGGGTIPGTSRMKIITAGLDAAAPFMLGKQQFFYATAIQAQWNKTPLVAQDKLSIGSRYTVRGFDGEQSLFGERGFYWQNTLTWYFHPNHQFYLGADYGRVSGESAQYVSGKQLMGAVVGFRGGHKVGGMFAYDLFAGKPLHKPKGFQTTNTVYGFNLNYSF

SEQ ID NO: 19138 - protein, 130 aa, Neisseria meningitidis; identical to SEQ ID NO: 425

SEQ ID NO: 19139 - protein, 370 aa, Neisseria meningitidis; identical to SEQ ID NO: 852

SEQ ID NO: 19140 - protein, 344 aa, Neisseria meningitidis
LEDEDFIRAASMLAEEVFGFGIYKESKGSGGRFYERCWLMGSEDVLYGRVHFGGQNNTILFELTGTGCGVAKEGWESRLFAFLTNAIRPKITRVDIAKDFFNGEYSPNQAREDRNKGMFTCHHVKPKGECLGSDWEEDDEAKMTKGKTYGIGSRESSKYVRVYEKGKQLGDKTSTWTRFEIEFKAKDIVIPFEVLQNPGEYFGGAYPICERFVQKATRIHAVKEDKVISADRYLEWVKKQFGRAANGLKFIFPELDKAKLFELIEPSHHKLPKSLAPEAYDCAFLKAQAIHEQPAFKPYNDPYYMYEYYENLEKQLEQQKHVNNEESYNNFIYDKFARLPISWA

SEQ ID NO: 19141 - protein, 545 aa, Neisseria meningitidis; identical to SEQ ID NO: 775

SEQ ID NO: 19142 - protein, 622 aa, Neisseria meningitidis
MQAVRYRPEIDGLRAVAVLSVIIFHLNNRWLPGGFLGVDIFFVISGFLITGIILSEIQNGSFSFRDFYTRRIKRIYPAFIAAVSLASVIASQIFLYEDFNQMRKTVEFSAVFLSNIYLGFQQGYFDLSADENPVLHIWSLAVEEQYYLLYPLLLIFCCKKTKSLRVLRNISIILFLILTATSFLPSGFYTDILNQPNTYYLSTLRFPELLAGSLLAVYGQTQNGRRQTANGKRQLLSSLCFGALLACLFVIDKHNPFIPGMTLLLPCLLTALLIRSMQYGTLPTRILSASPIVFVGKISYSLYLYHWIFIAFAHYITGDKQLGLPAVSAVAALTAGFSLLSYYLIEQPLRKRKMTFKKAFFCLYLAPSLILVGYNLYARGILKQEHLRPLPGAPLAAENHFPETVLTLGDSHAGHLRGFLDYVGSREGWKAKILSLDSECLVWVDEKLADNPLCRKYRDEVEKAEAVFIAQFYDLRMGGQPVPRFEAQSFLIPGFQARFRETVKRIAAVKPVYVFANNTSISRSPLREEKLKRFAANQYLRPIQAMGDIGKSNQAVFDLIKDIPNVHWVDAQKYLPKNTVEIYGRYLYGDQDHLTYFGSYYMGREFHKHERLLKSSRDGALQ

SEQ ID NO: 19143 - protein, 406 aa, Neisseria meningitidis
MAVNLTEKTAEQLPDIDGIALYTAQAGVKKPGHTDLTLIAVAAGSTVGAVFTTNRFCAAPVHIAKSHLFDEDGVRALIINTGNANAGTGAQGRIDALAVCAAAARQIGCKPNQVLPFSTGVILEPLPADKIIAALPKMQPAFWNEAARAIMTTDTVPKAASREGKVGDKHTVRATGIAKGSGMIHPNMATMLSFIATDAKVSQPVLQLMTQEIADETFNTITVDGDTSTNDSFVIIATGKNSQSEIDNIADPRYAQLKELLCSLALELAQAIVRDGEGATKFITVRVENAKTRDEARQAAYAVARSPLVKTAFFASDPNLGRLLAAIGYAGVADLDTDLVEMYLDDILVAEHGGRAASYTEAQGQAVMSKAEITVRIKLHRGQAAATVYTCDLSHGYVSINADYRS

SEQ ID NO: 19144 - protein, 202 aa, Neisseria meningitidis; identical to SEQ ID NO: 597

SEQ ID NO: 19145 - protein, 73 aa, Neisseria meningitidis; identical to SEQ ID NO: 227

SEQ ID NO: 19146 - protein, 413 aa, Neisseria meningitidis; identical to SEQ ID NO: 963

SEQ ID NO: 19147 - protein, 308 aa, Neisseria meningitidis
MSEMKKTKVHLISGFLGTGKTTALKSLMAQKDPNEKWVIIVNEFGEIGIDGAVLSDNGIPVAEIAGGCLCCTAGPQMGVTVQKMLRDAKPDRLMIEASGLAHAASVIDELKAKPLDSLLEIGAVFTVVNPRQFINPDYAQQALYKDQIGICDVLVASKTDLCTTEQLAEFHDKAAKLFPPKAKVVEVQNAQLDIQWLDIPVIEKSRYRLKALPDNTMGFQSQGFTFPAGRDFDGEKLTNFFNDLPNMTEGLVRAKGVFQVLGTWVWLNWVDGQWGANQVSWRRDSRFELIAKSFDADLIEQKLKDALE

SEQ ID NO: 19148 - protein, 287 aa, Neisseria meningitidis; identical to SEQ ID NO: 17134

SEQ ID NO: 19149 - protein, 222 aa, Neisseria meningitidis; identical to SEQ ID NO: 3618

SEQ ID NO: 19150 - protein, 41 aa, Neisseria meningitidis; identical to SEQ ID NO: 6068

SEQ ID NO: 19151 - protein, 201 aa, Neisseria meningitidis
MKKIGLFGGTFDPIHNGHLHIARAFADEIGLDTVVFLPTGGPYHKDAASASAADRLAMVELATAEDARFAVSDCDIVRRGETYTFDTVQIFRQQFPSAQLWWLMGSDSLMKLHTWKKWQMLVRETNIAVAMRQGDSLHQTPRELHAWLGNALQDGSVRILSAPMHNVSSTEIRRNLAGQGVSDGIPPAAARYIREHGLYEK

SEQ ID NO: 19152 - protein, 398 aa, Neisseria meningitidis; identical to SEQ ID NO: 4714

SEQ ID NO: 19153 - protein, 270 aa, Neisseria meningitidis; identical to SEQ ID NO: 7099

SEQ ID NO: 19154 - protein, 90 aa, Neisseria meningitidis; identical to SEQ ID NO: 11161

SEQ ID NO: 19155 - protein, 112 aa, Neisseria meningitidis; identical to SEQ ID NO: 6756

SEQ ID NO: 19156 - protein, 146 aa, Neisseria meningitidis
VRAFQTALRPSRILNILTVSLHAASLAVCLTWFYGWMMWFGLAALVASYAYSLRITNLKHRHAITAITIDRDGQAEIVSGKDKTAATLAGSSMVTPYALFLQWDTGGTTVSQCIIPDMTDKESYRRLKVWILWRQPKKTAETDTPS

SEQ ID NO: 19157 - protein, 68 aa, Neisseria meningitidis; identical to SEQ ID NO: 4044

SEQ ID NO: 19158 - protein, 283 aa, Neisseria meningitidis
MITHPQFDPVLISIGPLAVRWYALSYILGFILFTFLGRRRIAQGLSVFTKESLDDFLTWGILGVILGGRLGYVLFYKFSDYLAHPLDIFKVWEGGMSFHGGFLGVVIAIWLFGRKHGIGFLKLMDTVAPLVPLGLASGRIGNFINGELWGRVTDINAFWAMGFPQARYEDLEAAAHNPLWAEWLQQYGMLPRHPSQLYQFALEGICLFAVVWLFSKKQRPTGQVASLFLGGYGIFRFIAEFARQPDDYLGLLTLGLSMGQWLSVPMIVLGIVGFVRFGMKKQH

SEQ ID NO: 19159 - protein, 521 aa, Neisseria meningitidis
MTQDKILILDFGSQVTQLIARRVREAHVYCELHSFDMPLDEIKAFNPKGIILSGGPNSVYESDYQADTGIFDLGIPVLGICYGMQFMAHHLGGEVQPGNQREFGYAQVKTIDSELTRGIQDGEPNTLDVWMSHGDKVSKLPDGFAVIGNTPSCPIAMMENAEKQFYGIQFHPEVTHTKQGRALLNRFVLDICGAQPGWTMPNYIEEAVAKIREQVGSDEVILGLSGGVDSSVAAALIHRAIGDQLTCVFVDHGLLRLNEGKMVMDMFARNLGVKVIHVDAERQFMAKLAGVTDPEKKRKIIGAEFIEVFDAEEKKLTNAKWLAQGTIYPDVIESAGAKTKKAHAIKSHHNVGGLPENMKLKLLEPLRDLFKDEVRELGVALGLPREMVYRHPFPGPGLGVRILGEVKKEYADLLRQADDIFIQELRNTTDENGTSWYDLTSQAFAVFLPVKSVGVMGDGRTYDYVVALRAVITSDFMTAHWAELPYSLLGRVSNRIINEVKGINRVVYDVSGKPPATIEWE

SEQ ID NO: 19160 - protein, 335 aa, Neisseria meningitidis; identical to SEQ ID NO: 19017

SEQ ID NO: 19161 - protein, 787 aa, Neisseria meningitidis
MQFSYSWLKTQADTELSSDKLEHLLTMSGLEVEEAETAAPAFAGVVIAEVKSVEKHPDADRLNVTRVDAGTGGLVQIVCGAPNVKAGIKVPCSLPGAVLPGNFKIKPTKMRGVPSNGMLCSTNELGLPDDGVDGLHILPEDAPVGTNIREYLDLDDTLFTLKITPNRADCLSIKGIAREVSALTGCAFRQPEIHTAPITGSRKQPVQINAPADCGRFISRVIENVNAKAATPDWMKQRLERSGIRSISALVDIGNYVMLEIGQPMHVFDADKLSGSLHIRRAREGETLECLNEKTVSLSENTLVVADEKGVLSLAGLMGGAASAVSDGTQNIVLEAAWFAPEIIAGKSRQYGFGSDSSFRFERGVDYRLQADAMERATELVLQICGGAAGEMVEAQGKLPEAKQVGLRLDRLKTVLGVDIPAEQVETILQHLGLQPEKTAEGFRVTAPSFRFDIEIEADLIEEIGRVYGYENIPDDYTSGRLKMLELPETRRPRFAVYNEMAAHGYREVVSYAFVDEQWEQDFAANADPIRLQNPLAAQYAVMRSTLIGGLVEILQNNLNRKQNRVRVFEIARVFGKGSDGRFVQNERIGGLWYGAAMPEQWGGKTRNADFYDIKADVENLLKNKAVEFVKTGHPALHPGRAANIVSDGKVIGFVGELHPKWLQKYDLPQAPLVFEIDMAAVLECGKTRYRAVSKFQPVRRDLAFVMPEAMSHDDLLLVLKGAANKLVQEISVFDVYRGTGLPEGMKSVAVKVILQDMENTLTDEAVEPLIGKLIGAATAAGARLRS

SEQ ID NO: 19162 - protein, 462 aa, Neisseria meningitidis
MNAVVVAVIVMLVLSLSRVHVVLSLTVGAFVGGAVAGMPLQNIADAAGQVSQAGIIPVFNKGLEGGAKIALSYAMLGAFAMAITHSGLPQQLAGAVVRKLNRGGMPDSVRSGEGAVKWLLLSIILVMGIMSQNIIPIHIAFIPMIVPPLLLVFNRLKIDRRLIACVITFGLVTTYMFLPYGFGAIFLNEILLGNIHSAAPQLDVKNINVMAAMAIPALGMLAGLLLVFVHYRKPRLYQSNNADTAGNADAANRPQPSAYRSLAAAAAIAVCFAIQLMYEDSLVLGAMLGFAVFMMLGVINRDKANDVFGEGIKMMAMVGFIMIAAQGFAAVMNATGHIQPLVESSMAIFGNSKGMAALAMLVVGLLVTMGIGSSFSTLPIIAAIYVPLCVGLGFSPLATVAIVGTAGALGDAGSPASDSTLGPTMGLNADGQHDHIRDSVIPTFIHYNIPLLIAGWIAAMVL

SEQ ID NO: 19163 - protein, 196 aa, Neisseria meningitidis
MGLELPLILGTSSVFRREQMERLGIAFQAASPDFDETPMLGESAPQTALRLAEGKARSLTGRFPKALIVGADQVAWCDGRQWGKPMNLANAQKMLMHLSGREIEFYSAVVLLNTVTGRMQRHIDKTVVVMRQLDELHILRYLEREPDAVYCSCALKSEDLGVLLIERIESTDPNALIGLPVFRLVDFLKNEGVDVL

SEQ ID NO: 19164 - protein, 105 aa, Neisseria meningitidis; identical to SEQ ID NO: 5128

SEQ ID NO: 19165 - protein, 318 aa, Neisseria meningitidis; identical to SEQ ID NO: 46

SEQ ID NO: 19166 - protein, 141 aa, Neisseria meningitidis; identical to SEQ ID NO: 6006

SEQ ID NO: 19167 - protein, 489 aa, Neisseria meningitidis
LKAVIPHTGGHEMNEYYQLIKHPDISLSPISDGIGVGNPATGEILAYVRNTGSDKLKNLIQKAAAAQKLWAAKTALERADILWRWYFLVKENKEALARLMTMEQGKSLTESRGEIDYAASFVRWFAEEARRIDGDVLTSVKASQKLVVLKQPVGVTAAITPWNFPSAMIARKAAPALAVGCAMIIKPASLTPLSAYALASLAYEAGIPQDLLPVVSGRASEIGREFATNPIIRKISFTGSTEVGAKIFADSAADIKKLSLELGGNAPFIVFDDADLDKAVEGALASKFRNSGQTCVCTNRVYAQSGIYDEFCRKLSEKVAELKLGNGLEDGVNQGPLIEEKAVEKVEQHIADALAKGAVCLTGGKRSALGGTFFEPTVLSGVTAQMAVAREETFGPLCPVFRFETEAEVIEAANNTEYGLAAYLFTADTARQWRVGEALEYGMVGINTGLISNEAAPFGGVKRSGLGREGSKYGADEYLELKYLCMDVG

SEQ ID NO: 19168 - protein, 85 aa, Neisseria meningitidis
MKEFPDLEKRLIMLEVAVQDLEERSLTDSFVLAWLLQRITRQEPTSIEQVRSFLQAQAKTFEPDSVQREHLESLLEIVESAQGLA

SEQ ID NO: 19169 - protein, 249 aa, Neisseria meningitidis; identical to SEQ ID NO: 131

SEQ ID NO: 19170 - protein, 1005 aa, Neisseria meningitidis
LIVILLLALAGLFFVRAQSEREWMREVSAWQEKKGEKQAELPEIKDGMPDFPELALMLFHAVKTAVYWLFVGVVRFCRNYLAHESEPDRPVPPASANRADVPTASDGYSDSGNGTEEAETEEAEAAEEEAADTEDIATAVIDNRRIPFDRSIAEGLMPSESEISPVRPVFKEITLEEATRALNSAALRETKKRYIDAFEKNETAVPKVRVSDTPMEGLQIIGLDDPVLQRTYSRMFDADKEAFSESADYGFEPYFEKQHPSAFSAVKAENARNAPFRRHAGQAEAKSPDVSQGQSVSDGTAVRDACRRVSVNLKEPNKATVSAEARISRLIPESRTVVGKRDVEMPSETENVFTETVSSVGYGGPVYDEAADIYIEEPAAPDAWVVEPPEVPKVPMPAIDIPPPPPVSEIYNRTYEPPTGFEQAQRSRIAETDHLADDVLNGGWQEETAAIADDGSEGAAERSNGQYLSETEAFGHDSQAVCPFENVPSERPSCRVSDTEADEGAFPSEETGAVSEHLPTTDLLLPPLFNPEATQTEEELLENSITIEEKLAEFKVKVKVVDSYSGPVITRYEIEPDVGVRGNSVLNLEKDLARSLGVASIRVVETILGKTCMGLELPNPKRQMIRLSEIFNSPEFAESKSKLTLALGQDITGQPVVTDLGKAPHLLVAGTTGSGKSVGVNAMILSMLFKAAPEDVRMIMIDPKMLELSIYEGIPHLLAPVVTDMKLAANALNWCVNEMEKRYRLMSFMGVRNLAGFNQKIAEAAARGEKIGNPFSLTPDDPEPLEKLPFIVVVVDEFADLMMTAGKKIEELIARLAQKARAAGIHLILATQRPSVDVITGLIKANIPTRIAFQVSSKIDSRTILDQMGAENLLGQGDMLFLPPGTAYPQRVHGAFASDEEVHRVVEYLKQFGEPDYVDDILSGGGSEELPGIGRSGDGETDPMYDEAVSVVLKTRKASISGVQRTLRIGYNRAARLIDQMEAEGIVSAPEHNGNRTILVPLDNA

SEQ ID NO: 19171 - protein, 371 aa, Neisseria meningitidis; identical to SEQ ID NO: 525

SEQ ID NO: 19172 - protein, 376 aa, Neisseria meningitidis
MFTDENMTAKEELFAWLRHMNKNKGSDLFVTTHFPPAMKLDGKITRITDEPLTAEKCMEIAFSIMSAKQAEEFSSTNECNFAISLPDTSRFRVNAMIQRGATALVFRAITSKIPKFESLNLPPVLKDVALKKRGLVIFVGGTGSGKSTSLASLIDYRNENSFGHIITIEDPIEFVHEHKNCIITQREVGVDTENWMAALKNTLRQAPDVILIGEIRDRETMDYAIAFAETGHLCMATLHANSTNQALDRIINFFPEERREQLLTDLSLNLQAFISQRLVPRDGGKGRVAAVEVLLNSPLISELIHNGNIHEIKEVMKKSTTLGMQTFDQHLYQLYEKGDISLQEALKNADSAHDLRLAVQLRSRRAQSSSPDLELL

SEQ ID NO: 19173 - protein, 200 aa, Neisseria meningitidis
MTDMLQTAFYIMLFPRIIAASAQRKLSVYLKKGGLVAYPTESCYGLGCLPTLAKALGKLAHLKKRPQHKGMIVIGNQFEQLQPLLQMPSENLQDMLRKEWPAPKTFLLSAKSCVLPELRGKQRSKLAVRVPAHVGARRLCQALQTPLVSTSCNRAGKRACRTEREVRRQFGRDVWIVGGRIGRQKSPSQIIDGETGKRLR

SEQ ID NO: 19174 - protein, 515 aa, Neisseria meningitidis; identical to SEQ ID NO: 654

SEQ ID NO: 19175 - protein, 76 aa, Neisseria meningitidis
MNIVKKYAVKAVLAAGIFTPAIVMADTFDASAIGTQVANVIMGFVSMVSAVGMAAITVILAIQGFKMAWSMIKSVR

SEQ ID NO: 19176 - protein, 190 aa, Neisseria meningitidis; identical to SEQ ID NO: 12790

SEQ ID NO: 19177 - protein, 156 aa, Neisseria meningitidis; identical to SEQ ID NO: 681

SEQ ID NO: 19178 - protein, 522 aa, Neisseria meningitidis
MKHRTFFSLCAKFGCLLALGACSPKIVDTGAATVPHTLSTLKTADNRPASVYLKKDKPTLIKFWASWCPLCLSELGQTEKWAQDAKFSSANLITVASPGFLHEKKDGDFQKWYAGLNYPKLPVVTDNGGTIAQSLNISVYPSWALIGKDGDVQRIVKGSINEAQALALIRDPNADLGSLKHSFYKPDTQKKDSKIMNTRTIYLAGGCFWGLEAYFQRIDGVVDAVSGYANGNTKNPSYEDVSYRHTGHAETVKVTYDADKLSLDDILQYFFRVVDPTSLNKQGNDTGTQYRSGVYYTDPAEKAVIAAALKREQQKYQLPLVVENEPLKNFYDAEEYHQDYLIKNPNGYCHIDIRKADEPLPGKTKTAPQGKGFDAATYKKPSDAELKRTLTEEQYQVTQNSATEYAFSHEYDHLFKPGIYVDVVSGEPLFSSADKYDSGCGWPSFTRPIDAKSVTEHDDFSFNMRRTEVRSHAADSHLGHVFPDGPRDKGGLRYCINGASLKFIPLEQMDAAGYGALKSKVK

SEQ ID NO: 19179 - protein, 300 aa, Neisseria meningitidis
MDSLMTLISVLIPMFAGFFIRVPKPYLPALDKVLSVLVYAVLLLIGVSLSRVEDLGSRLDDMALTVLWLFVCTVGTNLLALAVLGKLFPWRIKGKGKGVSVGVSGSVGQLGCVLLGFASGKLMRDIWMPSESAGMYCLMLLVFLIGVQLKSSGLSLRQVLVNRRGIRLSVWFMLSSLSGGLLFAASADGVSWTKGLAMASGFGWYSLSGLVMTEAYGAVWGSIMLLNDLARELFALAFIPLLMKRFPDAAVGVGGATSMDFTLPVIQGAGGLEVVPVAVSFGVVVNIAAPFLMVVFSTLG

SEQ ID NO: 19180 - protein, 363 aa, Neisseria meningitidis
MSLKCGIVGLPNVGKSTLFNALTQSGIEAANYPFCTIEPNVGIVEVPDPRMVELAKIVNPQKMQPAIVEFVDIAGLVAGASKGEGLGNQFLANIRETDAIVNVVRCFDDDNIVHVSGKVDPIADIETIGTELALADLASVEKAIVREEKRARSGDKDAQKLVDLCKKLLPHLDEGKPVRSFGLDAEERAMLKPLFLLTAKPAMYVGNVAEDGFENNPHLDRLKELAAKENAPVVAVCAAMESEIAELEDDEKAEFLAEMGLEEPGLNRLIRAGYDLLGLQTYFTAGVKEVRAWTIHKGDTAPQAAGVIHTDFERGFIRAQVISYDDFVSLGGEAKAKEAGKMRVEGKEYVVQDGDVMHFLFNV

SEQ ID NO: 19181 - protein, 962 aa, Neisseria meningitidis
MSNTTVEQFAAELKRPVEDLLKQLKEAGVSKNSGSDSLTLDDKQLLNAYLTKKNGSNGGTISIRRTKTEVSTVDGVKVETRKRGRTVNIPSAEELAAQVKAAQTQAAPVRPEQTAEDAAKARAEAAARAEARAKAEAEAAKLKAAKAGNKAKPAAQKPTEAKAETAPVAAETKPAEESKAEKAQADKMPSKKPAEPKEKAAKPKHERNGKGKDAKKPAKPAAPAVPQPVVSAEEQAQRDEEARRAAALRAHQEALLKEKQERQARREAMKQQAEQQAKAAQEAKNGRQRPAKPAEKPQAAAPAVENKPVNPAKAKKEDRRNRDDEGQGRNAKGKGGKGGRDRNNARNGDDERVRGGKKGKKLKLEPNQHAFQAPTEPVVHEVLVPETITVADLAHKMAVKGVEVVKALMKMGMMVTINQSIDQDTALIVVEELGHIGKPAAADDPEAFLDEGAEAVEAEALPRPPVVTVMGHVDHGKTSLLDYIRRTKVVQGEAGGITQHIGAYHVETPRGVITFLDTPGHEAFTAMRARGAKATDIVILVVAADDGVMPQTIEAIAHAKAAGVPMVVAVNKIDKEAANPERIRQELTAHEVVPDEWGGDVQFIDVSAKKGLNIDALLEAVLLEAEVLELTAPVDAPAKGIIVEARLDKGRGAVATLLVQSGTLKKGDMLLAGTAFGKIRAMVDENGKSITEAGPSIPVEILGLSDVPNAGEDAMVLADEKKAREIALFRQGKYRDVRLAKQQAAKLENMFNNMGETQAQSLSVIIKADVQGSYEALAGSLKKLSTDEVKVNVLHSGVGGITESDVNLAIASGAFIIGFNVRADASSRKLAENENVEIRYYNIIYDAIDDVKAAMSGMLSPEEKEQVTGTVEIRQVISVSKVGNIAGCMVTDGVVKRDSHVRLIRNNVVIHTGELASLKRYKDDVKEVRMGFECGLMLKGYNEIMEGDQLECFDIVEVARSL

SEQ ID NO: 19182 - protein, 127 aa, Neisseria meningitidis; identical to SEQ ID NO: 2622

SEQ ID NO: 19183 - protein, 56 aa, Neisseria meningitidis; identical to SEQ ID NO: 2179

SEQ ID NO: 19184 - protein, 96 aa, Neisseria meningitidis; identical to SEQ ID NO: 11797

SEQ ID NO: 19185 - protein, 128 aa, Neisseria meningitidis
LAEGQKSAVTEYYLNHGEWPGNNSDAGVASSTDIKGKYVQSVEVKNGVVTATMASSNVNNEIKGKKLSLWAKRQDGSVKWFCGQPVKRADTDEVTADSGNDKIDTKLKKPFYPISFRTDKAGFPPARE

SEQ ID NO: 19186 - protein, 421 aa, Neisseria meningitidis
MSEALAKETLNPFEIARKQVKTACDRLKTDPAVYEILKSPTRVLEVNFPVKLDDDTVKTFTGYRSQHNNAVGPYKGGVRFHPGVNLDEVKALSIWMTIKCCVAGIPYGGGKGGVTLDPRDYSEAELERIARAYSEAISPLIGEKIDIPAPDVNTNGKIMSWMVDAYENVVKHSAPGVFTGKPVEFGGSLARTEATGYGVNLAAVQALEKLGKDVKGATYAIQGFGNVGYHTGYYAHQSGAKVVAVSTVDVAIYNENGLDMEALFKEFQEKGFITNEAGYGKEITNAELLALDVDVLAPCALENQLTSENAGKVRAKIVVEGANGPTTPEADVILRQNGVLVVPDILANCGGVVVSYFEWVQNLQGYYWEFDEVQEKETVVLRRAFRDIWNLAQEYDVDLRTASYMMSIRRVEKAMKLRGWY

SEQ ID NO: 19187 - protein, 464 aa, Neisseria meningitidis
MTPSALKKTVLLLGTAFAAASAQASGYHFGTQSVNAQSTANAAAAEAADASTIFYNPAGLTKLDSSQISVNANIVFPSIRYEADSATDFTGIPVQGSKSGKITKTTVAPHIYGAYKVNDNLTVGLGVYVPFGSATEYEKDSVLRHNINKLGLTSIAVEPVAAWKLNERHSFGAGIIAQHTSAELRKYADWGIPKKAQMLQATPSNPTAAAQIKADGHADVKGSDWGFGYQLAWMWDINDRARVGVNYRSKVSHTLKGDAEWAADDAMAKQLWNSNMLAPLGYTANEKARVKIVTPESLSVHGMYKVSDKADLFGDVTWTRHSRFDKAELVFEKEKTIVNGKSDRTTITPNWRNTYKVGFGGSYQISEPLQLRAGIAFDKSPVRNADYRMNSLPDGNRIWFSAGMKYHIGKNHVVDAAYTHIHINDTSYRTAKASGNDVDSKGASSARFKNHADIIGLQYTYKFK

SEQ ID NO: 19188 - protein, 400 aa, Neisseria meningitidis
MKNYHAPDEKGVFGEHGGLYVSETLIPALQELADAYKAAKNDPSFWEEFHRDLKHYVGRPSPVYHAARLSEHLGGAQIWLKREDLNHTGAHKVNNTIGQALLAKRMGKKRVIAETGAGQHGVASATVAARFGMTCDVYMGADDIQRQMPNVFRMKLLGANVVGVDSGSRTLKDAMNEAMREWVARVDDTFYIIGTAAGPAPYPEMVRDFQCVIGNEAKEQMLEAIGRQPDVAVACVGGGSNAIGLFHPYIGEENVRLVGVEAGGLGVNTPDHAAPITSGSPIGVLHGFRSYLMQDENGQVLGTHSVSAGLDYPGIGPEHSHLHDIKRVEYTVAKDDEALEAFDLLCRFEGIIPALESSHAVAWAVKNAPKMGKDQVILVNLSGRGDKDINTVAKLKGIKL

SEQ ID NO: 19189 - protein, 540 aa, Neisseria meningitidis
MKTKEFLKSLAELAASLRQVIEAEVDGFDASPKAIAARRAKVFDPVGGYEYFVNTYFPHYIRSPEKSELHAFLFSRLPEIIRSPKGENEAVGAPRGEGKSTQVTQLFTLWCIVTGQKHYAVIVMDSIDQAYPMLEAIKAELEFNPRLKTDFPEVCGQGRVWQAGTIVTANDVKVQVAGSGKKLRGLRHGPYRPDLTILDDIENDEQVRNPEQRDKLNAWLTKTVLPLGGVGQKYDVIYIGTILHYDSVLNRTLNNPFWHGIKFKAMKRWPDRMDLWDRWEELFRNDGETVAEAFYLANKDEMERGAQTSWAARGVLALMKIRARDGHATFDSEYQNDPVSGEDAPFAKSMKFWNDLPSDLVYFGALDPSLGKAGASRDPSAIIIGGYQRETGKLYVVEAQIKKRLPDLIIEDVIRLHRQYRCKLWFVETVQFQEFLKDELVKRSAARGIPVPARAVKPVSDKLLRIETLQPHMANGLILLNESQQTLIQQFRHFPKADHDDGPDAVHMLWSGAVANCVPIEWQSPTDNDFDDEIKSKWSR

SEQ ID NO: 19190 - protein, 442 aa, Neisseria meningitidis; identical to SEQ ID NO: 2771

SEQ ID NO: 19191 - protein, 203 aa, Neisseria meningitidis
MRRTALLLLALTAGTSLAAGFNQKDTPINTRYRETPEEAAAREFKEHTAKLPPLPDTHSDGWFDIYVDENYGKQPKILLDSLQIMPAPDGSIRYILNIRSDKGYDNLTAEGIFCARFSIRFGNGKPSSYKVFGYGDTVNRRWIQPRNAEWKPIGGTLSRNDALRTVLYQAFCEGGVPADTKGLVQRLKERAGRYAPSMKPHDK

SEQ ID NO: 19192 - protein, 343 aa, Neisseria meningitidis
MLQTDNLTAAQPQRIVAAQTASAQEELLERALRPKTLDDYIGQHKAKEQLAIFIQAAKKRGEALDHVLLFGPPGLGKTTLAHIIAKELGVNLRQTSGPVLERAGDLAALLTNLDPHDVLFIDEIHRLSPVVEEILYPALEDYRLDIMIGEGPAARSVKIDLPPFTLIGATTRAGMLTNPLRDRFGIVSRLEFYENRDLTTIVSRSAQLLQLDMSEEGAEEIAKRSRGTPRIANRLLRRVRDFADVKNNGTIDGGIADAALSMLDVDAQGLDVMDRKFLEAVLHKFGGGPVGLDNVAAAIGESTDTIEDVIEPYLIQQGFLQRTPRGRMATERAYLHFGLPVEK

SEQ ID NO: 19193 - protein, 94 aa, Neisseria meningitidis; identical to SEQ ID NO: 1124

SEQ ID NO: 19194 - protein, 242 aa, Neisseria meningitidis; identical to SEQ ID NO: 5117

SEQ ID NO: 19195 - protein, 271 aa, Neisseria meningitidis; identical to SEQ ID NO: 3345

SEQ ID NO: 19196 - protein, 162 aa, Neisseria meningitidis
LTQPAEFSDYQRVYLDETGFDRHLFRPYARSLKGQIVKAQISGKRYRRLSLVSAQVGNRLIAPMVYQNTMTGVFFEAWFQQCLLPALTQKSVIILDNARFHRMGVLREMAEKLGHKVLPLAPYSPELNPIEKVWANIKRYLRTVLSDYARFDDALLSYFDFN

SEQ ID NO: 19197 - protein, 294 aa, Neisseria meningitidis
MTSIILELQSLAANPNSDVEELVSKTLMVARKLKINELTEWCNNELQGYSSKNLPKYRIFYGELKAFNPYRGDVPFMLPDELRERVTRVEYTSSISEIRNLLKTKNNNFIRILSSKEKQFLMNLQDTPFPLEPKIIIYPINLMNIQSKVRQLILAWALRLEEEGILGDGIQFTKSKQEKAMSNQFNIQNMQGFIGDIFGGNVQQNIQDGIHIEKENFNKLANFLAKNGIPSAELEDLRNALIEDGQPTDKKFGSKVSAWIGNIITKASTGAIDVSVGTIAGILTNAISKYYGLM

SEQ ID NO: 19198 - protein, 405 aa, Neisseria meningitidis; identical to SEQ ID NO: 13355

SEQ ID NO: 19199 - protein, 655 aa, Neisseria meningitidis; identical to SEQ ID NO: 9708

SEQ ID NO: 19200 - protein, 253 aa, Neisseria meningitidis; identical to SEQ ID NO: 15245

SEQ ID NO: 19201 - protein, 140 aa, Neisseria meningitidis; identical to SEQ ID NO: 4408

SEQ ID NO: 19202 - protein, 52 aa, Neisseria meningitidis; identical to SEQ ID NO: 7295

SEQ ID NO: 19203 - protein, 245 aa, Neisseria meningitidis
MLSARYLHLHEALGLGPMWLKQAAAVLPPKNTPATPAQARPQTVRAALIRPSQPHNGQARLETMKALETAAVPTRKPAPETETPLPGLSDGIAPVPAASGITKLAVVSLCPPIEDAIYGQLFHGKAGVLLDNILKAVGLDAAYVHKTCWVKTAAVGNPMPSEAAIETATVSVMQELDGCRAPAVLFLGQAFVNPERQAMIETLCGSRPFFIIDHPARLLRQPELKARAWQVLKQLKRALRQGGGS

SEQ ID NO: 19204 - protein, 514 aa, Neisseria meningitidis
MMTEMQQRAQLHRQIWKIADEVRGAVDGWDFKQYVLGTLFYRFISENFTDYMQAGDSSIDYAAMPDSIITPEIKDDAVKVKGYFIYPSQLFCNIAAEAHQNEELNTKLKEIFTAIESSASGYPSEQDIKGLFDDFDTTSSRLGSTVADKNKRLAAVLKGVAELDFGSFEDHHIDLFGDAYEYLISNYAANAGKSGGEFFTPQSVSKLIARLAVHGQEKVNKIYDPACGSGSLLLQAKKQFDEHIIEEGFFGQEINHTTYNLARMNMFLHNVNYNKFHIELGDTLTNPKLKDSKPFDAIVSNPPYSINWIGSDDPTLINDDRFAPAGVLAPKSKADFAFILHALNYLSGRGRAAIVSFPGIFYRGGAEQKIRQYLVEGNYVETVIALAPNLFYGTGIAVNILVLSKHKDNTDIQFIDAGSFFKKETNNNVLTEEHIADIVKLFADKADVPHIAQNAAQQTVKDNGYNLAVSSYVEPEDTREIIDIKQLNAEIGETVAKIERLRREIDEVIAEIEA

SEQ ID NO: 19205 - protein, 307 aa, Neisseria meningitidis; identical to SEQ ID NO: 1349

SEQ ID NO: 19206 - protein, 241 aa, Neisseria meningitidis
MSEGMMSPVLYLIPTPLGTPDTPCLLPHEQQAIVGLTDFVVEAEKTARAHLKHLGVTMPIRELNLQTLNEHTDLKTLLELLKPLQEGRSMGIVSEAGCPAVADPGANLVALAHKHGFEVRPLVGPSSLLLALMASGANGQSFAFKGYLPSEKNERIQSLKALEQRSRQQNETQLFIETPYRNDVLLADAVENLHSETRLCTATDLTLPTQEIISQTVVQWRKRKEMPNLKKRPTIFVMYAG

SEQ ID NO: 19207 - protein, 678 aa, Neisseria meningitidis
MTDNALLHLGEEPRFDQIKTEDIKPALQTAIAEAREQIAAIKAQTHTGWANTVEPLTGITERVGRIWGVVSHLNSVADTPELRAVYNELMPEITVFFTEIGQDIELYNRFKTIKNSPEFDTLSPAQKTKLNHDLRDFVLSGAELPPEQQAELAKLQTEGAQLSAKFSQNVLDATDAFGIYFDDAAPLAGIPEDALAMFAAAAQSESKTGYKIGLQIPHYLAVIQYADNRELREQIYRAYVTRASELSDDGKFDNTANIDRTLANALQTAKLLGFKNYAELSLATKMADTPEQVLNFLHDLARRAKLYAEKDLAEVKAFARESLNLADLQPWDLGYASEKLREAKYAFSETEVKKYFPVGKVLNGLFAQIKKLYGIGFTEKTVPVWHKDVRYFELQQNGETIGGVYMDLYAREGKRGGAWMNDYKGRRRFSDGTLQLPTAYLVCNFAPPVGGREARLSHDEILILFHETGHGLHHLLTQVDELGVSGINGVEWDAVELPSQFMENFVWEYNVLAQMSTHEETGEPLPKELFDKMLAAKNFQRGMFLVRQMEFALFDMMIYSEDDEGRLKNWQQVLDSVRKEVAVIQPPEYNRFALSFGHIFAGGYSAGYYSYAWAEVLSADAYAAFEESDDVAATGKRFWQEILAVGGSRSAAESFKAFRGREPSIDALLRHSGFDNAA

SEQ ID NO: 19208 - protein, 148 aa, Neisseria meningitidis; identical to SEQ ID NO: 4019

SEQ ID NO: 19209 - protein, 133 aa, Neisseria meningitidis; identical to SEQ ID NO: 2967

SEQ ID NO: 19210 - protein, 333 aa, Neisseria meningitidis
MLAEEVFGFGLYKESKGSGGRFYERCWLMGSEDVLYGRVHFGGQNNTILFELTGTGCGVAKEGWESRLFAFLTNAIRPKITRVDIAKDFFNGEYSPNQAREDRNKGMFTCHHVKPKGECLGSDWEEDDEAKMTKGKTYGIGSRESSKYVRVYEKGKQLGDKTSTWTRFEIEFKAKDIVIPFEVLQNPGEYFGGAYPICERFVQKATRIHAVKEDKVISADRYLEWVKKQFGRAANGLKFIFPELDKAKLFELIEPSHHKLPKSLAPEAYDCAFLKAQAIHEQPAFKPYKDPYYMYEYYENLEKQLEQQKHVNNEESYNNFIYDKFARLPISWA

SEQ ID NO: 19211 - protein, 580 aa, Neisseria meningitidis
MKFFPAPCLLVILAVIPLKTLAADENDAELIRSMQRQQHIDAELLTDANVRFEQPLEKNNYVLSEDETPCTRVNYISLDDKTVRKFSFLPSVLMKETAFKTGMCLGSNNLSRLQKAAQQILIVRGYLTSQAIIQPQNMDSGILKLRVSAGEIGDIRYEEKRDGKSAEGSISAFNNKFPLYRNKILNLRDVEQGLENLRRLSSVKTDIQIIPSEEEGKSDLQIKWQQNKPIRFSIGIDDAGGKTTGKYQGNVALSFDNPLGLSDLFYVSYGRGLAHKTDLTDATGTETASGSRSYSVHYSVPVKKWLFSFNHNGHRYHEATEGYSVNYDYNGKQYQSSLAAERMLWRNRLHKTSVGMKLWTRQTYKYIDDAEIEVQRRRSAGWEAELRHRAYLNRWQLDGKLSYKRGTGMRQSMPAPEENGGGTIPGTSRMKIITAGLDAAAPFMLGKQQFFYATAIQAQWNKTPLVAQDKLSIGSRYTVRGFDGEQSLFGERGFYWQNTLTWYFHPNHQFYLGADYGRVSGESAQYVSGKQLMGAVVGFRGGHKVGGMFAYDLFAGKPLHKPKGFQTTNTVYGFNLNYSF

SEQ ID NO: 19212 - protein, 419 aa, Neisseria meningitidis
MLPVRFTRVSDGIKRLTPASNQTAFYHPFENPFCRYSSFYWSIAIMTATTASSAKPYLKIQGLVKKFGDNYAVDNIDLDIYQHEIFALLGSSGSGKSTLLRMLAGMESPNQGKIILDGQDITKLAPYDRPINMMFQSYALFPHMTVEQNIAFGLKQDKMPKGEIAARVEEMLRLVQMTKFAKRKPHQLSGGQQQRIALARSLAKRPKILLLDEPLGALDKKLRQQTQLELVNTLEQVGVTCIMVTHDQEEAMTMATRIAIMSDGQLQQVGTPSDVYDYPNSRFTAEFIGETNIFDGVVIEDHADYAVIECEGLENHVRIDHGLGGPSEQDLWVSIRPEDIDLYKEKPEYLGDYNWAKGTVKEIAYLGSFAIYHIKLANGRVVKSQVPAPYWYVRNITPPTWDETVYISWPENQPTPLFR

SEQ ID NO: 19213 - protein, 253 aa, Neisseria meningitidis; identical to SEQ ID NO: 4991

SEQ ID NO: 19214 - protein, 87 aa, Neisseria meningitidis; identical to SEQ ID NO: 1364

SEQ ID NO: 19215 - protein, 1463 aa, Neisseria meningitidis
MKTTDKRTTETHRKAPKTGRIRFSPAYLAICLSFGILPQAWAGHTYFGINYQYYRDFAENKGKFAVGAKDIEVYNKKGELVGKSMTKAPMIDFSVVSRNGVAALVGDQYIVSVAHNGGYNNVDFGAEGSNPDQHRFSYQIVKRNNYKAGTKGHPYGGDYHMPRLHKFVTDAEPVEMTSYMDGWKYTDQNNYPDRVRIGAGRQYWRSDEDEPNNRESSYHIASAYSWLVGGNTFAQNGSGGGTVNLGSEKIKHSPYGFLPTGGSFGDSGSPMFIYDAQKQKWLINGVLQTGNPYIGKSNGFQLVRKNWFYDEIFTGDTHSVFYEPHQNGKYTFHDNNNGTGKINAKHEHNSLPNRLKTRTVQLFNVSLSETAREPVYHAAGGVNSYRPRLNNGENISFIDEGKGELILTSNINQGAGGLYFQGDFTVSPENNETWQGAGVHISEDSTVTWKVNGVANDRLSKIGKGTLHVQAKGENQGSISVGDGTVILDQQADDKGKKQAFSEIGLVSGRGTVQLNADNQFNPDKLYFGFRGGRLDLNRHSLSFHRIQNTDEGAMIVNHNATTTSTVTITGNESITQPSGKNINRLNYSKEIAYNGWFGEKDATKTNGRLNLVYQPAAEDRTLLLSGGTNLNGNITQTNGKLFFSGRPTPHAYNHLNNHWSQKEGIPHGEIVWDNDWINRTFKAENFHIQGGQAVISRNVAKVEGDWHLSNHAQAVFGVAPHQSHTICTRSDWTGLTNCVENTITDDKVIASLTNTDISGNVDLADHAHLNLTGLATLNGNLTAGGDTHYEVTHNATQRGNLSLVGNAQATFNQATLNGNTSASGNASFNLSNNAVQNGSLTLSGNAKANVSHSALNGNVSLADKAVFHFENSRLTGQISGGKDTALHLKDSEWTLPSGTELGNLNLDNATITLNSAYRHDAAGAQTGSVSDTPRRRSRRSRRSLLSVTPPTSAESRFNTLTVNGKLNGQGTFRFMSELFGYRSDKLKLAESSEGTYTLAVNNTGNEPASLEQLTVVEGKDNKPLSENLNFTLQNEHVDAGAWRYQLIRKDGEFRLHNPVKEQELSDKLGKAEAKKQAGKDNAQSLDALIAAGRDAVEKTESVAEPARQAGGENVGIMQAEEEKKRVQADKDSALAKQREAETRPATTAFPRARRARRDLPQPQPQPQPQPQPQPQRDLISRYANSGLSEFSATLNSVFAVQDELDRVFAEDRRNAVWTSGIRDTKHYRSQDFRAYRQQTDLRQIGMQKNLGSGRVGILFSHNRTENTFDDGIGNSARLAHGAVFGQYGIDRFYIGISAGAGFSSGSLSDGIGGKIRRRVLHYGIQARYRAGFGGFGIEPHIGATRYFVQKADYRYENVNIATPGLSFNRYRAGIKADYSFKPAQHISITPYLSLSYTDAASGKVRTRVNTAVLAQDFGKTRSAEWGVNAEIKGFMLSLHAAAAKGPQLEAQHSAGIKLGYRW

SEQ ID NO: 19216 - protein, 445 aa, Neisseria meningitidis
MSNHTSWSSKIGFVLAAAGSAIGLGAIWKFPYTAGTNGGAVFFLLFLIFTILVALPVQLAEFYIGRTGGKNAVDSFRALRPGTQWLWVGRMGVAACFILLSFYSVVGGWVLNYVVHSFTGAIHAGADFEALFGTTISNPAGSLSYQALFMLITVWVVKGGISDGIEKANRYLMPGLFILFIALAIRSLTLPGAMEGVSFLLKPNWSYFKADTMITALGQAFFALSIGVSAMITYASYLGKDQDMFRSGHTIMWMNLLVSLLAGLVIFPAVFAFGFEPSQGPGLIFIVLPAVFMKMPFGTVLFAVFMLLVVFATLTSAFSMLETVIASTIRQDERKRKKHTWLIGTAIFIVGIPSALSFGVWGEFKVFGKTIFDLWDYVISAVIMPIGALSVSIFTAWIQDKQSVLKDAGSGSTVPRAVLLLWLNTLRYLAPIAIIIVFINSLGIL

SEQ ID NO: 19217 - protein, 178 aa, Neisseria meningitidis; identical to SEQ ID NO: 1831

SEQ ID NO: 19218 - protein, 397 aa, Neisseria meningitidis; identical to SEQ ID NO: 5534

SEQ ID NO: 19219 - protein, 163 aa, Neisseria meningitidis; identical to SEQ ID NO: 6300

SEQ ID NO: 19220 - protein, 316 aa, Neisseria meningitidis; identical to SEQ ID NO: 6611

SEQ ID NO: 19221 - protein, 269 aa, Neisseria meningitidis
MIQDTRPLIRVVAGILLNRDGDYLLSSRPEGKPYAGYWEFAGGKVEAGETDFQALQREFEEELGIRILAATPWLTKIHSYEHARVCLKFLWVNPGQWTGEPQSREGQEWSWQKAGDFTVAPMLPANGALLRSLSVPRRLYGSLKTGLHGENSMGAYRVLPLGSAEGSGANVLMEAAQWQDRPEHADSVWMMVQTREQWRQAQEKGADVVVWRVCNDVQAQEAAEALRQGVSVPLVLAANGQTVARYGKLWLGLGAHVVVRDETIGKNHE

SEQ ID NO: 19222 - protein, 451 aa, Neisseria meningitidis
MKAPELLLPAGGLERMRSAYDYGADAVYAGSPRYSLRARNNEFAKLDVLEQGIKEAHERNKKFFLTVNTLPHNSKLKTFVSDMEPLIAMKPDALIMADPGLIMTVREKWPEMPIHLSVQANTTNYWGVKFWQNIGVERIILSRELSMEEIAEIRQECPDIELEVFIHGALCIAYSGRCLLSGYFNHRDPNQGTCTNSCRWDYKVHNATESDAGDAQLLQGFNFEKAQEEANQNFEGINGQKRHPYADKVFLIEESNRPGEMMPIMEDEHGTYIMNSKDLRGIEVVEKLAKIGVDSLKVEGRTKSLYYVARVAQSYRKAIDDAVAGRPFDYSLLSELEGLANRGYTSGFLERHQTQDYQNYLTGHSIAKQSQYVGHVTEIDENGWATIEVKNRFAIGDSLEIIHPNGNQTIKLEQMARKGQPVDVAPGNGIQVKIPDMQGKEKALIARVLNP

SEQ ID NO: 19223 - protein, 310 aa, Neisseria meningitidis; identical to SEQ ID NO: 8806

SEQ ID NO: 19224 - protein, 78 aa, Neisseria meningitidis; identical to SEQ ID NO: 1464

SEQ ID NO: 19225 - protein, 592 aa, Neisseria meningitidis
MTVLKPSHWRVLAELADGLPQHVSQLARMADMKPQQLNGFWQQMPAHIRGLLRQHDGYWRLVRPLAVFDAEGLRELGERSGFQTALKHECASSNDEILELARIAPDKAHKTICVTHLQSKGRGRQGRKWSHRLGECLMFSFGWVFDRPQYELGSLSPVAAVACRRALSRLGLDVQIKWPNDLVVGRDKLGGILIETVRTGGKTVAVVGIGINFVLPKEVENAASVQSLFQTASRRGNADAAVLLETLLVELDAVLLQYARDGFAPFVAEYQAANRDHGKAVLLLRDGETVFEGTVSGVDEKGILHLDTGDGRQTVVSGEISLRPDDRPVSVPKKREPERFLLLDGGNSRLKWAWVENGTFATVGSAPYRDLSPLGAEWAEKADGNVRIVGCAVCGEFKKAQVQEQLARKIEWLPSSAQALGIRNHYRHPEEHGSDRWFNALGSRRFSRNACVVVSCGTAVTVDALTDDGHYLGGTIMPGFHLMKESLAVRTANLNRHAGKRYPFPTTTGNAVASGMMDAVCGSVMMMHGRLKEKTGAGKPVDVIITGGGAAKVAEALPPAFLAENTVRVADNLVIHGLLNLIAAEGGESEHT

SEQ ID NO: 19226 - protein, 240 aa, Neisseria meningitidis; identical to SEQ ID NO: 551

SEQ ID NO: 19227 - protein, 122 aa, Neisseria meningitidis
MRHYEIVFIVHPDQSEQVPAMVERYKTMIAEANGKIHRLEDWGRRQLAYPINKIHKAHYVLMNIETTPEVVEELETAFRFNDAVLRHLTIKTKHAVTEASPMLGGEKAKNLLSGASEEAAAQ

SEQ ID NO: 19228 - protein, 170 aa, Neisseria meningitidis; identical to SEQ ID NO: 1571

SEQ ID NO: 19229 - protein, 386 aa, Neisseria meningitidis
LKTNMPTMGAEMNTRNMRYILLTGLLPTVSAFGETALQCAALTDNVTRLACYDRIFAAQLPSSAGQEGQESKAVLNLTETVRSSLDKGEAVIVVEKGGDALPADSAGETADIYTPLSLMYDLDKNDLRGLLGVREHNPMYLMPLWYNNSPNYAPGSPTRGTTVQEKFGQQKRAETKLQVSFKSKIAEDLFKTRADLWFGYTQRSDWQIYNQGRKSAPFRNTDYKPEIFLTQPVKADLPFGGRLRMLGAGFVHQSNGQSRPESRSWNRIYAMAGMEWGKLTVIPRVWVRAFDQSGDKNDNPDIADYMGYGDVKLQYRLNDRQNVYSVLRYNPKTGYGAIEAAYTFPIKGKLKGVVRGFHGYGESLIDYNHKQNGIGIGLMFNDLDGI

SEQ ID NO: 19230 - protein, 177 aa, Neisseria meningitidis
MSRVAKNPVTVPAGVEVKFGTEALVIKGKNGELSFPLHSDVAIEFNDGKLTFVANNSSKQANAMSGTARALVSNMVKGVSEGFEKRLQLIGVGYRAQAQGKILNLSLGFSHPIVYEMPEGVSVQTPSQTEIVLTGSDKQVVGQVAAEIRTFRAPEPYKGKGVRYVGEVVVMKEAKKK

SEQ ID NO: 19231 - protein, 492 aa, Neisseria meningitidis
MFKRSVIAMACIFALSACGGGGGGSPDVKSADTLSKPAAPVVSEKETEAKEDAPQAGSQGQGAPSAQGGQDMAAVSEENTGNGGAAATDKPKNEDEGAQNDMPQNAADTDSLTPNHTPASNMPAGNMENQAPDAGESEQPANQPDMANTADGMQGDDPSAGGENAGNTAAQGTNQAENNQTAGSQNPASSTNPSATNSGGDFGRTNVGNSVVIDGPSQNITLTHCKGDSCSGNNFLDEEVQLKSEFEKLSDADKISNYKKDGKNDGKNDKFVGLVADSVQMKGINQYIIFYKPKPTSFARFRRSARSRRSLPAEMPLIPVNQADTLIVDGEAVSLTGHSGNIFAPEGNYRYLTYGAEKLPGGSYALRVQGEPSKGEMLAGTAVYNGEVLHFHTENGRPSPSRGRFAAKVDFGSKSVDGIIDSGDGLHMGTQKFKAAIDGNGFKGTWTENGGGDVSGKFYGPAGEEVAGKYSYRPTDAEKGGFGVFAGKKEQD

SEQ ID NO: 19232 - protein, 216 aa, Neisseria meningitidis; identical to SEQ ID NO: 4887

SEQ ID NO: 19233 - protein, 240 aa, Neisseria meningitidis
MPETGFRAFLRQMPSETTKQRFRWHPFQKRTIMKNIVILISGRGSNMQAIVNAAIPNVRIAAVLSNSETAAGLQWAAGQGIPTDSLNHKNFESRLAFDTAMMEKIDAYQPDLVVLAGFMRILTPEFCAHYEGRLMNIHPSVLPSFTGLHTHERALEAGCRVAGCTIHFVTAELDCGPIVSQGIVPILDGDTADDVAARVLAVEHKLYPKAVADFAAGRLIIEGNRVRNSENADAARFLTA

SEQ ID NO: 19234 - protein, 301 aa, Neisseria meningitidis; identical to SEQ ID NO: 7688

SEQ ID NO: 19235 - protein, 392 aa, Neisseria meningitidis
MAKMMKWAAVAAVAAAAVWGGWSYLKPEPQAAYITETVRRGDISRTVSATGEISPSNLVSVGAQASGQIKKLYVKLGQQVKKGDLIAEINSTSQTNTLNTEKSKLETYQAKLVSAQIALGSAEKKYKRQAALWKENATSKEDLESAQDAFAAAKANVAELKALIRQSKISINTAESELGYTRITATMDGTVVAILVEEGQTVNAAQSTPTIVQLANLDMMLNKMQIAEGDITKVKAGQDISFTILSEPDTPIKAKLDSVDPGLTTMSSGGYNSSTDTASNAVYYYARSFVPNPDGKLATGMTTQNTVEIDGVKNVLIIPSLTVKNRGGKAFVRVLGADGKAAEREIRTGMRDSMNTEVKSGLKEGDKVVISEITAAEQQESSERALGGPPRR

SEQ ID NO: 19236 - protein, 125 aa, Neisseria meningitidis; identical to SEQ ID NO: 1050

SEQ ID NO: 19237 - protein, 128 aa, Neisseria meningitidis; identical to SEQ ID NO: 605

SEQ ID NO: 19238 - protein, 352 aa, Neisseria meningitidis
MRPLNVQIRLGNLRHNYRILKEMHGGKLLAVVKADAYGHGAVRCAFALADLADGFAVATIDEGIRLRESGITHPIVLLEGVFEASEYEAVEQYSLWPAVGNQWQLEALLSRHWKKPVKVWLKMDSGMHRTGFFPHDYASAYAALKQSEYVDSIVKFSHFSCADEPESGITEIQMEAFDLGTEGLEGEESLANSAAILNVPEARRDWGRAGLALYGISPFGGSDDRLKPVMRLSTRIFGERVLQPHSPIGYGATFYTSKSTRVGLIACGYADGYPRRAPSNSPVAVDGKLTRVIGRVSMDMMTIELDASQEGLGHEVELWGDTVNINTVAEAAGTIPYELMCNIKRAKFTYIE

SEQ ID NO: 19239 - protein, 167 aa, Neisseria meningitidis
MSDEFNQFINRVLSHEGGYVNHPKDPGGETNWGITKRTAMANGFNGSMRAMTREQAIGIYRKAFWERYRADQMPEAVAFQFFDACVNHGYGNAARMLQRAAGVADDGIIGEISLKAINSLPENDLLLRFNAERLVFYTKLGTFTSFGKGWVRRVAQNLIHASADNTD

SEQ ID NO: 19240 - protein, 165 aa, Neisseria meningitidis
MNSLPIADLLVSAVIAACIVISTMRGVITEAGSMAAWVVSFFFAKLFAAPFADIAFASFQPRLFALALSFISLFVIACLIQKILRSLLTGAVSAVGLGFANRILGGVFGALKGILIITLLVMLASKTDLPDTEEWRQSYTLPFFVSLSEAVLNHSGGTAETPEDD

SEQ ID NO: 19241 - protein, 335 aa, Neisseria meningitidis
MYSNNAITNNRNNITLGAYRDAIISIFSDENVVRAIGTINSMYEEYLTLSHKIDQRAFLREGERLSAKAREFQRTAEEAQKSLKEGIGRAASKFRGNSKEAFVARKVQSDLQKALNASNYNKQQYARRAATALENASKSKVMAANLGKFTYGATVAMGTLSMGSAWWKALDEEGNWSDVGLSSASFLGGLMGFQWGAALGVGAFGLLTGGAGWLVVGTIIGGGSGAWWGSLGAEKAWRWFEDFLNLNRSDKFHVTDPLALDLDGDSIETVATKGLAGALFDHRSQGIRTATGWIAAYDGFPVRKLNSNGGIISTTDTIFQSLHTWLDHQPNDTCH

SEQ ID NO: 19242 - protein, 216 aa, Neisseria meningitidis; identical to SEQ ID NO: 3431

SEQ ID NO: 19243 - protein, 278 aa, Neisseria meningitidis
MQIIHTIRELRAWRKNAGKVAFVPTMGNLHEGHLELVREAKKRADSVVVSIFVNRLQFGQGEDFDKYPRTLQQDADKLEAEGVAVVFAPDEKELYPNVEQRYNVEPPNLQNELCGKFRPGHFRGVATVVSKLFNIVAPDVACFGKKDYQQLAVIKGLTEDLNFDVEIVPVDTGRAEDGLALSSRNQYLSAAERDEAPRLYRELKAVAESLAQGSLDYAGLERQAADHLTAAGWVVDYVEIRRADTLEVARAGDKKLVVLAAARLGTTRLIDNLEIKLP

SEQ ID NO: 19244 - protein, 56 aa, Neisseria meningitidis; identical to SEQ ID NO: 2971

SEQ ID NO: 19245 - protein, 207 aa, Neisseria meningitidis
MGKKCGRKNATRRRVKAMPSVELLLEIVGLPRGTFYYQLAVQSAEDKYADLKRHIHDIYRRHKGRYGYRRIAAAILHAGTPVNHKKVSRLMAKTGLKAVIRRRKYRSFKGEVGKIAPNILRRCFHAEKPNEKWVTDVTEFNVGGEKIYLSPIMDLFNGEIVSYRIQIRPTFDLAGEILKGAPEKPGSSEKPILHSDQGWQYQMFFYS

SEQ ID NO: 19246 - protein, 642 aa, Neisseria meningitidis
MAKVIGIDLGTTNSCLAISENGQTKVIENAEGARTTPSVIAYLDGGEILVGAPAKRQAVTNAKNTIYAAKRLIGHKFEDKEVQRDIESMPFEIIKANNGDAWVKAQGKELSPPQISAEVLRKMKEAAEAYLGEKVTEAVITVPAYFNDSQRQATKDAGRIAGLDVKRIINEPTAAALAFGMDKGDNKDRKVAVYDLGGGTFDISIIEIANLDGDKQFEVLATNGDTFLGGEDFDQRLIDHIIAEFKKEQGIDLKQDVMALQRLKEAAEKAKIELSSGQQTEINLPYITMDATGPKHLAMKITRAKFESLVEDLITRSIEPCKIALKDAGLSTGDIDDVILVGGQSRMPKVQEAVRDFFGKEPRKDVNPDEAVAVGAAIQGEVLSGGRSDVLLLDVTPLSLGIETMGGVMTKLIQKNTTIPTKASQVFSTAEDNQSAVTIHVLQGERERASANKSLGQFNLGDIAPAPRGMPQIEVTFDIDANGILHVSAKDKGTGKAANITIQGSSGLSEEEIERMVKDAEANAEEDKKLTELVASRNQAEALIHSVKKSLADYGDKLDAAEKEKIEAALKEAEEAVKGDDKAAIDAKTEALGTASQKLGEMVYAQAQAEAQAGESEQANASAKKDDDVVDADFEEVKDDKK

SEQ ID NO: 19247 - protein, 186 aa, Neisseria meningitidis
VGIQDEKSPETVLPDKFPHRQVWIPACAGMTMQVFLTIPGYDVEAEIEKFVWMDAVIWQMPGWWMHEPWTVKKYIDGVLTAGHGKLYQSDGRHSVNPTEGYGTGGLLQGKKHMLSLTWNAPIEAFTREGDFFEGKGVDVLYMHFHKANEFLGMTRLPTFLCNDVVKNPQVEKYLADYQAHLEKVFG

SEQ ID NO: 19248 - protein, 110 aa, Neisseria meningitidis
MSLPPCPQCASEYTYEDGGQYICPECAHEWNKTESAAAEAAEEVRDANGAVLQNGDTIILIKDLKVKGSSMTIKQGTKVKGIRLQEGDHNIACKIDGSAMNLKSEFVKKA

SEQ ID NO: 19249 - protein, 460 aa, Neisseria meningitidis
MANIARDIFKAYDIRGIVGKTLTDDAAYLIGRAIAAKAAEKGMTRIALGRDGRLSGPELMEHIQRGFTDSGIDVLNVGMVATPMLYFAAINECGGSGVMITGSHNPPDYNGFKMMLGGDTLAGEAIQELLAIIEKDGFVAADKQGNVTEKDISGEYHNHIVGHIKLKRPMNIAIDAGNGVGGAFAGKLYKGLGNEVTELFCDVDGNFPNHHPDPSKPKNLQDLIAALKNGDAEIGLAFDGDADRLGVVTKDGNIIYPDRQLMLFAQDVLSRNPKAKVIFDVKSTRLLAPWIKEHGGEPVMEKTGHSFIKSSMKKTGAPVAGEMSGHIFFKERWFGFDDGLYAGARLLEILSASDNPSEVLNNLPQSISTPELNIALPEGSNGHQVIDELAAKAEFEGATEIITIDGLRVEFPDGFGLMRASNTTPILVLRFEADTQEAIERIQNQFKAVIESNPNLIWPL

SEQ ID NO: 19250 - protein, 77 aa, Neisseria meningitidis; identical to SEQ ID NO: 760

SEQ ID NO: 19251 - protein, 70 aa, Neisseria meningitidis
VCFSPLHQKFLENRRESAVLVSAGTVEMGNIDGIDGSGGLKPTLVYWNHCIIATNRPAATRAHPRHTTVA

SEQ ID NO: 19252 - protein, 79 aa, Neisseria meningitidis; identical to SEQ ID NO: 3404

SEQ ID NO: 19253 - protein, 188 aa, Neisseria meningitidis; identical to SEQ ID NO: 1721

SEQ ID NO: 19254 - protein, 513 aa, Neisseria meningitidis
MKIGIPRESLSGETRVACTPATVALLGKLGFETVVESGAGLAASLDDAAYQTAGATVADKAAVWACPLIYKVNAPSEQELPLLNEGQTIVSFLWPRQNEALVEALRAKKVNALAMDMVPRISRAQALDALSSMANISGYRAVIEAANAFGRFFTGQITAAGKVPPAQVLVIGAGVAGLAAIGTANSLGAVVRAFDTRLEVAEQIESMGGKFLKLDFPQESGGSGDGYAKVMSDEFIAAEMKLFAEQAKEVDIIITTAAIPGKPAPKLITKEMVESMKSGSVIVDLAAATGGNCELTKPGELFVTDNGVKIIGYTDMANRLAGQSSQLYATNLVNLTKLLSPNKDGEITLDFEDVIIRNMTVTRDGEITFPPPPIQVSAQPQQTSSEKAAPAAKPEPKPVPLWKKLAPAVIAAVLVLWVGAVAPAAFLNHFIVFVLACVIGYYVVWNVSHSLHTPLMSVTNAISGIIVVGALLQISQGNGFVTLLAFIAILIASINIFGGFAVTRRMLNMFKKG

SEQ ID NO: 19255 - protein, 118 aa, Neisseria meningitidis; identical to SEQ ID NO: 423

SEQ ID NO: 19256 - protein, 84 aa, Neisseria meningitidis
VDWMGSLFLPGGALLFLSVVSTTLSACLGMPLLLVSPAGVLDGAAEALAIAAFLMLVARPPAVFGGLWKFNYSLADSHLKCNFP

SEQ ID NO: 19257 - protein, 256 aa, Neisseria meningitidis
MKITTWNVNSLNVRLPQVQNLLADNPPDILVLQELKLDQDKFPAAALQMMGWHCVWSGQKTYNGVAIVSRNAPEDVHIGLPALPDDPQRRVIAATVGGVRVINVYCVNGEALDSPKFKYKEQWFAALTEFVRDEMTRYGKLVLLGDFNIAPADADCYDPEKWHEKIHCSSVERQWFKNLLDLGLTDSLRQVHPEGAFYTWFDYRGAMFQRKLGLRIDHILVSPAMAAALKDVRVDLETRALERPSDHAPVTAEFDW

SEQ ID NO: 19258 - protein, 156 aa, Neisseria meningitidis; identical to SEQ ID NO: 7655

SEQ ID NO: 19259 - protein, 820 aa, Neisseria meningitidis
MTQKEKHFEEYAALATLPLRDVVVYPHMVLPLFVGRPKSIAALENAITREEPVFLLAQTDAALEEPVAADLYQTGTVAQVLQVLKLPDGTVKVLVEGLYRGRVLTIEDTGGLFVSHIEAVVEEDTGGNTDLEAVRRTLLAQFEQYAKLNKKIPAEIIGSINGIAENSRLTDTVAAHLQLKLAQRQQILEIPEIGKRMEFLLAQLESELDIMQAEKRIRGRVKRQMEKSQREYYLNEQIKAIHKELGEEDENGELDALEAGIKKAGMSKEAEEKCLSELKKLKMMPPMSAESTVVRNYIDTLLELPWKKKSRVSKDIAKAGLVLDTDHYGLEKVKERILEYLAVQKRMDKLKGPILCLVGPPGVGKTSLGESIAKATGRKYVRMALGGVRDESEIRGHRRTYIGSMPGKILQNMAKAGVKNPLFLLDEIDKLGSDFRGDPASALLEVLDPEQNNKFADHYAEVDYDLSDVMFIATSNSLNIPTPLLDRMEIIRLSGYTEDEKINIAMQYLVPKQMKRNGVKEGELLVEESAVRDIIRYYTREAGVRSLDREIAKICRKVVMQITLDEDKKRLSETKKTSKAKPKAVKVNEKNLHDYLGVRRFDYGVAESENRIGQVTGLAWTEVGGELLTVEAAALPGKGVIQCTGQLGDVMKESVSAAWSVVRSRAESVGLASDFYEKKDIHVHVPEGATPKDGPSAGIAMTLAMVSAFSKIPVRADVAMTGEITLRGEVLPIGGLKEKLLAALRGGIKHVLIPKDNFKDLEEIPENVKTGLTIHPVKWIDEVLALGLESQPEPWAEPSGAEAVAESASKPKPRSRATKH

SEQ ID NO: 19260 - protein, 144 aa, Neisseria meningitidis; identical to SEQ ID NO: 6

SEQ ID NO: 19261 - protein, 321 aa, Neisseria meningitidis
MSYTQLTQGERYHIQYLSRHCTVTEIAKQLNRHKSTISREIRRHRTQGQQYSAEKAQRQSRTIKQRKRQPYKLDSQLIQHIDTLIRRKLSPEQVCAYLRKHHRITLHHSTIYRYLRQDKSNGSTLWQHLRICSKPYRKRYGSTWTRGKVPNRVGIENRPAIVDQKSRIGDWEADTIVGKGQKSALLTLVERVTRYTIICKLDSLKAEDTARAAVRALKAHKDRVHTITMDNGKEFYQHTKITKALKAETYFCRPYHSWEKGLNENTNGLIRQYFPKQTDFRNISDREIRRVQDELNHRPRKTLGYETPSVLFLNLFQPLIH

SEQ ID NO: 19262 - protein, 144 aa, Neisseria meningitidis; identical to SEQ ID NO: 5717

SEQ ID NO: 19263 - protein, 374 aa, Neisseria meningitidis; identical to SEQ ID NO: 7232

SEQ ID NO: 19264 - protein, 344 aa, Neisseria meningitidis
MQTLTIIRPDDMHLHLRDGDALKAVVPYTARQMGRAVIMPNLKPPVVSVADALAYKARIMAALPEGSAFEPLMTLYLTDNATSELVREAKAAGIVAFKLYPAGATTNSDSGVTDLFKLIPVLEEMAKQGILFLVHGEVTDPEIDIFDREAAFIGRVMKPVLAQVPNLKVVFEHITTAEAARLVLEAGDNVAATVTPQHLLLNRNDLLVGGVRPHHFCLPVLKRETHRQALVAAVTGEKAHKFFLGTDSAPHAKSAKENACGCAGMFSAMTAIELYAEVFEKAGALDKLEAFTSKNGARFYGIPENAGTITLVKQSQTVPASVPYGDGELVPMRAGGEIGWTVQY

SEQ ID NO: 19265 - protein, 160 aa, Neisseria meningitidis; identical to SEQ ID NO: 4185

SEQ ID NO: 19266 - protein, 95 aa, Neisseria meningitidis
MDDLIAAFLGYLSGKYNEGKISRLGISLTAGSIFFAVFFTQELIIFIIDGNKENLWNFITGIMKDLFLFSCSVCLLFYFLLFIAETIRKTINKIK

SEQ ID NO: 19267 - protein, 392 aa, Neisseria meningitidis
MAFLKLTEQNVQGKTVLIRADMNVPFKDGKISDDTRIRASIASVKYCVDNGASVIVMTHLGRPTEGEFHPEDDVAPVAAHLGGLLGKNVKVLNDWRENKPALNAGDVVMLQNVRINKGEKKNDLELGKAYASLCDVFVNDAFGTAHRAQASTEAVAQAAPVACAGVLMAGELDALGKALKQPARPMVAIVAGSKVSTKLTILESLADKVDQLIVGGGIANTFLLAEGKAIGKSLAEHDLVEESKKIMEKMAAKGGSVPLPTDVVVAKAFAADAEAVVKDIADVAEDEMILDIGPKSAAALAELLKAAGTVVWNGPVGVFEFDQFAGGTKALAEAIAQSKAFSIAGGGDTLAAIAKFGVTDQIGYISTGGGAFLEFLEGKELPAVAALEKRGA

SEQ ID NO: 19268 - protein, 131 aa, Neisseria meningitidis; identical to SEQ ID NO: 2561

SEQ ID NO: 19269 - protein, 353 aa, Neisseria meningitidis
MSKNAQKTLLAVCSFEVQPKDGRIQLLPYGEFRAVDGRPTDVPAWYLTEENGHDVALLANSSRNQLVVDYEHQTLYKEKNGQPAPAAGWMRWLEFTPKGMFAEVEWTDKAAAAIAAKEYRYISAVFSYDTKGYVSKIFHAALTNFPALDGMDEVLAAASAQILKPETEQNPMKELLQQLFGLPDAGEEELKAALSALVEAKPEGAALSADVFAQLAEKDSRIAALSAQNGTPDLTRYAPVSLVRDLQNQVAALTAEREADKGGELITAALSAGKLLPAQKEWAEGVLKQPGGFAFLSGFIENAQPVAALAGSQTGGKAPDERVAALTAEEAAAAKMLGMSGEEFVKIKESEGK

SEQ ID NO: 19270 - protein, 174 aa, Neisseria meningitidis
MKKALAALIALALPAAALAEGASGFYVQADAAHAKASSSLGSAKGFSPRISAGYRINDLRFAVDYTRYKNYKAPSTDFKLYSIGASAIYDFDTQSPVKPYLGARLSLNRASVDLGGSDSFSQTSTGLGVLAGVSYAVTPNVDLDAGYRYNYIGKVNTVKNVRSGELSVGVRVKF

SEQ ID NO: 19271 - protein, 133 aa, Neisseria meningitidis; identical to SEQ ID NO: 6682

SEQ ID NO: 19272 - protein, 312 aa, Neisseria meningitidis; identical to SEQ ID NO: 8892

SEQ ID NO: 19273 - protein, 222 aa, Neisseria meningitidis
MSLSKLAKKTAQTAKNIGETLRTAFRGKITLVVSSEPIQRVQLSGLADETLQDLEHLQEYGFASHPPDGSEAVVIPLGGNTSHGVIVCSQHGSYRIKNLKPGETAIFNHEGAKIVIKQGKIIEADCDVYRVNCKQYEVNAATDAKFNAPLVETSAVLTAQGQINGNGGMAVEGGDGATFSGDVNQTGGSFNTDGDVVAGNISLRQHPHTDSIGGKTLPAEPA

SEQ ID NO: 19274 - protein, 176 aa, Neisseria meningitidis; identical to SEQ ID NO: 3632

SEQ ID NO: 19275 - protein, 211 aa, Neisseria meningitidis
MIVSIDVDAQKTFTPLCPKELPVNEGHLIVEELNAQAALADLRVMTKDAHHAAAKWLVDNPVDMLKPTGLPDADLTWVAHAMVGTRGYELLDGLPCAKEYDYCVWKGIDPELHPYGACFHDIEEKLSTGLIEWLRCQNTDTVIIGGLATDYCVKTTVLQLLKGGRWQVVVNEAACRGIAPETIETAWQEMHSAGAIILKNADEINKYINNQ

SEQ ID NO: 19276 - protein, 354 aa, Neisseria meningitidis; identical to SEQ ID NO: 3126

SEQ ID NO: 19277 - protein, 384 aa, Neisseria meningitidis
MVDKKSPLIAVSVGEASGDLLGAHLIRAIRERCPQARFTGIGGELMKAEGFESLYDQERLAVRGFVEVVRRLPEILRIRRGLVRDLLSLKPDVFVGIDAPDFNLGVAEKLKRTGIPTVHYVSPSVWAWRRERVGKIVHQVNRVLCLFPMEPQLYLDAGGRAEFVGHPMAQLMPLEDDRETARKTLGVDAGIPVFALLPGSRVSEIDYMAPVFFQTALLLLERYPAARFLLPAATAATKRRLAEVLQRPEFAGLPLTVIDRQSETVCRAADAVLVTSGTATLEVALCKRPMVISYKISPLTYAYVKRKIKVPHVGLPNILLGKEAVPELLQHDAVPEKLAAALADWYEHPDKVAALQQDFRALHLLLKKDTADLAARAVLEEAGC

SEQ ID NO: 19278 - protein, 561 aa, Neisseria meningitidis
MSMENFAQLLEESFTLQEMNPGEVITAEVVAIDQNFVTVNAGLKSESLIDVAEFKNAQGEIEVKVGDFVTVTIESVENGFGETKLSREKAKRAADWIALEEAMENGNILSGIINGKVKGGLTVMISSIRAFLPGSLVDVRPVKDTSHFEGKEIEFKVIKLDKKRNNVVVSRRAVLEATLGEERKALLENLQEGSVIKGIVKNITDYGAFVDLGGIDGLLHITDLAWRRVKHPSEVLEVGQEVEAKVLKFDQEKQRVSLGMKQLGEDPWSGLTRRYPQGTRLFGKVSNLTDYGAFVEIEQGIEGLVHVSEMDWTNKNVHPSKVVQLGDEVEVMILEIDEGRRRISLGMKQCQANPWEEFAANHNKGDKISGAVKSITDFGVFVGLPGGIDGLVHLSDLSWTESSEEAVRKYKKGEEVEAVVLAIDVEKERISLGIKQLEGDPFGNFISVNDKGSLVKGSVKSVDAKGAVIALSDEVEGYLPASEFAADRVEDLTTKLKEGDEVEAVIVTVDRKNRSIKLSVKAKDAKESREALNSVNAAANANAGTTSLGDLLKAKLSGEQE

SEQ ID NO: 19279 - protein, 217 aa, Neisseria meningitidis
MLEILFRHQDFVAINKPGGISVHQDSGETGLARTLAIQLGVERVWLLHRLDKQTSGILLFALNRESASALSGQFAGKSIKKTYLALSDRKPSKKQGWIKGGMEKSRRGMWKLTRNTENIAVTRFHSISIAEKLRLFILEPHTGKTHQLRVAMKSLGSPILGDSLYGGTESETMFLYAWKIQFAYQNRQIEIVAPLKNEWQTENISHALEEFYMAKAG

SEQ ID NO: 19280 - protein, 526 aa, Neisseria meningitidis
MSVIKRALISLSDKAGAVEFAQTLHKLGVEILSTGGTAKLLADAGVPVIEVADYTGFPEMLDGRAKTLHPKIHGGILGRRDLDEHVAKMEEHGIGNIDLVCVNLYPFAATIAKPGCTLEDAIENIDIGGPTMVRSAAKNWKHVAIVTDTADFPAIAAEMEANNGALSDKTRFNLSRKAFSHTAQYDGMISNYLTSLSDDVLSGQPQIGEFPSRFNQSWIKVQDMRYGENPHQRAAFYRDIYPAAGSLAAYKQLQGKELSYNNIADADAAWEAVKSFDAPACVIVKHANPCGVAVAADTLTAYKLAYVTDTTSAFGGIIAFNREVDGETVKQITDNQFMEVLMAPKFTAEALEIAAAKKNVRVLEVPLEAGANRFELKRIGGGLLVQTPDIHRISRADLKVVSKRQPTEQEWNDLLFVWNVAKYVKSNAIVFGKGGQTYGIGAGQMSRVDSTRIAARKAQDANLDLNGACAASDAFFPFRDGVDVIAEQGIKAIIHPAGSMRDQEVFDAADEHGIAMVVTDVRHFRH

SEQ ID NO: 19281 - protein, 106 aa, Neisseria meningitidis; identical to SEQ ID NO: 2449

SEQ ID NO: 19282 - protein, 61 aa, Neisseria meningitidis; identical to SEQ ID NO: 1125

SEQ ID NO: 19283 - protein, 96 aa, Neisseria meningitidis; identical to SEQ ID NO: 3537

SEQ ID NO: 19284 - protein, 145 aa, Neisseria meningitidis; identical to SEQ ID NO: 1767

SEQ ID NO: 19285 - protein, 421 aa, Neisseria meningitidis; identical to SEQ ID NO: 4874

SEQ ID NO: 19286 - protein, 197 aa, Neisseria meningitidis
MASIQNLYETVSRVLGNQAGKVISALGEITVECLPEHYISVMTALRDHEELHFELLVDLCGVDYSTYKNEVWQGKRFAVVSQLLSVKNNQRIRVRVWVSDDDFPVVESVVDIYNSADWYEREAFDMYGIMFNNHPDLRRILTDYGFVGHPFRKDFPISGYVEMRYDEEQKRVIYQPVTIEPREITPRIVREENYGGQ

SEQ ID NO: 19287 - protein, 366 aa, Neisseria meningitidis
MTRIAILGGGLSGRLTALQLAEQGYQIALFDKGCRRGEHAAAYVAAAMLAPAAEAVEATPEVIKLGRQSIPLWRNIRGHLKTPAMMQENGSLIVWHGQDKPLSSEFVRHLKRGGVADDEIVRWRADEIAEREPQLGGRFSDGIYLPTEGQLDGRQILSALADALDELNVPCHWEHECVPEGLQAQYDWLIDCRGYGAKTAWNQSPEHTSTLRGIRGEVARVYTPEITLNRPVRLLHPRYPLYIAPKENHVFVIGATQIESESQAPASVRSGLELLSALYAIHPAFGEADILEIATGLRPTLNHHNPEIRYSRKRRLIEINGLFRHGFMISPAVTAAAVRLAVALFDGKDAPERDEESGLAYIRRQD

SEQ ID NO: 19288 - protein, 459 aa, Neisseria meningitidis
MAKTLKTLYQCTECGGTSPKWQGKCPHCGEWNTLQESLAAPEPKNARFQSWAADTSTVQSLSSVTATEVPRNPTGMGELDRVLGGGLVDGAVILLGGDPGIGKSTLLLQTIAKMAQSRKVLYVSGEESAQQVALRAQRLELPTEGVNLLAEIRMEAIQAALKQHQPEVVVIDSIQTMYSDQITSAPGSVSQVRECAAQLTRMAKQMGIAMILVGHVTKDGAIAGPRVLEHMVDTVLYFEGDQHSNYRMIRAIKNRFGAANELGVFAMTENGLKGVSNPSAIFLASYRDDTPGSCVLVTQEGSRPLLVEIQALVDDAHGFTPKRLTVGLEQNRLAMLLAVLNRHGGIACFDQDVFLNAVGGVKIGEPAADLAVILAMLSSFRNRPLPEKMVAFGEIGLSGEVRPVARGQERLKEAEKLGFKRAIVPKANMPRNAKEFPNLKIYGVSSLQEAIDICREDRD

SEQ ID NO: 19289 - protein, 483 aa, Neisseria meningitidis
MPSERPRVFRRHQDFFMDTTLKTTLTSVAAAFALSACTMIPQYEQPKVEVAETFKNDTADSGIRAVDLGWHDYFADPRLQKLIDIALERNTSLRTAVLNSEIYRKQYMIERNNLLPTLAANANGSRQGSLSGGNVSSSYKVGLGAASYELDLFGRVRSSSEAALQGYFASTANRDAAHLSLIATVAKAYFNERYAEEAMSLAQRVLKTREETYKLSELRYKAGVISAVALRQQEALIESAKADYAHAARSREQARNALATLINQPIPDDLPAGLPLDKQFFVEKLPAGLSSEVLLDRPDIRAAEHALKQANANIGAARAAFFPSIRLTGTVGTGSAELGGLFKSGTGVWSFAPSITLPIFTWGTNKANLDVAKLRQQAQIVAYESAVQSAFQDVANALAAREQLDKAYDALSKQSRASKEALRLVGLRYKHGVSGALDLLDAERSSYAAEGAALSAQLTRAENLADLYKALGGGLKRDTQTDK

SEQ ID NO: 19290 - protein, 262 aa, Neisseria meningitidis
MMENGKTVPRWRFALKSAGWHLLISLSVAGLAALLVFKVWYPYPYAELTGGLSLYQLVVAVDIVCGPLLTLILASPKKKTKARMVDFSMVGIIQLAALVYGLHSVSLARPVIEAFEKDRINVVTAAEVAVEDLHKAPEGLQSLSWFGIRRIALKEPEDADEKNKTLDLSLKGIEPSMRPDRWLPYSDKEAEKIRKHLKPLKVLADARKTTVADILKQAGLAEGEELYYLPFTSSRQKEWIVITDKEGNTKGYAPIDGFIITP

SEQ ID NO: 19291 - protein, 115 aa, Neisseria meningitidis
MDKELNPSIGDYTGRTVDTLQNAVYIRLMTPLGSWWADKTLGSLLHLLQREKDLQRVSLLAEQYADEALQPIVKSGRADKITVRAEQPHDGRLILHIRVDTAAGGFDYRHEVPVI

SEQ ID NO: 19292 - protein, 808 aa, Neisseria meningitidis
MSAQTDPGYFFMPNHIILIGASERPYSLGERVLSNLLSTPFQGKITPVNPRHHTIAGLPAYTSLNKIPGNADLIIAVTLPDSYDTLFKTCRKKQLRHIILIQDWDSLSAAELHTAETAIRKHHGNGLNITACTTAGIQLPSLGLNISTQDGYAAGHTAILTGNAAVSRQIDNILNKLRQGTSRHISLHPGISPITSADWLNRFGHSLHTKTAVLHHNPEEDQRKLFSAIRQFTRHTPLILHITCRTTETDRAVLHCLARHCNFLISFNADDLEAALRAQLSDIPPLSRLDILSDTPAEWLNAHAPKTLALHFPNLPHHIRNGHLTGTPTPSICHDIASRQLARPDTQAVLTILSPSGHEDYKKTARALIRLSEQTAKPLLVSSPFSDGITHFDTPTQAIRTLSYRNTAAALKQAQLDIAPPQPCRLKTPQPQNIKKALEAADPALIAEALHLPPYRHTTHNAVQFQFGSHSLYGDILTARCNGQTTAVLPPFTTLDSRHLARFAELDGTQTLDQFLHTLTVIPEYRQHILGITLNLNGGQYSSDFILKTPETHDTPKRKNTGKAAQTLEHAAAKMQSAAAYLKHKNPTAAEFLRHTSEAAAELLGSKTETGAAVPNVLAPYPAAHPKTLSLKNDTTVTITPILPEDAEAKQQFVRSLGPEARYTRFMTHTNELPAATLARLCNPDYHCEAAWTAKDADSNIVAVVRHSRLNRNECEFGITLAEHMRGSGLAQKMMELIIQTAAQQGYRTMSADILKTNTPMIKLAEKSGFTLKESDTEKNLYRAYLNLAADKTTEKTNKNLHTDHKIT

SEQ ID NO: 19293 - protein, 107 aa, Neisseria meningitidis; identical to SEQ ID NO: 9249

SEQ ID NO: 19294 - protein, 363 aa, Neisseria meningitidis
MKKRKILPLAICLAALSACTAMEARPPRVNEAQAPRADEMKKESRPAFDTAAVPVSDSGFAANANVRRFVDDEVGKGDFSRAEWQDFFDKAAYKADIVKIMHRPSTSRPWYVFRTGNSGKAKFRGARRFYAENRAVVDDVAQKYGVPAELIVAIIGIETNYGKNTGSFRVADALATLGFDYPRRAGFFQKELVELLKLAKEEGGDVFAFKGSYAGAMGMPQFMPSSYRKWAVDYDGDGHRDIWGNVGDVAASVANYMKQHGWRTGGKMLVSATLAPGADVQAIIGEKTALTRTVADLKAYGIIPGEELADDEKAVLFKLETAPGVFEYYLGLNNFYTVWQYNHSRMYVTAVRDIANSLGGPGL

SEQ ID NO: 19295 - protein, 887 aa, Neisseria meningitidis
VLKTPPTLAAELSGKTGVSISAPYANENSRILLSTTDISSENGKIKIQSYGDQYYYARQSELYTFERRSYKTGKWYNRKHITEVKEHKNAKPDAVNLGASQGIDIKSGGSIDAYATAFDAPKGSINIEAGRKLTLYAVEELNYDKLDSQKRRRFLGISYSKAHDTTTQVMKTALPSRVVAESANLQSGWDTKLQGTQFETTLGGATIRAGVGEQARADAKIILEGIKTTIHNETVSSSKSALWQKQAGRGSNIETLQLPSFTGPVAPVLSAPGGYIVDIPKGNLKTEIEKLAKQPEYAYLKQLQTAKNVDWKQVQLAYDKWDYKQEGLTGAGAAIVVIIVTALTYGYGAAAAGSVTAAGSSTAAAATTTAAATTTVSTAAAMQTAALASLYSQAAVAIINNKGDVGKALKDLGTSDTVKQIVTSALTAGALNQMGADIAQLNSKVRTELFSSTGNQTIANLGGRLATNLSNAGISAGINTAVNGGSLKDNLGNAALGALVNSFQGEAASKIKTTFSDDYVAKQFAHALAGCVSGLVQGKCKDGAIGAAVGEIVAESILGGRNPATLSDAEKHKVISYSKIIAGSVAALNGGDVNTAANAAEVAVVNNALNFDSTPTNAKKHQPQKPDKTALEKIIQSIMPAHAAGAMTNPQDKDAAIWISNIRNGITGPIVITSYGVYAAGWTAPLIGTAGKAAISTCMANPSGCTVMVTQAAEAGAGIATGAVTVGNAWEAPVGALSKAKAAKQAIPTQTVKELDGLLQESKNIGAVNTRINIANSTTRYTPMRQTGQPVSAGFEHVLEGHFHRPIANNRSVFTISPNELKVILQSNKVVSSPVSMTPDGQYMRTVDVGKVIGTTSIKEGGQPTTTIKVFTDKSGNLITTYPVKGN

SEQ ID NO: 19296 - protein, 321 aa, Neisseria meningitidis; identical to SEQ ID NO: 6649

SEQ ID NO: 19297 - protein, 153 aa, Neisseria meningitidis
MFDFPPVSRFLADEAATLDLGAAWSSRLNAPLVIYLEGDLGAGKTTLTRGILRGLGHQGAVKSPTYAIVESYPLERFTLHHFDLYRFSFPEEWEDAGLDELFSANSVCLIEWPQQGGEFTPPADITATLTHDGDGRKCLLTAHTERGRESLPL

SEQ ID NO: 19298 - protein, 86 aa, Neisseria meningitidis; identical to SEQ ID NO: 4508

SEQ ID NO: 19299 - protein, 216 aa, Neisseria meningitidis; identical to SEQ ID NO: 10044

SEQ ID NO: 19300 - protein, 52 aa, Neisseria meningitidis
MIGAVSFESAHRDECPRAVSIPIYRLFRIGCRREMTDGCRNDGRREAEEMID

SEQ ID NO: 19301 - protein, 544 aa, Neisseria meningitidis
MTKFIFVTGGVVSSLGKGIAAASIAAILESRGLNVTMLKLDPYINVDPGTMSPFQHGEVFVTDDGAETDLDLGHYERFIDSTMTRRNSFSTGQVYENVIAKERRGDYLGGTVQVIPHITDEIKRRIHEGAAGYDVAIVEIGGTVGDIESLPFLEAIRQMRSQLGRSNTLFAHLSYVPYIAAAGEIKTKPTQHTVKEMLSIGLQPDILICRMDREMPADERRKIALFCNVEERAIVGSYDVDSIYECPEMLHNQGIDSIITEQLQLNVQQADLTAWKKIVHAIQNPKHTVKIAMVGKYVDLTESYKSLIEALKHAGIHTETDVQITFVDSESIEKNNGDVSMLKDMDAILVPGGFGSRGVEGKIAAVRYARENNVPYLGICLGMQIALIEYARDVAGLKGANSTEFDLKCAAPVVALIDEWQTADGSVETRDESADLGGTMRLGAQEVELKAGSLAAKIYGSEHIRERHRHRYEVNNNYVPTLEQAGLVVGGVSAGRERLVETIELPNHPWFFACQFHPEFTSNPRKGHPLFTAFVKAALNNKKA

SEQ ID NO: 19302 - protein, 405 aa, Neisseria meningitidis
MEIILGIVMFTVIVLVLALMILFAKSKLVSEGDITIKVNGEKELTMPAGGKLLGALANEGIFIPSACGGGGSCGQCRVVVKSGGGDILPTELSHISKREAREGCRLSCQVNVKTDMDIEVPEEVFGVKKWECTVISNDNKATFIKELKLAIPEGEEVPFRAGGYIQIEAPPHTVAYKDFDIPKEYHEDWDKYNLWQYVSKVDEPILRAYSMASYPEEKGIIMLNVRIATPPPRVPDAPPGQMSSYIWSLKPGDKVTISGPFGEFFAKDTDAEMVFIGGGAGMAPMRSHIFDQLKRLNSKRKITFWYGARSKREMFYVEDFDQLAAEFPNFTWHVALSDPLPEDNWDGYTGFIHNVVYENHLKNHEAPEDCEFYMCGPPIMNQSVIKMLKNLGVEDENILLDDFGG

SEQ ID NO: 19303 - protein, 150 aa, Neisseria meningitidis; identical to SEQ ID NO: 3757

SEQ ID NO: 19304 - protein, 284 aa, Neisseria meningitidis; identical to SEQ ID NO: 9988

SEQ ID NO: 19305 - protein, 271 aa, Neisseria meningitidis; identical to SEQ ID NO: 1333

SEQ ID NO: 19306 - protein, 122 aa, Neisseria meningitidis; identical to SEQ ID NO: 3754

SEQ ID NO: 19307 - protein, 231 aa, Neisseria meningitidis; identical to SEQ ID NO: 1993

SEQ ID NO: 19308 - protein, 110 aa, Neisseria meningitidis
VATSSKIKGKYVKEVTVANGVVTATMLSSGVNNEIKGRKLSLWAKRQDGSVKWFCGQPVERTAPTTTNDDVKADTAANGKIDTKHLPSICRDASSVVCIETPPTAFYKNT

SEQ ID NO: 19309 - protein, 264 aa, Neisseria meningitidis
MKAYLDLMRHVLDNGTDKSDRTGTGTRSVFGYQMRFDLGKGFPLLTTKKLHLRSIIHELLWFLKGDTNIKYLKDNNVSIWDEWADENGDLGPVYGYQWRNWPAPDGRHIDQIANVVEQIKKNPDSRRLIVSAWNPALVDEMALPPCHALFQFYVADGKLSCQLYQRSADIFLGVPFNIASYALLTMMMAQVCGLEAGEFVHTFGDAHLYRNHFEQAALQLEREPRALPVMKINPEVKDLFAFKFEDFELEGYDPHPHIKAAVSV

SEQ ID NO: 19310 - protein, 144 aa, Neisseria meningitidis; identical to SEQ ID NO: 3606

SEQ ID NO: 19311 - protein, 351 aa, Neisseria meningitidis
MTILSDVKALGQQIWLDNLSRSLVQSGELAQMLKQGVCGVTSNPAIFQKAFAGDALYADEVAALKQQDLTPKQRYETMAVADVRAACGVCLAEHESTGGKTGFVSLEVSPELSKDAQGTVEEARRLYAAIGCKNAMIKVPATDAGIDALETLVSDGISVNLTLLFSRAQTLKAYAAYARGIAKRLAAGQSVAHIHVVASFFISRVDGALDTTLPDHLKGKIAIALAKTAYQDWEQYFTAPKFAALETKGANRVQLLWASTGVKNPAYPDTLYVDSLIGAHTVNTVPDATLKAFIDHGTAKATLTEGVEEAQAQLAETAALGIDVETLAARLQEDGLKQFEEAFEKLLAPLV

SEQ ID NO: 19312 - protein, 328 aa, Neisseria meningitidis
MQYRIRRENEAPEAKNAGETLWERDIMREVLLSAYRDRRRERMWKNIWRAVSTLILVALIAGIFQKDEAALQLAGNTPHTAVVNLYGEIGNGVEDQVKKLKDGMEAAYKNPQAKAIIIRANSPGGSPVVSNTAFEEIRRLKAQHPGIPVYLVAEDMCASGCYYIAAAADKIYADPSSIIGSIGVIGSSFDATGLMEKIGVKRRVKIAGSNKGMGDPFSPETPEQSKIWEEMLTGIHGEFIKAVKTGRGDRLKFRQYPDVFSGRVYTGADALKVGLVDGLGNIYSVARDVVKAPDVVDYTPKDDFGRILGRRFGAELKASVREALQAVR

SEQ ID NO: 19313 - protein, 311 aa, Neisseria meningitidis; identical to SEQ ID NO: 18565

SEQ ID NO: 19314 - protein, 282 aa, Neisseria meningitidis; identical to SEQ ID NO: 1323

SEQ ID NO: 19315 - protein, 397 aa, Neisseria meningitidis
MNPKHLIAFSALFAATQAEALPVASVSLDTVTVSPSAPYTDTNGLLTDYGNAAASPWMKKLRSVAQGSGETFRILQIGDSHTAGDFFTDTLRKRLQKTWGDGGIGWVYPANVKGQRMAAVRHNGNWQSLTSRNNSGDFPLGGILAHTGSGGSMTLTASDGKTGKQRISLFAKPLLAEQTLTVNGNTVSANGGGWQVLDTRAALPLTIQTEMPWDIGFINIENPAGGITVSAMGINGAQLTHWSKWRADRMNDLAQTGADLVILSYGTNEAFGDNIDIADTEQKWLDTVRQIRDSLPAAGILIIGAPESLKNTLGVCGTRPVRLTEVQQMQRRVARQGQTMFWSWQNAMGGICSMKNWLNQGWAAKDGVHFSAKGYRRAAEMLADSLEELVRAAAIRQ

SEQ ID NO: 19316 - protein, 291 aa, Neisseria meningitidis; identical to SEQ ID NO: 9353

SEQ ID NO: 19317 - protein, 238 aa, Neisseria meningitidis; identical to SEQ ID NO: 8951

SEQ ID NO: 19318 - protein, 112 aa, Neisseria meningitidis; identical to SEQ ID NO: 8651

SEQ ID NO: 19319 - protein, 344 aa, Neisseria meningitidis; identical to SEQ ID NO: 18788
  misc_feature 338, 339: 'Xaa' is any amino acid

SEQ ID NO: 19320 - protein, 587 aa, Neisseria meningitidis
MGFPVRKFDAVIVGGGGAGLRAALQLSKSGLNCAVLSKVFPTRSHTVAAQGGISASLGNVQEDRWDWHMYDTVKGSDWLGDQDAIEFMCRAAPEAVIELEHMGMPFDRVESGKIYQRPFGGHTAEHGKRAVERACAVADRTGHAMLHTLYQQNVRANTQFFVEWTAQDLIRDENGDVVGVTAMEMETGEVYIFHAKAVMFATGGGGRIYASSTNAYMNTGDGLGICARAGIPLEDMEFWQFHPTGVAGAGVLITEGVRGEGGILLNADGERFMERYAPTVKDLASRDVVSRAMAMEIYEGRGCGKNKDHVLLKIDHIGAEKIMEKLPGIREISIQFAGIDPIKDPIPVVPTTHYMMGGIPTNYHGEVVVPQGDEYEVPVKGLYAAGECACASVHGANRLGTNSLLDLVVFGKAAGDSMIKFIKEQSDWKPLPADAGELTRQRIERLDNQTDGENVDALRRELQRSVQLHAGVFRTDEILSKGVREVMAIAERVKRTEIKDKSKVWNTARIEALELDNLIEVAKATLVSAEARKESRGAHASDDHPERDDENWMKHTLYHSDTNTLSYKPVHTKPLSVEYIKPAKRVY

SEQ ID NO: 19321 - protein, 513 aa, Neisseria meningitidis
MVFDNNYHYNAMSVRLLVNIQDADSDGIQTASENNNGTRMGYNRSMEKNTLSARALSPWLPLLLAIAIFMQMLDATILNTALPEIAADLDESPLDMQLAVVAYTLTVALLIPLSGYLADRFGTKKVFFGSIAVFILGSALCAASGSLFELTLSRVVQGIGGSMLIPIPRLTILRMYDKSKLLNAINYAVMPALIGPVLGPLAGGYLVEYASWHWIFLLNLPIGLLGFILGRNIMPDIKGSNISLDFKGYLIFSAAACLLLLSAESLSHALPPYFALLPLCGGLLFARRYFRHMKTASKPIYSADLFLIRTFRLGLAGNLFSRLGISSIPFLMPLMFQVAFGFGASLSGWLVAPVALSSLLVKPLIAPLMKRFGYRTVLLWNTKLLAAFIMLLALPDGNSPLWIWIFLSLAIGACNSLQFSAMNTLTLADLRPQQTGSGNSLMAVNQQLAISMGIVVGALILKNWTFLIPASSGLHSAFRMTLLSIGGITLASSLVFKRLHVSDGANLTRNTPS

SEQ ID NO: 19322 - protein, 761 aa, Neisseria meningitidis
MQLLAAEGIHQHQLNVQKSTRFIGIKVGKSNYSKNELNETKLPVRVIAQTAKTRSGWDTVLEGTEFKTTLAGADIQAGVGEKARVDAKIILKGIVNRIQSEEKLETNSTVWQKQAGRGSTIETLKLPSFESPTPPKLSAPGGYIVDIPKGNLKTEIEKLSKQPEYAYLKQLQVAKNINWNQVQLAYDRWDYKQEGLTEAGAAIIALAVTVVTSGAGTGAVLGLNGAAAAATDAAFASLASQASVSFINNKGDVGKTLKELGRSSTVKNLVVAAATAGVADKIGASALNNVSDKQWINNLTVNLANAGSAALINTAVNGGSLKDNLEANILAALVNTAHGEAASKIKQLDQHYIVHKIAHAIAGCAAAAANKGKCQDGAIGAAVGEIVGEALTNGKNPDTLTAKEREQILAYSKLVAGTVSGVVGGDVNAAANAAEVAVKNNQLSDKEGREFDNEMTACAKQNNPQLCRKNTVKKYQNVADKRLAASIAICTDISRSTECRTIRKQHLIDSRSLHSSWEAGLIGKDDEWYKLFSKSYTQADLALQSYHLNTAAKSWLQSGNTKPLSEWMSDQGYTLISGVNPRFIPIPRGFVKQNTPITNVKYPEGISFDTNLKRHLANADGFSQKQGIKGAHNRTNFMAELNSRGGRVKSETQTDIEGITRIKYEIPTLDRTGKPDGGFKEISSIKTVYNPKKFSDDKILQMAQNAASQGYSKASKIAQNERTKSISERKNVIQFSETFDGIKFRSYFDVNTGRITNIHPE

SEQ ID NO: 19323 - protein, 729 aa, Neisseria meningitidis
MIYHRIAVNVPLSDGLLTYSHSEPLPQGTRVLVPFRNKTVVGMVWETDITPDMDTARILSVQTAFSDEPPLPQNWRDLLAFTSRYYHYPTGQAVFAALPQGLKETRAVEMPQPPLFYALNEAGRAQTPPPARFNKKAALWDALLSGGMTMAALKQVNAQAAKLIEDWAEQGWIETTEAAKPVLRPYHGQASHSEFVLNADQQKASDEIQTALGRFQPFLLYGITGSGKTEVYFDAMAKVLAQGRQVLFLLPEINLTPQLLKRVEDRFADVPTAVLHSQMAAGRRTQDYLRAMSGQAKLVIGTRLAVFTPLSDVGLIVVDEEHDGSFKQGNELRYHARDLAVWRAKQGGCPVVLGSATPSLESWHKAQSGAYRLLQLTERAHTAAQLPQVDILNVGRLKLDNGFSPQALQLLKQNFEAGGMSLVYLNRRGFAPALFCGDCGHTFGCPNCSAKMVLHQRVRQLRCHHCDHREPIPFKCPDCGNQDLTAVGHGTQRVEETLRAFLPKAAVVRVDRDSTAHKNDWADLYRRIADNEIDILVGTQMLAKGHDFARLNLVIVLNADGSLYSADFRAPERLFAELMQVSGRAGRADKPGKVLIQTQLPEHPVFAAVKAQDYAVFAENELNERQMFAMPPFGFQTAVRADAPRVADALEFLNAAKETLAPLLPASVSQFGAAPMLMVRLAERERAQIFLESPSRQDLHRAVSLWVQVLQQNRDGKIRWSVDVDPQEA

SEQ ID NO: 19324 - protein, 131 aa, Neisseria meningitidis; identical to SEQ ID NO: 1281

SEQ ID NO: 19325 - protein, 355 aa, Neisseria meningitidis
MRKILVTGGAGFIGSAVVRHIIRNTQDSVVNLDKLTYAGNLESLTDIADNPRYAFEQVDICDRAELDRVFAQHRPDAVMHLAAESHVDRSIGSAGEFIQTNIVGTFNLLEAARAYRQQMPSEQHEAFRFHHISTDEVYGDLGGTDDLFTETAPYAPSSPYSASKASSDHLVRAWLRTYGLPTIVTNCSNNYGPYHFPEKLIPLMILNALDGKPLPVYGDGMQIRDWLFVEDHARALYQVVTEGVVGETYNIGGHNEKANIEVVKTICALLEELAPEKPAGVARYEDLITFVQDRPGHDVRYAIDTAKISRELGWKPQETFESGLHKTVQWYLDNKTWWQNVLNGSYRLERLGTGK

SEQ ID NO: 19326 - protein, 203 aa, Neisseria meningitidis; identical to SEQ ID NO: 14692

SEQ ID NO: 19327 - protein, 316 aa, Neisseria meningitidis; identical to SEQ ID NO: 6852

SEQ ID NO: 19328 - protein, 844 aa, Neisseria meningitidis
VLKTPPTLAAELSGKTGVSISAPYANENSRISLSAANIEAENGKIKIQSYGDQYYYARQSELYTFERRSYKTGKWYNRKHITEVKEHKNAKPDAVTLSASQGIDIKSGGSIDAYATAFDAPKGSINIEAGRKLTLYAVEELNYDKLDSQKRRRFLGISYSKAHDTTTQVMKTALPSRVVAESANLQSGWDTKLQGTQFETTLGGATIRAGVGEQARADAKIILEGIKSSIHTETVSSSKSTLWQKQAGWGSNIETLQLPSFTGPVAPVLTAPGGYIADIPKGNLKTEIEKLAKQPEYAYLKQLQVAKNINWNQVQLAYDRWDYKQEGLTEAGAAIIALAVTVVTSGAGTGAVLGLNGAAAAATDAAFASLASQASVSFINNKGDVGKTLKELGRSSTVKNLVVAAATAGVADKIGASALNNVSDKQWINNLTVNLANAGSAALINTAVNGGSLKDNLEANILAALVNTAHGEAASKIKQLDQHYIAHKIAHAIAGCAAAAANKGKCQDGAIGAAVGEIVGEALVKNTDFSRMSATEIEKAKAKITAYSKLVAGTASAVVGGDVNTAANAAQIAVENNTLYPRCVGAKCDEFQKEQQKWIRENPEEYREVLLLQTGFIPIIGDIQSFVQAQTAADHLFALLGVVPGIGESIQAYKVAKAAKNLQGMKKALDKAATVATAQGYVSKTKIKIGQTELRVTAATDKQLLKAIGEGRDTTGKMTEQLFDSLAKQNGFRVLSGGKYGGNNGFDHVWQAADGSVVLIVESKQIRNGTVQLNPNGAGGYTQMSEDWIRQVLDQLPDGSPAKAAVFKANKNGTLKTAIAGVDRQTGKAVILPVKVPSKANIRR

SEQ ID NO: 19329 - protein, 463 aa, Neisseria meningitidis
VSAARILTKVNMKPLDLNFICQALKLPMPSESKLVSRIVTDSRDIRAGDVFFALAGGRFDAHDFVEDVLAAGAAAVVVSREDCAALKDALKVDDTLAALQTLAKAWRDNVNPFVFGITGSGGKTTVKEMLAAVLRHRFGNEAVLATTGNFNNHIGLPLTLLKLNEKHRYAVIEMGMNHFGELAVLTQIAKPDAALVNNALRAHVGCGFDGVGDIAKAKSEIYQGLCSDGMALIPQEDANMAVFKTATLNLNTRTFGVDSGDVHAENIVLKPLSCEFDLVCGNECAAVVLPVPGRHNVHNAAAAAALSLAAGLSLNDVAEGLKGFSNIKGRLNVKSGIKGATLIDDTYNANPDSMKAAIDVLARMPAPRIFVMGDMGELGEDEAAAMHAEVGAYARDQGIEAAYFVGDNSVEAAEKFGADGLWFAAKDPLIQVLRHDLPERATVLVKGSRFMQMEEVVEALEDK

SEQ ID NO: 19330 - protein, 242 aa, Neisseria meningitidis
MGGKMSDKKYNVDEGEIAKFSRIADKWWDKSGEFKTLHDINPLRLDYIDGHADLRGKRVLDVGCGGGILAESMARRGAAFVKGIDMAEQSLETARLHAALNNVADIEYECIRVEDLAEAEPHSFDVVTCMEMMEHVPDPAAIVRACAKLVKPDGMVFFSTINKNPKSYLHLIVAAEYLLKFVPKGTHDWKKFIAPAELARMCRQAGLDVADTKGMTYHVLSQTYALCDSTDVNYMFACRPAF

SEQ ID NO: 19331 - protein, 81 aa, Neisseria meningitidis; identical to SEQ ID NO: 7714

SEQ ID NO: 19332 - protein, 61 aa, Neisseria meningitidis
MAEQKKIRVTLVKSLIGTIESHRACARGLGLCRREHTVEVLDTPENRGMINKISYLLKVES

SEQ ID NO: 19333 - protein, 461 aa, Neisseria meningitidis
MDGWTQTLSAQTLLGISAAAIILILILIVKFRIHALLTLVIVSLLTALATGLPTGSIVNDVLVKNFGGTLGGVALLVGLGAMLGRLVETSGGAQSLADALIRMFGEKRAPFALGVASLIFGFPIFFDAGLIVMLPIVFATARRMKQDVLPFALASIGAFSVMHVFLPPHPGPIAASEFYGANIGQVLILGLPTAFITWYFSGYMLGKVLGRTIHVPVPELLSGGTQDNDLPKEPAKAGTVVAIMLIPMLLIFLNTGVSALISEKLVSADETWVQTAKTIGSTPIALLISVLVALFVLGRKRGESGSALEKTVDGALAPVCSVILITGAGGMFGGVLRASGIGKALADSMADLGIPVLLGCFLVALALRIAQGSATVALTTAAALMAPAVAAAGFTDWQLACIVLATAAGSVGCSHFNDSGFWLVGRLLDMDVPTTLKTWTVNQTLIALIGFALSALLFAIV

SEQ ID NO: 19334 - protein, 139 aa, Neisseria meningitidis
MGKIQILNKLPTKNPATIPFDAASNSFFRILEARNEYKKIAAQEKTKREVIGAWRDVRLAELKNQQEILRLYLENTFKERRKMIDGLFEALDKGMEAGNIHVIDTAINGIVSIAKDSPLKQVDNLIAALKNDNVKVIDF

SEQ ID NO: 19335 - protein, 989 aa, Neisseria meningitidis
MKTSELRQKFLKFFETKGHTVVRSSSLVPHDDPTLLFTNAGMNQFKDVFLGFDKRPYSRATTAQKCVRAGGKHNDLENVGYTARHHTFFEMMGNFSFGDYFKRDAIHFAWEFLTSPEWLNIPKDKLLATVYAEDDEAYNIWLNEIGMPSERIVRIGDNKGAKYASDNFWQMGDTGPCGPCSEIFYDHGEEIWGGIPGSPEEDGDRWIEIWNCVFMQFNRDEQGNMNPLPKPSVDTGMGLERMAAVMQHVHSNYEIDLFQDLLKAVARETGAAFSMEEPSLKVIADHIRSCSFLIADGVLPSNEGRGYVLRRIIRRAVRHGYKLGQKQAFFYKLVPDLVKAMGDAYPELKEKQTQIMEALRAEESRFGETLEKGMGLFNQVYNELKFNQIFDLLAKEFKVTPVEDIDLDMFSTRNFVGRSAEIPYISNQHPNVDYPAPMGNVNEKIYAMPVRLTDGRIGINIFPTDETARLILSNDWNSLRFYSFCNSLITYYQQKGQLETLKLNGEHIFKLYDTYGFPYDLTADICRERNIELDEAGFEREMEAQRTRARAAQSFKANAQLPYDGQDTEFKGYSERQTESKVLALYKDGEQVNELNEGDEGAIVIDFTPFYAESGGQVGDVGYIFAGENRFEVRDTQKIKAAVFGQFGVQTSGRLKVGDSVTAKVDDEIRNANMRNHSATHLMHKALRDVLGGHVEQKGSLVTAESTRFDISHPQAVTAEEIAEVERRVNEAVLANVAVNAAIMSMEDAQKTGAMMLFGEKYGEEVRVLQMGGFSTELCGGTHVSRTGDIGLFKIISEGGIAAGVRRIEAITGLNALKWAQEQERLVKDIIAETKAQTEKDVLAKIQAGAAHAKALEKELARAKAELAVHAGAKLLDDAKDLGAAKLVAAQIEADAAALREIVTDLTGKSDNAVILLAAVNDGKVSLCAGVSKPLTGKVKAGDLVKFAAEQVGGKGGGRPDLAQAGGTDAGKLPAVLDSVKDWVGAKLA

SEQ ID NO: 19336 - protein, 267 aa, Neisseria meningitidis; identical to SEQ ID NO: 2269

SEQ ID NO: 19337 - protein, 149 aa, Neisseria meningitidis; identical to SEQ ID NO: 628

SEQ ID NO: 19338 - protein, 196 aa, Neisseria meningitidis; identical to SEQ ID NO: 5310

SEQ ID NO: 19339 - protein, 274 aa, Neisseria meningitidis; identical to SEQ ID NO: 5721

SEQ ID NO: 19340 - protein, 42 aa, Neisseria meningitidis
MPIEDIPFYIFDLADFDVGIGDIGNIVGFAPSSSLPKSKKMP

SEQ ID NO: 19341 - protein, 230 aa, Neisseria meningitidis
MPSETASDGIVSTRRKPMKAFTKITAIVAPLDRSNVDTDAIIPKQFLKSIKRSGFGPNAFDEWRYLDHGEPGMDNSKRPLNPDFSLNQPRYQGAQILLTRKNFGCGSSREHAPWALDDYGFRAVIAPSFADIFFNNCYKNGLLPIVLTEEQVDRLFKEVEANEGYRLSIDLAGQTLTTPGGETLAFDITEHRKHCLLNGLDEIGLTLQHADEIHAFEEKRRQSQPWLFNG

SEQ ID NO: 19342 - protein, 178 aa, Neisseria meningitidis; identical to SEQ ID NO: 2748

SEQ ID NO: 19343 - protein, 218 aa, Neisseria meningitidis
MNRQKVIAIDGPGASGKGTVAARVAAALGYDYLDTGALYRLTALYAQKQGVGWHDEENVSELAKKLPAVFSGSRILLGGEDVSDGIRTEAIGMGASAVAQLPKVRAALLQRQRDFLTEKGLVADGRDTGSVVFPQAELKIFLTAESKIRAERRAKQIGIPCEGLAFERILSDIEARDEADRNRKVAPLKQQPDALLLDTSRLTIEETVKKVLDWYRKV

SEQ ID NO: 19344 - protein, 192 aa, Neisseria meningitidis
MSEQTQQQNSEEAVENVEAVETVETVGNVDGVQEQAAAEPAYEDLQARIAELEAQLKDEQLRALANEQNLRRRHQQEIADTHKFAGQKFAVEMLPVKDYLEMALLDQSGNFDALKMGVQMTLNELQKAFDATQIKEINPKAGDKLDPNIHQAMQAVASEQEPNTVVGVMKKGYTLSDRVLRPAMVTVAQKEA

SEQ ID NO: 19345 - protein, 58 aa, Neisseria meningitidis
MAILLKKLKENFAQNGQTLAQWARENGFKPRDVYLVVGGQRKGNYGKGHEIAKKLGLK

SEQ ID NO: 19346 - protein, 461 aa, Neisseria meningitidis; identical to SEQ ID NO: 7704

SEQ ID NO: 19347 - protein, 223 aa, Neisseria meningitidis
MKTVSTAVVLAAAAVSLTGCATESSRSLEVAKVASYNTQYHGVRTPISVGTFDNRSSFQKGIFSDGEDRLGSQAKTILVTHLQQTNRFNVLNRTNLNALKQESGISGKAHNLKGADYVVTGDVTEFGRRDVGDHQLFGIFGRGKSQIAYAKVALNIVNVNTSEIVYSAQGAGEYALSNREIIGFGGTSGYDATLNGKVLDLAIREAVNSLVQAVDNGAWQPNR

SEQ ID NO: 19348 - protein, 99 aa, Neisseria meningitidis
MKKMFVLFCMLFSCAFSLAAVNINAASLQELEALPGIGPAKAKAIAEYRAQNGAFKSVDDLTKVKGIGPAVLAKLKDQASVGAPAPKAPAKPATTAVKK

SEQ ID NO: 19349 - protein, 172 aa, Neisseria meningitidis
MLSETPFSLSESRHYEFEGNSTIIRHSDFQTASRPSNRTQTKRKYMFRTMLGGKIHRATVTEADLNYVGSITVDQDLLDAAGIYPNEKVAIVNNNNGERFETYTIAGKRGSGVICLNGAAARLVQKGDIVIIMSYVQLSEPEIAAHEPKVVLVDGNNKIRDIISYEPPHTVL

SEQ ID NO: 19350 - protein, 392 aa, Neisseria meningitidis; identical to SEQ ID NO: 276

SEQ ID NO: 19351 - protein, 237 aa, Neisseria meningitidis
LRRQFAASDACRTGLKEGEIMGLGMEIGKLIVAFLVLINPFSALSLYLDLTNGHSTKERRKVARTAAVAVFAVIAVFALIGGTLLKVLGISVGSFQVGGGILVLLIAISMMNGNDNPAKQNLGAQPETGQVRPARNAGAIAVVPIAIPITIGPGGISTVIIYASAAKTYSDIALIIVAGLVVSAICYAILIVAGKVSRLLGATGLTILNRIMGMMLAAVSVEIIVSGLKTIFPQLAG

SEQ ID NO: 19352 - protein, 206 aa, Neisseria meningitidis; identical to SEQ ID NO: 12065

SEQ ID NO: 19353 - protein, 393 aa, Neisseria meningitidis
MIIDVKVPMLSESVSEGTLLEWKKKVGEAVARDEILIDIETDKVVLEVPSPQAGVLVEIVAQDGETVVADQVLARIDTAATAAAEAPVAAPAEAAPAAAPAAAQNNAAMPAAAKLAAETGVDVNALQGSGRDGRVLKEDVQNAAAKPAAAAAPAVALPAGARPEERVPMSRLRARVAERLLASQQENAILTTFNEVNMKPIMDLRAKYKEKFEKEHGVKLGFMSFFVKAAVAALKKYPVVNASVDGKDIVYHGYFDIGIAIGSPRGLVVPILRDADQMSIADIEQAIVDYAKKAKDGKIAIEDLTGGTFSITNGGTFGSMMSTPIINPPQSAILGMHATKERAVVENGQVVVRPMMYLALSYDHRIIDGREAVLTLVAIKDALEDPARLLLDL

SEQ ID NO: 19354 - protein, 199 aa, Neisseria meningitidis; identical to SEQ ID NO: 1022

SEQ ID NO: 19355 - protein, 186 aa, Neisseria meningitidis; identical to SEQ ID NO: 104

SEQ ID NO: 19356 - protein, 220 aa, Neisseria meningitidis; identical to SEQ ID NO: 5269

SEQ ID NO: 19357 - protein, 389 aa, Neisseria meningitidis
MSEYLFTSESVSEGHPDKVADQVSDAILDAILAQDPKARVAAETLVNTGLCVLAGEITTTAQVDYIKVARETIKRIGYNSSELGFDANGCAVGVYYDQQSPDIAQGVNEGEGIDLNQGAGDQGLMFGYACDETPTLMPFAIYYSHRLMQRQSELRKDGRLPWLRPDAKAQLTVVYDSETGKVKRIDTVVLSTQHDPSIAYEELKNAVIEQIIKPVLPSELLTDETKYLINPTGRFVIGGPQGDCGLTGRKIIVDTYGGAAPHGGGAFSGKDPSKVDRSAAYACRYVAKNIVAAGLATQCQIQVSYAIGVAEPTSISIDTFGTGKISEEKLITLVREHFDLRPKGIVQMLDLLRPIYSKSAAYGHFGREEPEFTWERTDKAAALRAAAGL

SEQ ID NO: 19358 - protein, 191 aa, Neisseria meningitidis
MPSENPIGKTMKSIDEQSLHNARRLFESGDIDRIEVGTTAGLQQIHRYLFGGLYDFAGQIREDNISKGGFRFANAMYLKEALVKIEQMPERTFEEIIAKYVEMNIAHPFLEGNGRSTRIWLDLVLKKNLKKIVNWQNVSKTLYLQAMERSPVNDLELRFLLKDNLTDDVDNREIIFKGIEQSYYYEGYEKG

SEQ ID NO: 19359 - protein, 173 aa, Neisseria meningitidis
LLPQNGVPEYGEKRPMQKIPLTVRGAELLKQELQQLKSVARPEVIEAIAEARSHGDLSENAEYEAAKERQGFIEGRISELEHKLSVAHIINPTEIHAEGKIVFGTTVTLEDLETEEHVTYQIVGEDEADIKQGKIYVGSPIARALIGKEEGDTAEVQAPGGVREYDIIEVRYI

SEQ ID NO: 19360 - protein, 335 aa, Neisseria meningitidis; identical to SEQ ID NO: 18123

SEQ ID NO: 19361 - protein, 85 aa, Neisseria meningitidis
LFLYIPLPTVIAIQSNIMAIVSTPHPALSALIILAHYHGIAAKSLGLKAKVVRQPVKRLAMVTLPALVWCDDGNHFKEKWLFSAF

SEQ ID NO: 19362 - protein, 447 aa, Neisseria meningitidis
VKNLMVAAATAGVADKIGASALNNVSDKQWINNLTVNLANAGSAALINTAVNGGSLKDNLEANILAALVNTAHGEAASKIKQLDQHYIAHKIAHAIAGCAAAAANKGKCQDGAIGAAVGEIVGEALVKNTDFSRMSATEIEKAKAKITAYSKLVAGTASAVVGGDVNTAANAAQIAVENNTLYPRCVGAKCDEFQKEQQKWIRENPEEYREVLLLQTGFIPIIGDIQSFVQAQTAADHLFALLGVVPGIGESIQAYKVAKAAKNLQGMKKALDKAATVATAQGYVSKTKIKIGQTELRVTAATDKQLLKAIGEGRDTTGKMTEQLFDSLAKQNGFRVLSGGKYGGNNGFDHVWQAADGSVVLIVESKQIRNGTVQLNPNGAGGYTQMSEDWIRQVLDQLPDGSPAKAAVFKANKNGTLKTAIAGVDRQTGKAVILPVKVPSKANIRR

SEQ ID NO: 19363 - protein, 107 aa, Neisseria meningitidis; identical to SEQ ID NO: 875

SEQ ID NO: 19364 - protein, 841 aa, Neisseria meningitidis
MNPNSKHNTNLTNLLKPSDSDIKQFAAQHIRHLTDLLNRYAYEYYTLDAPSVPDAEYDKLFRELEALERNHPELKLPDSPTQRVGGEPLAGFAEVRHEVPMLSLTNAFSPQDENGVFDHAEMYAFDQRVRDGLDGGNPEYVIEPKFDGLAISLLYRDGVLIQAATRGDGTTGEDVTQNIKTVSNIPLRLHGENTPELIEVRGEVLMQKADFAALNKRQAENGQKPFANPRNAAAGSLRQLDSRITAQRKLHFFPYSVARQQGGFVAEEHIQELAYFQALGFSLPNGNFGCFKNIDEVLAFYGHMQQKRPELPYEIDGMVVKVNSLAQQHELGFISRAPRWAVAHKFPAEEALTIVEAIDVQIGRTGAVTPVARLQPVFVGGVTVTNATLHNQDEVSRKDVRVGDTVVVRRAGDVIPEVVRVIFERRPMQETAVAVSDGIGHRQDDLFAEAPAANQTQSVPLYKPYRLPTHCPICRSEIEREEGEAVARCSGGMLCQAQRAQGLIHFASRKAMDIDGLGEKQIEQLVAQDLVRHFADLYRLDIPTLQKMKETADKTVAESDQMPSEGSSVGASGKHKKQPTKWAENILAGIESGKTPELARFLFALGIRHVGERTAKTLAQAFGTLERVRRAPEPVLACLPDIGTVVAHSIAHFFAQAEQQAMIDELLAAGVAPQTQAVTIPPARHAEPQRWIARLPDFKISENKAQALWELAGKNIEGLQNDKALPADWQAWRSEPQNAALLENLKTFFAQMPSEDEAAQGSDGINKAVAGKTFVLTGTLPTLKRDQAQALIEAAGGKVSGSVSKKTDYVVAGEAAGSKLEKANALGVSVLSEAELLTLLG

SEQ ID NO: 19365 - protein, 171 aa, Neisseria meningitidis
MPKLHMFYLGGNAGRSNIEVHDIQFAVCDDYREAIPALKAAWFGDADKIHIDGWQVVEWADGYDIAVSEMPKTEMPSEHAPRLYFANVGGYRAGQLAEAHAFGLFTAATPAEAKQKALQTLLTDHVQQHKDNLKDVDNLLALDRIGNFHIRLTPNPHGKPAEIGFQGYLPI

SEQ ID NO: 19366 - protein, 97 aa, Neisseria meningitidis; identical to SEQ ID NO: 2609

SEQ ID NO: 19367 - protein, 178 aa, Neisseria meningitidis
MSSESASFNEVKNLKQQAIPSPTLKPKTKILWRVIAETSLPAAHSFSPSNSPTRNRACLSNISTSRAAYMDVQKQYSFETVAVCVLPNHIHAIWTLPPDDADYSLLRRLIKTKFSAYSPYTKNLSAGKQRQHERGIWQRRFYGHTVRDETDLQRCADYIHSNPIKQKMSRAKTESCKK

SEQ ID NO: 19368 - protein, 612 aa, Neisseria meningitidis
MCGIVGAIRAHHNVVDFLTDGLKRLEYRGYDSSGIAVNTDGKIKRVRRVGRVQLMEDAAREKGIAGSIGIGHTRWATHGGVTEPNAHPHISGGMIAVVHNGIIENFESERKRLEGLGYRFESQTDTEVIAHSINHEYAQNGGRLFEAVQEAVKRFHGAYAIAVIAQDKPDELVVARMGCPLLVALGDDETFIASDVSAVIAFTRRVAYLEDGDIALLASDGIKRLTDKSGLPAERKVKVSELSLASLELGPYSHFMQKEIHEQPRAIADTAEVFLDGGFIPENFGKNAKSVFESIRSVKILACGTSYYAALTAKYWLESIAKIPADVEIASEYRYRSVIADPDQLVITISQSGETLDTMEALKYAKSLGHRHSLSICNVMESALPRESSLVLYTRAGAEIGVASTKAFTTQLVALFGLAVTLAKVRGLVSEEDEARYTEELRQLPGSVQHALNLEPQIAAWAQQFAKKTSALFLGRGIHYPIALEGALKLKEITYIHAEAYPAGELKHGPLALVDENMPVVVIAPNDSLLDKVKANMQEVGARGGELFVFADLDSNFNATKGVHVIRAPRHVGKLSPVVHTIPVQLLAYHTALARGTDVDKPRNLAKSVTVE

SEQ ID NO: 19369 - protein, 417 aa, Neisseria meningitidis; identical to SEQ ID NO: 3021

SEQ ID NO: 19370 - protein, 60 aa, Neisseria meningitidis; identical to SEQ ID NO: 6474

SEQ ID NO: 19371 - protein, 540 aa, Neisseria meningitidis
METIPAAQNKAVSPSFSDGISGQTVNNSDKMLYSRPLPRRPKPPFGKAEMISKQEYQAQAAQGYNRIPLVQELLADLDTPLSLYLKLANRPYTYLLESVVGGERFGRYSFIGLPCSHYLKASGKHVDVYQNGEIVEQHDGNPLPFIEAFHNRFKTPEIPSLPRFTGGLVGYFGYETIYNFEHFAHRLKNTTKADPLGTPDILLMLSQELAVIDNLSGKIHLVVYADPSQPDGYERARERLEDIRTQLRQSCAIPLSLGSKHTEAVSEFGEEPFKACVNKIKDYIFAGDCMQVVPSQRMSMEFTDSPLALYRALRTLNPSPYLFYYDFGDFHIVGSSPEILVRRERDDVIVRPIAGTRLRGKTPAEDLANEQDLLSDAKEIAEHVMLIDLGRNDVGRISKTGEVKVTDKMVIEKYSHVMHIVSNVEGRLKDGMTNMDILAATFPAGTLSGAPKVRAMEIIEEVEPSKRGIYGGAVGVWGFNNDMDLAIAIRTAVVKNNTLYVQSGAGVVADSDPASEWQETQNKARAVIRAAQMVQEGLDK

SEQ ID NO: 19372 - protein, 173 aa, Neisseria meningitidis
MSCFSIKRMSAFRARITAFFAAFVFLTAALPAYAERLPDFLAKIQPSEIFPGADRYGKPEGKPMVARVYKGDEQLGLVYITTDAVNTRGYSSKPIDTLMALAKDGTIAGAKLVDHHESIMLIGIPHLPAPGRAIRSNWLPAYIKPNFISTNRLRLKGLPTVLQPSKGTGAGVP

SEQ ID NO: 19373 - protein, 644 aa, Neisseria meningitidis
MATEPNRTEPNRTEIIHDLEDNFKQNNILKLKQLFPEVFCEDQIDFEKLKLVLGAENLAGAGERYQLDWAGKTASYLNLQSPTSRTLVPCKEESADFDGTQNVFIEAENLEALKILQKSYAGSVKMIYIDPPYNTGNDSFVYPDKFSESREEYARRVGDTDDAGYLKRDGVFQGAWRKNGKDSGHYHSNWLSMMLPRLHLAKTLLREDGVIFISIDDNEQAQLKLLCDEVFGAENFVGQFPWRKRTAKSDVPFGVSADYEYLLAYARSNAFIASIDAEERRYFETDDFPNRPWRTHDLTTQRNASERPNSFFTMVNPKTGKEYPANPNATWRVTKDTFQEYYNAGKIVFPDDYDFLKIKNPVMRYFKDDDMKKDGERFGRKAVSTRLPENVGMSLNGTKEITELFKSKLFDFPKPSSLIKYLLQILHVSDGLILDFFSGSGTTAHAVMQLNAEDGGCRRFICVQLPEETDEKSEARKAGFNTIAEIAKERIRRAGRQISDGLQEGAEIDTGFKVFKLAESGFKQWRQPEQSDTEALQGELSLNIDSVLSEMPSENLLYELMLRLGLKLTCKISLSDGVYFVEDEDTGGLYAFLLERVNQDLIDAVLAKHPVKAVVLDRLFDGDDALKGNTVLQMKDAGVMFECV

SEQ ID NO: 19374 - protein, 255 aa, Neisseria meningitidis
MSSNKASFFTRLRRLCRLAVWLFKTGKNLRGIDGGCPESRNRAVIELGRGVLAALDIGLEVGRPAPEHPNGVLVAANHVSWLDIFAMSAVYPSSFIAKQEIKSWPVLGKMGQNAGTVFINRNSRRDIEPINRAVCETLQRGQNVSFFPEARTSSGLGLLPFKAALFQSAIDAGAKVLAVALRYYDETGKRTARPSYADVGLPTCLWRIVSMKKLTIKVDFVCVADAAESEDRYALKDKIEESIRAVVADDADIAV

SEQ ID NO: 19375 - protein, 384 aa, Neisseria meningitidis
MTETTQTPTFKPKKSVALSGVAAGNTALCTVGRTGNDLSYRGYDILDLAQKCEFEEVAHLLIHGHLPNKFELAAYKAKLKSMRGLPIRVIKVLESLPAHTHPMDVMRTGVSMLGCVHPERESHPESEARDIADKLIASLGSILLYWYQYSHNGKRIEVESDEETIGGHFLQLLHGKRPSESHIKAMHVSLILYAEHEFNASTFTARVIAGTGSDMYSSITGAIGALKGPKHGGANEVAYDIQKRYRNADEAEADIRERIGRKEIVIGFGHPVYTISDPRNVVIKEVARGLSKETGDMRLFDIAERLESVMWEEKKMFPNLDWFSAVSYQKLGVPTAMFTPLFVISRTTGWSAHVLEQRKDGKIIRPSANYTGPEDLAFVEIEDR

SEQ ID NO: 19376 - protein, 469 aa, Neisseria meningitidis
LFEFKENKMIVTSRWPLLEKAFLRFGMPVAVVDLESTGGNLYEDRVTEVALVKFEQGRVVRHEWLVNPQKPIPQFVAGLTGISDGMVADAPVFAEIAGELFSVLKGCVLVAHNSRFDYTFLKHEFHRAGIGFSSPALCSVQLSRCLYPQFYKHSLDSIIERLGIVVEDRHRAMADVSALCDYLEYSLSEHGVEAWIRQCFRLMNPKPLPAALPERLREQLYGLPDSMGVLACFDGGGKVNYIGTFERVYSEVSALLDSGKAPFDWCNTEEVRFFPALGSLHAYKIKAELVGRYHSGCYVSAKNLLKTFTTVRFEKGSDGMLNAKTAALKNGVTDNPPTGLFANKKAARRALSSWAETYGLCPASAGILPDGYAEDEPCPVYVSGRCDKACGRSDEQVLAFAHKLPILDWGKMHEVEITETDPLTGEKVVLHGMGGALEMGDGLWYFDKDLPDAFKAKFKTDRKNIKEIG

SEQ ID NO: 19377 - protein, 157 aa, Neisseria meningitidis
MEQKGFTLIEMMIVVAILGIISVIAIPSYQSYIEKGYQSQLYTEMVGINNISKQFILKNPLDDNQNIKSKLEIFVSGYKMNPKIAEKYNVSVHFVNKEKPRAYSLVGVPKKGTGYTLSVWMNSVGDGYKCRDAASAQAHLETLSSDVGCEAFSNRKK

SEQ ID NO: 19378 - protein, 348 aa, Neisseria meningitidis
MIPATYTLSQITARLGGEWRGEDISVTAVRPLADAQAEHISFLANPKYKAEVHDSSAGAVIVSAKAADGFEGRNLIVADDPYLYFAKVARLFSPVVKARGGIHPTAVVEPGATVPASCEIGSNAYIGANTVLGEGCRILANAVVQHDCKLGDEVVLHPNAVVYYGCTLGRRVEIHSGAVIGADGFGLAFAGDSWFKIPQTGAVTLGNDVEIGSNTNIDRGAMSDTTVGNGTKIDNQVQIGHNCKIGSHTVIAAKTGISGSVTIGSYCIIGGGVGTVGHIEIADKTTIGGGTSVTHSITESGKHLAGIFPMSTHKEWARNAVYIHRLSEMNKRLKTLEQQLSDAGQDSK

SEQ ID NO: 19379 - protein, 296 aa, Neisseria meningitidis
MSVLINKDTKVLVQGFTGKNGTFHSEQALAYGTKVVGGVTPGKGGQTHLNLPVFNTMKEAVKETGADASVIYVPAPFVLDSIVEAVDSGVGLVVVITEGVPTLDMLKAKRYLETNGNGTRLVGPNCPGVITPGECKIGIMPGHIHTPGRIGIISRSGTLTYEAVAQTTKLGLGQSTCIGIGGDPIPGMNQIDALKLFQEDPDTDAIIMIGEIGGTAEEEAAEYIQSNVSKPVVGYIAGVTAPKGKRMGHAGAIISGGKGTAEEKFAAFEKAGIAYTRSPAELGTTMLEVLKTKGLA

SEQ ID NO: 19380 - protein, 311 aa, Neisseria meningitidis
MGHNMMTTQKWYEHITNVIIGNTANFNSGCPESIDYVDEKKGVPLAAMKYILMYTEAAASHAYLFEHDLKKFKQYAYVAGKLGILQSVDDEDPEPFFFPCDMLNIQDPMFLMLMSDSPQLREFLVRNIDNIANDTEAFINRYDLNRHMIYNTLLMVEGKQLDRLKQRSEKVLAHPTPSKWLQKRLYDYRFFLAFAEQDAEAMKAALEPLFDKKTARMAAKETLSYFDFYLQPQIVTYAKIASMHGFDLGIDQEIAPRDLTVYDPLPADEYQDIFDFMKQYDLSYPYEYLQDWIDYYTFKTDKLVFGNAKRE

SEQ ID NO: 19381 - protein, 106 aa, Neisseria meningitidis; identical to SEQ ID NO: 3331

SEQ ID NO: 19382 - protein, 467 aa, Neisseria meningitidis; identical to SEQ ID NO: 3712

SEQ ID NO: 19383 - protein, 559 aa, Neisseria meningitidis
MIYGSMPSEKLTIFQTAFVMQVNIQIPCMLYRRGSVKPPLFEAPRLLPSFTDPVVPKLSAPGGYIVDIPKGNLKTEIEKLAKQPEYAYLKQLQVAKNVNWNQVQLAYDKWDYKQEGLTRAGAAIIALAVTVVTAGAGVGAALGLNGAAAAAADAAFASLASQASVSLINNKGDVGKTLKELGRSRTVKNLVVAAATAGVSNKLGASSLATWSETPWVNNLNVNLANAGSAALINTAVNGGSLKDNLEANILAALVNTAHGEAASKIKQLDQHYIAHKVAHAVAGCAAATANKGKCQDGAIGAAVGEIVGEALVKNTDFSDMTPEQLDLEVKKITAYAKLAAGTVAGVTGGDVNTAAQTAQNAVENNAVKAVVTAAKVVYKVARKGLKNGKINVRDLKQTLKDEGYNLADNLTTLFDETLDWNDAKAVIDIVVGTELNRANKGEAAQKVKEVLEKNRPYIPNKGAVPNMSTYMKNNPFGKQLAQISEKTTLPTQQGQSVFLVKRNQGLLKTGDRFYLDGQHKNHLEVFDKNGNFKFVLNMDGSLNQMKTGAAKGRKLNLK

SEQ ID NO: 19384 - protein, 735 aa, Neisseria meningitidis
MFPDQSAPNLLQGLNPEQLSAVTWPPQSALVLAGAGSGKTRVLTTRIAWLLQTGQASVHSIMAVTFTNKAAKEMQTRLGAMIPVDVRAMWLGTFHGLCHRFLRLHHRDAGLPSSFQILDGGDQLSLIKRLLKSLNIAEEIIAPRSLQGFINAQKESGLRASVLSAPDPHTSRMIECYAEYDKICQREGVVDFAELMLRSYEMLQSNEILRQHYQNRFNHILVDEFQDTNKLQYAWLKLMAGGNAAVFAVGDDDQSIYRFRGANVGNMTALMEEFHINAPVKLEQNYRSVGNILAAANAVIENNDERLGKNLRTDAEAGDKIRYYSAFTDLEEARFIVDETKALEREGWDLDEIAVLYRSNAQSRVIEQSLFRSGIPYKIYGGLRFYERQEIKHALAYLRLAVNPDDDNALLRVINFPPRGIGARTIENLQTASNEQGITLWQAACNAGAKATKVAAFVRLIEALRNQVGQMPLPEIIVGILKDSGLTEHYKTQKGDNQDRLDNLDELVNAAIEFKPEDSNFEILPENISDDPAFPILAFLSNATLESGENQAGVGEKAVQLMTVHAAKGLEFNAVFLTGMEEGRFPSEMSLAERGGLEEERRLMYVAITRARKRLYITMAQQRMLHGQTQFGIVSRFVEEIPPEVLHYLSVKKTAYDSYGSPRQTAASKDKIIDDYKQPQTYAGFRIGQNVRHAKFGTGVIIDAADKGESARLTINFGKQGVKELDTKFAKLEAM

SEQ ID NO: 19385 - protein, 92 aa, Neisseria meningitidis; identical to SEQ ID NO: 10783

SEQ ID NO: 19386 - protein, 336 aa, Neisseria meningitidis
MSKKRVLTGVTTTGIPHLGNYVGAIRPAVRAAQNPDTESFLFLADYHGIIKCHEPEMIHQSTQAVAATWLACGLDPERTTFYRQSDIPEVMELNWILTCITAKGLMNRAHAYKAAVQANAENNQEDPDFGVEMGLFSYPILMTADILMFNANEVPVGRDQIQHVEMARDIAGRFNHRFKEIFTLPEVKIDENVELLVGLDGRKMSKSYGNTIPLWENDKKTQKSVNKIITNMKEPGEPKQPDESPLFEIYKAFSTPSETVEFTKMLADGLAWGEAKKLLAAKINAELAEPRERYNELTADPSQIEEILQAGAQKARKEARELLDKVRDAVGIRPLK

SEQ ID NO: 19387 - protein, 447 aa, Neisseria meningitidis
MFHSVNVFTGETLYRRPAQDYAEFERRLADLKMRGGAFAQLGVTERAARLQKFADRLEAEKERFAEMVCEEVGRCLHECRAEIGKSIELIRYYARLAPELLAHKTIATQASLSQVRFEPLGVVFAVMPWNYPVWQVLRFAVPAMCAGNACAVKPAPSVARVSQALFDLASDGIPLAGVWLDEAGTLKAVEDTDAMAFTGSTHTGRILAAHAGANLKKTVLELGGSNAFIVMPDADLERAAAEACYSRFRDAGQSCNAAKRIIVTEAAADRFITLFLAECAKLKMGDPKHPDTTLAPLHREDLRDRVHGQVEDAVSNGAVCLTGGKIPQGRGWFYPATVLDRVNPACRVWREEVFGPAALILRAENEEHAIRLANDSPFGLGACIYTADTGCAWRFAEKIQAGSVFINRHTSSDLRLPFGGVKDSGYGRELSEFGLYEFVNVKTYWQK

SEQ ID NO: 19388 - protein, 284 aa, Neisseria meningitidis
MSAQLINGKEVSQKRLQAVAEAVAQRQQDNLHMPCLAVVLVGGDPASAVYVRNKKTACQKCGIKSLSYELPESTSQEELLALVDRLNADSEVDGILVQLPLPKHLDSQAVLERISPDKDVDGFHPYNVGRLAVKMPLMRPCTPKGVMTLLEAYGIDPKGKKAVVVGASNIVGRPQALELLLARATVTVCHSATENLADEVAGADILVVGVGIPNFVKGEWIKPGAVVIDVGINRLDDGSLCGDVKFETAKERAAMITPVPGGVGPMTIATLMENTLHAASLHDA

SEQ ID NO: 19389 - protein, 295 aa, Neisseria meningitidis
MQKSKLSWFLKLMLALSLAFLYIPLVVLVIYSFNESKLVTVWGGFSTKWYGALLENDTILEAAWLSLRIAVVSSLAAVVLGTLAGYAMARIKRFRGSTLFAGMISAPMVMPDVITGLSMLLLIIQVQIFLQGSEWLQHLYFDRGFFTIFLGHTTLCMAYITVVIRSRLVELDQSLEEAAMDLGARPLKIFFVITLPLIAPAIASGFLLGITLSLDDLVITSFLSGPGSSTLPQVIFSKIKLGLDPQMNVLATILIGIIGTLVIIVNYWMMRQATRRDREAAEAYRQEKLAAEKAH

SEQ ID NO: 19390 - protein, 483 aa, Neisseria meningitidis
VNYFPIFANLAGRPVLVVGGGAVAARKISLLLKAGAEVRVAAKHLNAELSALAAENKILWLAEEFRAEHIRTVFLIIAASSDQALNRRVFHLAESCQKPVNVVDDRDHCSFIFPSVIDRNPVQIAVSSSGSAPVLARLLRERLEALLPPSLGDMAEISGRWRDAVKDKLKSVTERRRFWEKQFNGRFAALVKNRQNTLAERELAGQLEQSRQNDQGGSVSLVGAGPGDAGLLTLKGLQEIQQADVVLYDALVSDGILSLVRRDAERIFVGKRARGDRTPQEDTNALMVRLAREGRRVVRLKGGDPFVFGRGGEELETLARHQIPFSVVPGITAAVGATAYAGIPLTHRDYAQSAVFVTGHRKADAPDIEWQTLARSRQTLVIYMGALKAALIAERLQQHGRSPDTPAAVISQGTLPAQKTATGTLANLAELAETAPNPALIVIGEVVGLHEKLAWFGENGEGENRVGQAYPALGGLNAGQRAA

SEQ ID NO: 19391 - protein, 274 aa, Neisseria meningitidis
MKWLFTLLAVLNIAVFGGTVGYKLAVKATGGVPENRAVENTPPATPAADNAAASVEDTAALLKPGDILTEEQAEQLRLKKEAEQKKLREKKQREEKARREKLAAEKAQAERENGAADALCAAQASLTMDEDDYHRIKGLLGKWSHVASRSVEKRTAQAKPADKTYRVVLPVSADAENQAAELSAKGFNPIPFDGALSLGVGNSRENAQALQNRLAGAGFGGAHIVEHFAEADRQDDSLSVSRMTVLFTGVNAADAEEIRKITSLYGKLNLKSCK

SEQ ID NO: 19392 - protein, 355 aa, Neisseria meningitidis
MGGKTFMLMAGGTGGHIFPALAVADSLRARGHHVIWLGSKDSMEERIVPQYGIRLETLAIKGVRGNGIKRKLMLPFTLYQTVREAQRIIRKHRVECVIGFGGFVTFPGGLAAKLLGVPIVIHEQNAVAGLSNRHLSRWAKRVLYAFPKAFSHEGGLVGNPVRADISNLPAPAERFQGRKGRLKILVVGGSLGADVLNKTVPQALALLPDNARPQMYHQSGRGKLGSLQADYDALGVKAECVEFITDMVSAYRDADLVICRAGALTIAELTAAGLGALLVPYPHAVDDHQTANARFMVQAEAGLLLPQTQLTAEKLAEILGSLNREKCLKWAENARTLALPHSADDVAEAAIACAA

SEQ ID NO: 19393 - protein, 169 aa, Neisseria meningitidis
MNPFETKSVTFAEPIEMLYACHGKVRRFCGQVAMLSDYIAENGCNQIVLQTIRQITRYFNVAAPLHHEDEEEDFFPLLLQYAPQAREGVDELLRQHIGLHDNWAAVSAEFAKLEADNAYVPDAEAFKRFVAGYDVHLAIEEPLFDMGNTFIPKEKLTEIGEIMAARRRK

SEQ ID NO: 19394 - protein, 489 aa, Neisseria meningitidis; identical to SEQ ID NO: 15549

SEQ ID NO: 19395 - protein, 200 aa, Neisseria meningitidis; identical to SEQ ID NO: 321

SEQ ID NO: 19396 - protein, 245 aa, Neisseria meningitidis; identical to SEQ ID NO: 428

SEQ ID NO: 19397 - protein, 138 aa, Neisseria meningitidis; identical to SEQ ID NO: 937

SEQ ID NO: 19398 - protein, 760 aa, Neisseria meningitidis
MTVFRICFIIRLFLKYLGWGDVFRRWFLPCWVVGAAASFALPVVPHWLFWLAAFAVFAVFARRFAFAGLMLCVLAGAAYGVFRTEAALSSQWWAEAVSGVPLTVEVADMPRSDGRRVQFAAKAVDSGGRTFDLLLSDYKRREWAVGSRWRITARVHPVVGELNLRGLNREAWALSNGIGGAGTVGADRVLLHGGSGWGIAVWRSRISRNWQQADADGGLSDGIGLMRALSVGEQSALRPELWQAFRPLGLTHLVSISGLHVTMVAVMFAWLAKRLLACSPRLPARPRAWVLAAGCAGALFYALLAGFSVPTQRSVLMLAAFAWAWRRGRLSAWATWWQALAAVLLFDPSAVLGVGTWLSFGLVAALIWACSGRLHEGKRQTALRGQWAASVLSLVLLGYLFASLPLVSPLVNAVAIPWFSWVLTPLALLGSVVPFAPLQQLGAFLAEYTLRFLVWLADVSPEFAVASAPLPLLVLAVCAALLLLLPRGLGLRPWAVLLLAGFVFYRSPGVPENEVAVTVWDAGQGLSVSVQTANHHLLFDTGTAAAAQMGIVPSLNASGIRYLDYLVLSHHDSDHDGGFQAVGKIPNGGIYAGQPEFYEGARHCAEQRWQWDGVDFEFLMPSERKNIDDNGKSCVLRVVAGGAALLVTGDLDTKGEESLVGKYGGNLYSQVLVLGHHGSNTSSSGVFLNAVSPEYAVASSGYANAYKHPTEAVQNRVRAHGIKLLRTDLSGALQFGLGRGGVKAQRLRGYKFYWQKKPFE

SEQ ID NO: 19399 - protein, 330 aa, Neisseria meningitidis
MKTHEISKDSVSLIGVAEHEAGQRLDNYLIKILKGVPKSHIHRIIRAGEVRLNKKRCKPDSRIAEGDTVRIPPVRVAEKEMPSERRAAVPARAFDVVYEDDALLVIDKPSGVAVHGGSGVSFGVIEQLRRARPEAKYLELVHRLDKDTSGLLMVAKKRSALVKLHEAIRNDHPKKIYLALGVGKLPDDNFHVKLPLFKYTGAQGEKMVRVSADGQSAHTVFRVLSRFSDGILHGVGLSHLTLVRATLKTGRTHQIRVHLQSQGCPIAGDERYGDYQANRRLQKLGLKRMFLHASELHLNHPLTGEPLVLKVGLPPDLAQFAVMLENGTKM

SEQ ID NO: 19400 - protein, 122 aa, Neisseria meningitidis; identical to SEQ ID NO: 6208

SEQ ID NO: 19401 - protein, 300 aa, Neisseria meningitidis
MFVFQTAFFMFQKHLQKASDSVVGGTLYVVATPIGNLADITLRALAVLQKADIICAEDTRVTAQLLSAYGIQGKLVSVREHNERQMADKIVGYLSDGMVVAQVSDAGTPAVCDPGAKLARRVREVGFKVVPVVGASAVMAALSVAGVAGSDFYFNGFVPPKSGERRKLFAKWVRAAFPIVMFETPHRIGATLADMAELFPERRLMLAREITKTFETFLSGTVGEIQTALAADGNQSRGEMVLILYPAQDEKHEGLSESAQNVMKILAAELPTKQAAELAAKITGEGKKALYDLAVSWKNK

SEQ ID NO: 19402 - protein, 207 aa, Neisseria meningitidis; identical to SEQ ID NO: 243

SEQ ID NO: 19403 - protein, 331 aa, Neisseria meningitidis; identical to SEQ ID NO: 1014

SEQ ID NO: 19404 - protein, 263 aa, Neisseria meningitidis
LQDSTMSDNALTSSRRFGGIARLYGDSALAHFSQAHVCVVGVGGVGSWAVEALARTGIGRLTLIDLDNVAESNVNRQLHALTGDFGKAKVTALRERVAQINPECQVFEIEDFVTEDNLPEYFGKGFDFVIDAIDQVRVKAAMAAYFVERKQPFVLSGGAGGQKNPALIQTADLSRVTHDPLLANLRYTLRKRYGFSRDTKANMRVPCVYSTENIVPPQSREACSADAAPQGLSCAGYGASMLVTASFGLYCAQAAVEHIADKK

SEQ ID NO: 19405 - protein, 261 aa, Neisseria meningitidis; identical to SEQ ID NO: 335

SEQ ID NO: 19406 - protein, 168 aa, Neisseria meningitidis; identical to SEQ ID NO: 673

SEQ ID NO: 19407 - protein, 244 aa, Neisseria meningitidis
MNAAAAKDYMKTVELNKSAGNVDTTSRTARRVQAVFRRMLPYADAANNTGHRFDWKMTVFKNDELNAWAMPGGKMAFYTGIVDKLKLTDDEIAAIMGHEMTHALHEHGKNKVGQQILTNTAAQIGTQIILDKKPDTNPELVGLGMDILGTYGLTLPYSRSLEEEADEGGMMLMAQAGYHPAAAVRVWEKMNQENDQNGFIYAITSTHPTNNARIENLKRLLPTVMPVYEQSVRNKGRVNKKRRR

SEQ ID NO: 19408 - protein, 375 aa, Neisseria meningitidis; identical to SEQ ID NO: 5166

SEQ ID NO: 19409 - protein, 436 aa, Neisseria meningitidis
MTDLFAREPDAPLAERLRPHTLDDVVGQEHLIGEGKSLRVAVEGGKPHSMLLWGPPGVGKTTLARILAQSFNAQFLPVSAVFSGVKDIRGAIDKAEIALQQGRATILFVDEVHRFNKAQQDAFLPYVENGLLTFIGATTENPSFEVNPALLSRAQVYVLQSLSSDDLKKLIAKVLALPEYQEFTIETDAQKLLVNTADGDARRLLNLLEQLLGAAETRRLKTLTAEFLADSLGAQIRRFDKGGESFYNQISALHKSVRGSHPNAALYWFCRMLDGGTDPRYLARRIVRIAWEDIGLADPRALQIANDAAATFERLGSPEGELALAQAVLYLAAAAKSNAGYKAYNQMRRFVKENASDEVPVHLRNAPTKLMKELGYGREYRYAHDEPNAYAAGESYMPDCLDEPDFYQPVPRGLEIKIGEKLEWLKSLDEEVLKAK

SEQ ID NO: 19410 - protein, 525 aa, Neisseria meningitidis
MSKFFKRLFDIVASASGLIFLSPVFLILIYLIRKNLGSPVFFIQERPGKDGKPFKMIKFRSMRDALDSDGIPLPDGERLTPFGKKLRAASLDELPELWNVLKGEMSLVGPRPLLTGYLPLYNDFQNRRHEMKPGITGWAQVNGRNALSWDEKFACDVWYTDNFSFWLDMKILFLTVKKVLIKEGISAEGEATMPYFTGNQTNEKNNILILSAGRRVELVQDFQTEAARFSDGISVFATDLNPRMSSACHVSDGSFEVPPISADSYIDSIFNLAVRENIGLIIPTIDTELQKLADERERFEAASVHIVVSDSDFIAQCRDKRKTATLFARYGIRSPEIYDRKKLVFPCFAKPYDGSRAIGAKRIDTPADLTPEVLADTKLMFCQFIDIENKFSEFTVDMYYDRQCRLKCAIPRKRLEVRSGEISKGVTCKNSLYQTLLEKMSVLQGARGCITAQFFYNEETGEFYGVEINPRFGGGFPLTYAAGGNYPSRLMREYLGDEEIPFSDDWENNLIMLRYDAKVLVHEND

SEQ ID NO: 19411 - protein, 206 aa, Neisseria meningitidis
MAQFFAVHPDNPQERLIKQAVEIVNKGGVVVYPTDSCYALGCKLGDKAAMERILSIRKIDLKHHLTLMCADLSELGTYAKVDNVQFRQLKAATPGPYTFILQATKDVPARTLHPKRKTIGLRIPDNAIAQALLGELGEPLLSCTLMLPEDGEPLTDPYEIRERLEHAVDLVIDGGWCGTEPTTVVDMTDGTELVRQGCGDTAVFGL

SEQ ID NO: 19412 - protein, 144 aa, Neisseria meningitidis; identical to SEQ ID NO: 19003

SEQ ID NO: 19413 - protein, 209 aa, Neisseria meningitidis
MRKSRLSRYKQNKLIELFVAGVTARTAAELVGVNKNTAAYYFHRLRLLIYQNSPHLEMFDGEVEADESYFGGQRKGKRGRGAAGKVAVFGLLKRNGKVYTVTVPNTQTATLFPIIREQVKPDSIVYTDCYRSYDVIRCERIPFLRNFVFVSITAHILLNDKTILMELRTFGTRQNVIYASLTAFPKRILSCIRSANGVLTTVRKFLFHF

SEQ ID NO: 19414 - protein, 390 aa, Neisseria meningitidis
MKQINQALQQKLVEFKEKSGMNQTQLARGIDTSPASISMYLNGTYAEKGGNYETIETKIEAFLEMQKSKARREELVLGFVATKTTRRIAEVMRNAHEGGETVVIYGQAGLGKTQAVKNYCEKNPAAILIEANPSFTALVLMRKLATAAKVSAMGSLNDLFESVSDRLRDSGRLIVVDEAENLPLRALEIIRRLHDETGCGLVLSGMPRLVANLRGKHGELVQLYSRVSVALNLGESLPDDELFEIAKAALPDAVKHLLPDSVQALITVIGFNETLELVRLMGGTTYPLRQGYTKNSQSRVAYLEEIIGSEAAGRLVEAMAPCNLFIPRCETALYELRNRKIRSQFDRQTAGGTPAYEAVNDLALAHRLSDRHVWRILKQADKEAEQENLF

SEQ ID NO: 19415 - protein, 328 aa, Neisseria meningitidis; identical to SEQ ID NO: 372

SEQ ID NO: 19416 - protein, 763 aa, Neisseria meningitidis
MLAPELEQILQQLYREARKAHYEFISLEHLLLVLIEEDASVPNVLKLCGADLKVVSEQLAASVAENTPLIPEHLLDTVETRPTLGFQRVMQRAMVHTQSAGKAAVEPLDVLVALMSETDSHTVYFLKLQSVTRFEVLRCIAHGSPDEDEDDGNYSSDGMDDDNENRTKPGKNPLSAYTVNLNAEVKAGRIDPLIGRKHEMERLVQILCRRRKNNPLLVGEAGVGKTALAEGLAHQIVNGGIPDALKDAEVYALDMGSLLAGTKYRGDFEARVKSVLKQLEKIPHAILFIDEIHTIIGAGSTSGGTMDASNLLKPALAKGSLRCIGATTYDEYRTIFDKDHALSRRFQKIDVVEPTVSETVQILRGLKPMFEAFHQVRYTQGALEAAAELSARYINERFLPDKAIDVMDEAGAAQRILPKSKQKKVIGKAQIETVIAKVARIPEKTVSHDDKQVLQFLGRDLKNMVYGQENAIDALVAAVKMSRSGLALPDKPIGSFLFSGPTGVGKTEAAKQLAYSLGVPLQRFDMSEYMERHAVSRLIGAPPGYVGFEQGGLLTEAVNKQPHCVLLLDEIEKAHPDIFNVLLQVMDAGKLTDNNGKSADFRNVILIMTTNAGAESLSRPSLGFTAKRERGDEMQAINKLFTPEFRNRLDAIIPFAPLSEPIIVKVVDKFLLQLEHQLLDKKVEAEFTSALHKYLAEKGFDPQMGARPMHRLIQEKIRKPLADELLFGKLSDGGFVRIDWDAAKEEAVLKFKKSKVKIKTASA

SEQ ID NO: 19417 - protein, 144 aa, Neisseria meningitidis
VKYEFTLPSSSGADFHSAEHLPLVVYFYPKDSTPGCTTEGLDFNARLEQFEALGYTVVGISRDGVKAHQNFCAKQGFRFELLSDKDETVCRLFDVIKLKKLYGKESLGIERSTFVLNKDGEIAHEWRKVKVAGHAQEVLETLSR

SEQ ID NO: 19418 - protein, 553 aa, Neisseria meningitidis
MTESITRDSMQYDVVIVGAGPSGLSAAIKLKQLAEQNGREISVCVVEKGSEAGAHSLAGAVIDPIALNELIPDWKEKGAPLTRTVTQDKVLFLTEKKAFNLPITPNFDNHGNYIVSLGEVVRWLAEQAENLGVEIYPGFAAAEVLYHEDGSVKGIATGNMGIGKDGEPTDSFQPGMELWAQQTLFAEGCRGSLSKQVIERFQLDQNSQPQTYGLGIKEIWEVPSEKHQPGLVVHSAGWPLDSKTYGGAFVYHFDDNKVAVGFVVGLDYQNPYLSPFEEFQRFKTHPEIRKTFEGGRRIAYGARSLIEGGLQSLPKLSFKGGVLIGDAAGFLNMPRIKGIHTAMKSAMLAAEAVFPLLENLEEVENFDSGKEAADYQQRFEQSWLYQELYAARNVRPSFKWGVYLGSIYTGIDQMIFRGKAPWTLKHHGKDNEQLKKAAACKPIDYPKPDGVLTFDRLSSVFLANLAHEENQPDHLVLNNPQTMIDVNYKEYASPETRYCPAGVYEIVEENGNPRLQINAANCVHCKTCDIKDPTQNITWICPEGASGPNYGGM

SEQ ID NO: 19419 - protein, 136 aa, Neisseria meningitidis; identical to SEQ ID NO: 2700

SEQ ID NO: 19420 - protein, 65 aa, Neisseria meningitidis; identical to SEQ ID NO: 981

SEQ ID NO: 19421 - protein, 235 aa, Neisseria meningitidis; identical to SEQ ID NO: 1248

SEQ ID NO: 19422 - protein, 124 aa, Neisseria meningitidis; identical to SEQ ID NO: 6571

SEQ ID NO: 19423 - protein, 228 aa, Neisseria meningitidis
MFDFGLGELVFVGIIALIVLGPERLPEAARTAGRLIGRLQRFVGSVKQEFDTQIELEELRKAKQEFEAAAAQVRDSLKETGTDMEGNLHDISDGLKPWEKLPEQRTPADFGVDENGNPFPDAANTLLDGISDVMPSERSYASAETLGDSGQTGSTAEPAETDQDRAWREYLTASAAAPVVQTVEVSYIDTAVETPVPHTTSLRKQAISRKRGLRPKHRAKPKLRVRKS

SEQ ID NO: 19424 - protein, 367 aa, Neisseria meningitidis
MEAEVINQLNNTLNDLEKRSEDIRVYMDYQGKKDRLEEVVGLSEDPELWNDPKRAQEIGKERKILEGIVLTLDNIATGIEDNRMLIEMTVEENDEEGFAAVQEDVAGLEKQMADLEFKRMFNQPADPNNCFIDITAGAGGTEAEDWAGMLFRMYSRYAERKGFKIEILEEDDGEIAGINRATIRVEGEYAYGLLRTETGVHRLVRYSPFDSNNKRHTSFASVFVYPEIDDSIEIEINPADLRIDTYRASGAGGQHINKTDSAVRITHEPTGIVVQCQNDRSQHANKAAAMEMLKSKLYELEMRKRNEEKQALEEGKSDVGWGSQIRSYVLDSSRIKDLRTGYEVGNTKAVLDGDLDGFIEASLKQGV

SEQ ID NO: 19425 - protein, 89 aa, Neisseria meningitidis; identical to SEQ ID NO: 494

SEQ ID NO: 19426 - protein, 251 aa, Neisseria meningitidis; identical to SEQ ID NO: 9216

SEQ ID NO: 19427 - protein, 447 aa, Neisseria meningitidis
MNQNHTILQNLPVGQKVGIAFSGGLDTSAALLWMKLKGALPYAYTANLGQPDEDDYNAIPKKAMEYGAENARLIDCRAQLAHEGIAAIQCGAFHVSTGGIAYFNTTPLGRAVTGTMLVSAMKEDDVNIWGDGSTYKGNDIERFYRYGLLTNPALKIYKPWLDQQFIDELGGRHEMSEFLIANGFNYKMSVEKAYSTDSNMLGATHEAKDLEFLNSGIKIVKPIMGVAFWDENVEVSPEEVSVRFEEGVPVALNGKEYADPVELFLEANRIGGRHGLGMSDQIENRIIEAKSRGIYEAPGMALFHIAYERLVTGIHNEDTIEQYRINGLRLGRLLYQGRWFDSQALMLRETAQRWVAKAITGEVTLELRRGNDYSILNTESPNLTYQPERLSMEKVEDAAFTPLDRIGQLTMRNLDITDTRAKLGIYSQSGLLALGEGSVLPQLGNKQ

SEQ ID NO: 19428 - protein, 419 aa, Neisseria meningitidis; identical to SEQ ID NO: 6995

SEQ ID NO: 19429 - protein, 444 aa, Neisseria meningitidis
VGEPENKSSEPVREIQASKEMPSETSSPRKENETEVHIPAAPFIVKQSGSNALAVCALVLAALGLGTSGFLFVQGQNVLKNQELAFNQKIDKAALGESENAALLKDNLNRQSAIQSELDRLDSGVKANGEQILMTQKAYRELTKGRADWLVDETETILNLAAQQLVLTGNIQTAVGVLEHIDSRLSRFNQAELLPIKQAVSSDLAELKNRPYVDISGTALRLDRLETAVSGLPLILDGVLKPGVQARNEAVSASWWQNVWEKSLGTLKGLVEIRRLENNDAMLLSPEQAYFVRENLRLRLLDARIALMQRNGEVYQGDLNNAEAAVRQYFDAKSPATQSWLKELAELKALDVRMTADDGLKNSLNAVRAYRDGTRMTAAENQEAEQAASEPANENTASEPAAASDVKTIEAPSLPSERKPEQPAKKQSVPEKAGRSPSAKGERA

SEQ ID NO: 19430 - protein, 433 aa, Neisseria meningitidis
MTESVRLPVARLKPSTVALPGSKSISNRTLLLAALSDNACEIHSLLKSDDTDRMLEALDKLGVQIEYLAEDRLKVHGTGGRFPNRTADLFLGNAGTAFRPLTAALAVLGGDYRLHGVARMHERPIGDLADALRIAGADVEYLGKEHYPPLHIGERQDNGERVIPIKGNVSSQFLTALLMALPLTGQAFEIRMVGELISKPYIDITLKLMAQFGVQVINEGYRVFKIPADAHYHAPEHLHVEGDASSASYFLAAGLIAATPVRVTGIGANSIQGDVAFACELEKIGADVVWGENFVEVSRPKERAVQAFDLDANHIPDAAMTLAVVALATGQTCTLRNIGSWRVKETDRIAAMANELRKLGAKVAEEAEAIHITPPETPTPDAVIDTYDDHRMAMCFSLVSLLDVPVVINDPKCTHKTFPTYFDVFSSLTETAE

SEQ ID NO: 19431 - protein, 447 aa, Neisseria meningitidis; identical to SEQ ID NO: 19387

SEQ ID NO: 19432 - protein, 146 aa, Neisseria meningitidis
VASTATDIKGKYVQSVEVKNGVVTATMASSNVNNEIKGKKLSLWAKRQAGSVKWFCGQPVTRANTATDAAITADTDTNGKIDTKHLPSTCRDASSAVCTKTPRADFKHFQKISRYRVLPESRQMAEKLRHSRAGGNLGLSVRKLIG

SEQ ID NO: 19433 - protein, 336 aa, Neisseria meningitidis
MNDNTHTLPPRHLSVAPMLDWTDRHYRYMARQITRNAWLYSEMVNAGAIVYGDKDRFLMFNEGEQPVALQLGGSDPSDLAKAAKAAEAYGYNEVNLNCGCPSPRVQKGSFGACLMNEVGLVADCLNAMQDAVGITVTVKHRIGVDRQTEYQTVADFVGTLRDKTACKTFIVHARNAWLDGLSPKENRDVPPLKYDYVYRLKQEFPGLEIIINGGITTNEAIAGHLQHVDGVMVGREAYHNPMVMREWDRLFYGDTANPIGYADLVQRLYTYSQAQIQAGRGTILRHIVRHSLGLMHGLKGARTWRRMLSDATLLKDNDGSLILEAWKEVERANMRE

SEQ ID NO: 19434 - protein, 321 aa, Neisseria meningitidis; identical to SEQ ID NO: 4435

SEQ ID NO: 19435 - protein, 161 aa, Neisseria meningitidis; identical to SEQ ID NO: 5306

SEQ ID NO: 19436 - protein, 263 aa, Neisseria meningitidis
MARHPYRRLRPAKSGFPEVGISEEGNIRSLHLGSDTVQSSMNLDHPSELVLSYSRAMMGWLLFTDALPQHITQIGLGGGSFARWIDNYLPDTRQTAVDINPQVIAIARNLFELPFESEKFEIIEADGAEYIKVFRHNTDIILVDGFDGEQIIDTLVEEPFFRDCRNALSSDGIFVTNWWSGDKRYQRFIERLLSVFEGRVLELPAESHGNVAVMAFQSSPKEQNIDKLKKRADKLSNAYGLDFHRMLAGLKASNPNNGKHFYL

SEQ ID NO: 19437 - protein, 310 aa, Neisseria meningitidis; identical to SEQ ID NO: 2585

SEQ ID NO: 19438 - protein, 281 aa, Neisseria meningitidis
MKIANALIHNTVRIECLSADGQSISTGTAFLFLFDFDKTGVIPVLVTNKHVVFVESAKKIAITLTKDENGSPNHKENITFTIEDFIQNCLPHPDENIDLCIAPVGHFFNQLINHNFSPFIKGIRESDIMQTEEMDQLSAFEEVFMIGYPNGLWDSKNNLPIFRTGITATHPAIDFEGKKEFMIDVACFPGSSGSPVFKYIPAGLRKIENDGFAITADETFKLMGILYAGPQQTISGEIYITTVNKPISVSSIPINLGFVIKAEKLLDFKPILKNFLEKNRE

SEQ ID NO: 19439 - protein, 468 aa, Neisseria meningitidis; identical to SEQ ID NO: 15715

SEQ ID NO: 19440 - protein, 89 aa, Neisseria meningitidis; identical to SEQ ID NO: 1473

SEQ ID NO: 19441 - protein, 151 aa, Neisseria meningitidis; identical to SEQ ID NO: 3388

SEQ ID NO: 19442 - protein, 318 aa, Neisseria meningitidis
MKVLFIADPMASFKTYKDTTYAMMREMAKRGWRLFHTLSGELSVKNGLVVADASAFEFLGAQDDHDKNWFAAADKVQTALKAFDAVIMRTDPPFDMQYLYATQLLTLAEQQGAKVFNSGQSMRDFNEKLAILNFSRFTAPTLVTTRSADVRAFLKEHGDIIIKPLDGMGGMGIFRLTEKDPNIGSILETLMRLDSRTIMAQRYIPEIVHGDKRILIIGGEVVPYALARIPQNGETRGNLAAGGRGVAQELDRRDREIAETLAPELKRRGILLAGLDVIGSNLTEVNVTSPTGFQEIMKQKGFDVAAMFADAVAAWSVR

SEQ ID NO: 19443 - protein, 88 aa, Neisseria meningitidis; identical to SEQ ID NO: 255

SEQ ID NO: 19444 - protein, 687 aa, Neisseria meningitidis
MMIQTLLIELLTEELPPKALNNLGNHFAAAVAEGLEKAQLVDGAAEFTAYASPRRLAVQVKNVKAVQADQKIVKKGPAVANAMKDGAPTKALEGFARGAGAKIEDLTIVHDGKQDVYAYEYVQTGKPLGELLEDIINQAVKKLPIPKVMRWGSSTFTFVRPVHGLIVLHGGDIVNVSVLGLQSGNKTLGHRFLSNGEITIENADSYAEQMREQGKVEASFAERKAAIQTALEGQARRLNATVAADEALLDEVTALVEWPVVLEAGFEEHFLAVPQECLILTMQQNQKYFPLLDQNGKLMNRFLLVSNLQTEDPSHIIRGNERVLRARLSDAEFFYKQDQKATLESRLPKLSSVVYHNKIGSQAERIERLQSIAAHIAKALGADAAAAERAARLAKADLVTEMVGEFPELQGTMGKYYARLDGETEEIAEAVEQHYQPRFAGDKLPESKVATAVALADKLETLVGIWGIGLIPTGDKDPYALRRAALGILRMLMQYGLDVNELIQTAFDSFPKGLLNEKTPSETADFMQARLAVLLQNDYPQDIVAAVLAKQPRRLDDVVAKLQAVAAFKQLPEAAALAAANKRVQNLLKKADAELGAVNESLLQQDEEKALFAAAQGLQPKIAAAVAEGNFQTALSELASVKPQVDAFFDGVMVMAEDAAVKQNRLNLLNRLAEQMNAVADIALLGE

SEQ ID NO: 19445 - protein, 226 aa, Neisseria meningitidis
MTYTIVPIATARSPYKQKFGIARQPGLVSAAEVCIELNPEFTADSVRGLEHFDYVWISFIFHGVLDEGWAQMVRPPRLGGKQKMGVFATRSPHRPNHLGLSLLKLERIETGKPVRLYCSGADLLDGTPIVDIKPYIPFVESKPDAASGFVSGKPVELEVVWQENIGAENLSANTKNLISQSIAQDPRPAYQNIPERIYVMNIADYEVRFQIEENRATVIDLSPTPL

SEQ ID NO: 19446 - protein, 630 aa, Neisseria meningitidis; identical to SEQ ID NO: 3023

SEQ ID NO: 19447 - protein, 186 aa, Neisseria meningitidis; identical to SEQ ID NO: 2604

SEQ ID NO: 19448 - protein, 316 aa, Neisseria meningitidis; identical to SEQ ID NO: 3819

SEQ ID NO: 19449 - protein, 459 aa, Neisseria meningitidis
MFAFKSLLDMPRGEALAVVVALIAAMGYTIISLEWLPHMSIIAAIVVLILYGLARGLKYNDMQQGMIGALNQGMGAIYLFFFIGLMVSALMMSGAIPTLMYYGFGLISPTYFYFSAFALCSVIGVSIGSSLTTCATVGVAFMGMAAAFHADMAMTAGAIVSGAFFGDKMSPLSDTTGISASIVGIDLFEHIKNMMYTTIPAWLISAALMLWLLPNVAAQDLNGVESFRSQLEATGLVHGYSLIPFALLVVLALMRVNAVVAMLFTVIAAVAVTYLHSTPDLRQLGAWFYGGYKLEGEAFKDVAKLISRGGLESMFFTQTIVILGMSLGGLLFALGAIPSLLDAVRSFLTNAGRATFSVAMTSVGVNFLIGEQYLSILLSGETFKPVYDRLGLHSRNLSRTLEDAGTVINPLVPWSVCGVFISHALGVPVWEYLPYAFFCYLSLALTLLFGWTGLTLSKK

SEQ ID NO: 19450 - protein, 242 aa, Neisseria meningitidis; identical to SEQ ID NO: 2996

SEQ ID NO: 19451 - protein, 532 aa, Neisseria meningitidis
MSIVEIKVPDIGGHENVDIIAVEVKAGDTIAVDDTLITLETDKATMDVPADAAGVVKEVKVKVGDKISEGGVILTVETGASAAEAAPAVAAEAQPAPAAAPVAAGGATVQVAVPDIGGHTDVDVIAVEIKVGDTVAEDDTLITLETDKATMDVPCTAAGVVKAVFLKVGDKVSEGSAIIEVETAGSVAAAPAQAAQAAAPAPTAAAAPAAAPAPSAPAAAKIDEAAFAKAHAGPSARKLARELGVDLGQVKGTGLKGRIVGDDIKAFVKSVMQGGAAKPAAAGASLGSGLDLLPWPKVDFSKFGNVEVKELSRIKKISGQNLSRNWVVIPHVTVHEEADMTELEEFRKQLNKEWEREGVKLSPLAFIIKASVSALKAFPEFNASLDGDNLMLKNYFNIGFAADTPNGLVVPVIKDVDQKGLKQISQELTELSKKAREGKLKPQEMQGACFTISSLGGIGGTGFTPIVNAPEVAILGVCKSQIKPVWNGKEFAPRLMCPLSLSFDHRVIDGAAGMRFTVFLAKLLKDFRRITL

SEQ ID NO: 19452 - protein, 179 aa, Neisseria meningitidis; identical to SEQ ID NO: 19051

SEQ ID NO: 19453 - protein, 410 aa, Neisseria meningitidis; identical to SEQ ID NO: 446

SEQ ID NO: 19454 - protein, 262 aa, Neisseria meningitidis
MNPQDKCWQVHRHLAEHADQRLTLVRNAPKHILLAGADADISRSLLAKRYPQAVFEEYDSRADFLAAAAAVRKGGFWQRFTGKGVVQHCQSPTAPLPEACADMLWSNLGLLAAEQILPVLHNWARALETDGLLFFTCFGRDTFTELKCRLKENGIESRSVMFPDMHDLGDMLAENGFYDPVTDTAKLVLDYKKAETFWADMDTLGVWRAMSWNDENAARSCVGTIFEREGGLSITLETVYGHAVKKLMLPQGENVVQFFPKR

SEQ ID NO: 19455 - protein, 242 aa, Neisseria meningitidis; identical to SEQ ID NO: 14809

SEQ ID NO: 19456 - protein, 488 aa, Neisseria meningitidis; identical to SEQ ID NO: 7364

SEQ ID NO: 19457 - protein, 477 aa, Neisseria meningitidis
MSQYDVVVIGAGPGGYVAAIRAAQLGFKTACVDAGVNKAGNAPALGGTCLNVGCIPSKALLQSSEHFHAAQHDFAEHGITVGDVKFDAAKMIERKDAIVTKLTGGVKFLFQKNKVTSLFGTASFAGKNGDAYQIEVDNKGEKTVIEAKHVIVATGSVPRPLPQVAIDNVNVLDNEGALNLTEVPAKLGVIGSGVIGLEMGSVWNRVGAEVTILEAAPTFLAAADQQIAKEAFKYFTKEQGLSIELGVKIGDIKSEGKGVSVAYETAAGEAKTEVFDKLIVAIGRIPNTKGLNAEAVGLEKDERGFIKVDGGCRTNLPNVWAIGDVVRGPMLAHKASDEGVAVAERIAGQKPHIDFNNVPFVIYTDPEIAWVGKTEEQLKAEGVEYKKGTSGFGANGRALAMGKAKGTVKVLADAKTDRILGVHMIGPVVSELVTEGVTALEFFASSEDIARIIHAHPTLSEVVHEAALAADKRALHG

SEQ ID NO: 19458 - protein, 277 aa, Neisseria meningitidis
MPHALVLQFPSAEVLPSDFPSRLPEPDCADEKRMRFIVEEGFSLSEKDAALLGSRQIDHAVLPDMDFGELGLIVSDMDSTLITIECVDEIAAGVGLKDKVAEITERSMRGELDFEQSLRSRVALLAGLDERVLADVYENILKLSPGAEFLLDECKRHDVKFLLVSGGFTFFTERLQQRLGFEYQHANVLEIENGRLTGRLKGRIIDAQAKADLLLEYRSRLGLQPHQVLAMGDGANDILMLKETGIGVAYRAKPKVRAAADVCINFGGLERVRGLFR

SEQ ID NO: 19459 - protein, 929 aa, Neisseria meningitidis
MSNRPTLLLVDGSSYLYRAYHAMAQLTAPDGAPTGAMYGVLNMLRRLRADYVHDYCAVVFDAKGKNFRHEMFPDYKATRPPMPDDLRPQAEALPDLVRLIGWPVLVIPQVEADDVIGTLAAMAGEAGWNVVVSTGDKDMAQLVNERVTLVNTMSGETLDIEGVKAKFGVRPDQIRDYLALMGDKVDNVPGVEKCGPKTAVKWLEAYGSLAGVMEHAAEIKGKVGENLRAALQRLPLSYDLVTIKTDVDLHTELSDGIESLRRTAPKWAQLVVDFKRWGFRTWLKEAESRMHEAADGDLFGSDSIGEQAALNAEVPSEKQPELAPTPEKLDYQAVTTEAQLAALLDKLSQADTIGIDTETTSLDAMNASLVGISIAFQAGEAIYIPVGHSLTAAPEQIDLQDVLGRLKPHLENPALKKIGQNLKYDQHVFANYGIALNGIAGDAMLASYIIESHLGHGLDELSERWLGLETITYESLCGKGAKQISFADVAIGQATEYAAQDADFALRLEAHLRAQMDAKQLEMYEKMELPVAQVLFEMERNGVQIDRAELSRQSAELGAELMKLEQEAYAVAGQPFNLNSPKQLQEILFDKMGIPTKGLKKTAKGGISTNEAVLEQLAPDYPLPKIILQNRSLAKLKSTYTDKLPEMISPKDGRVHTTYAQAVAITGRLASNNPNLQNIPIRTAEGRRVRRAFTAPQGSVIVSADYSQIELRIMAHLSGDKTLITAFQNGEDVHRRTAAEVFGIAPENVSSEQRRYAKTINFGLIYGMGQYGLAKSLGIDNISAKTFIDRYFARYPGVAEYMQRTKEQAAAQGFVETLFGRRLYLPDIRNKNANARAGAERAAINAPMQGTASDLIKRAMIDVRNCLSDGIGSKLVMQVHDELVLEVVETELDFVKEKLPQIMAKVDGGLLDVPLVAEVGVGENWEEAH

SEQ ID NO: 19460 - protein, 375 aa, Neisseria meningitidis; identical to SEQ ID NO: 777

SEQ ID NO: 19461 - protein, 307 aa, Neisseria meningitidis
MQYSTLAGQTDNSLVSNNFGFLRLPLNFMPYESHADWVITGVPYDMAVSGRSGARFGPEAIRRASVNLAWEHRRFPWTFDVRERLNIIDCGDLVFSFGDSRDFVEKMEVHAGKLLSSGKRCLSLGGDHFITLPLLRAHARYFGKLALIHFDAHTDTYDNGSEYDHGTMFYTAPKEGLIDPSRSVQIGIRTEHSKKLPFTVLSAPKVNEDSVEETVRKIKETVGNMPVYLTFDIDCLDPSFAPGTGTPVCGGLSSDRALKILRGLTDLDIVGMDVVEVAPSYDQSDITALAGATIALEMLYLQGAKKD

SEQ ID NO: 19462 - protein, 78 aa, Neisseria meningitidis; identical to SEQ ID NO: 1464

SEQ ID NO: 19463 - protein, 234 aa, Neisseria meningitidis; identical to SEQ ID NO: 6533

SEQ ID NO: 19464 - protein, 114 aa, Neisseria meningitidis; identical to SEQ ID NO: 3430

SEQ ID NO: 19465 - protein, 225 aa, Neisseria meningitidis; identical to SEQ ID NO: 11441

SEQ ID NO: 19466 - protein, 70 aa, Neisseria meningitidis
MPHIHPLHLFPPHIAERGLLYFQQGKVGAVQKTSTGRYRAEVCGLENYWVWLKLDSDLYIKDESCDCPYV

SEQ ID NO: 19467 - protein, 640 aa, Neisseria meningitidis
MIEIKNLTLQRGLKVLLDKANATVNPGQRVGLIGKNGTGKSSLFALIKGEITQDGGDVSIPKNWRLASVSQETPDLDISALDYVLQGDAELQTLQTALRQAEAQNDGMKQAEYHAKLEEIDAYTAPARAAKLLNGLGFSQEEHSRPVKSFSGGWRMRLNLAQALICRADLLLLDEPTNHLDLETVLWLENHLASLPCTQIIISHDRDFLNAATTQTIELSQQKLTQYGGNYDFYQNERAQRLAQQQAAYVKQQAQIKHLQSFIDRFKAKATKAVQAQSRMKALAKLERIAPAHLDSEFSFEFYNPEHLPNPLLKLEHADLGYEGKTVLHDITLSLESGARYGLLGVNGSGKSTFIKALAGKIDLLSGSIVRSEKLNIGYFAQHQLDTIRADQNPVWHIQQLSPEVREQEIRNFLGGFNFVGDMALQKTEPFSGGEKARLALAMIIWQKPNLLLLDEPTNHLDLDMRHALTLALQSFQGALIIVSHDRSLLEATTDSFLLIDKGRLKNFDGDLNDYRQWRLAQENAAAAPAASAQSQSRKDTKRIEAQIRQEKARRGKPIQQKIDRAEKEMAQLSEIQTACEAFLAQEDAYLEANKEKLQNTLSQLAKVKTQLAQIEEVWLACQEELERIETEIEKQFAER

SEQ ID NO: 19468 - protein, 557 aa, Neisseria meningitidis
MLLTLSLRDFVIVENLNLDFQSGFTVLTGETGAGKSITLDAIGLLLGDKADYSQVRSGAKEAQLSALFDISHLPVLKAELYEQGLLNDGEEELSIRRIIDAKGKNRSFINNQAATLAQLKAVGSQLIDIHGQNAHHSLNQEAAQRELLDAFAGSRAQAETVRQLYQNWANSKKALQEAQEQAENIALEQERLEWQFNELNQLDIKQGEWEALSQSHDSLAHSAELLQAAEEVGSKIDGDNGIQRHIYQCQKLLANLQNIEPRFAESLNMLASIEAELGEISANMRDVAGRSDINPNELAAQEQRMGELMGMARKYRIEPEELPAKLAEIEERLQSLQAAADLDALEHNVAHNFAEYQEAAHILSAMRHQAAERLSGETTEHMQHLAMKGARFDIVLLPSSPTAHGLEQVQFQVAANKGNPPRPLNKVASGGELARISLALQVVASQYTQVPTLIFDEVDTGIGGGVAEMVGKALRALGRKHQVLAVTHLPQVASCGENHWRVRKHSEGEQTVSEISILDEIQRVEEVARMLGGEVITDTTRQHAAELLQLASKNSLF

SEQ ID NO: 19469 - protein, 208 aa, Neisseria meningitidis; identical to SEQ ID NO: 3160

SEQ ID NO: 19470 - protein, 332 aa, Neisseria meningitidis
MKKSLIALTLAALPVAAMADVTLYGTIKAGVETSRSVAHNGAQAASVETGTGIVDLGSKIGFKGQEDLGNGLKAIWQVEQKASIVGTDSGWGNRQSFIGLKGGFGKLRVGRLNSVLKDTGDINPWDSKSDYLGVNKIAEPEARLISVRYDSPEFAGLSGSVQYALNDNAGRHNSESYHAGFNYKNGGFFVQYGGAYKRHHQVQEDLNIEKYQIHRLVSGYDNDALYASVAVQQQDAKLALPNDNSHNSQTEVAATLAYRFGNVTPRVSYAHGFKGSFDDADLSNDYDQVVVGAEYDFSKRTSALVSAGWLQEGKGENKFVSTAGGVGLRHKF

SEQ ID NO: 19471 - protein, 100 aa, Neisseria meningitidis; identical to SEQ ID NO: 7884

SEQ ID NO: 19472 - protein, 241 aa, Neisseria meningitidis
MRIPLLAPDNYAFPDPAYALARCDGLVGVSRDLDAGRLLEAYQNGVFPWFLRDGWFFWYAVGPRAVIVPERLHVPCSLAKTLRNGSYRVAVNGCFAEVVAHCAAAARPNQDGTWIAPEFQTAYLKLHEMGYAHSFECHYPDENGKTRLAGGFYGVQIGRVFYGESMFALQPDASKIAFACAVPFLADLGVELIDCQQDTEHMRRFGSELLPFADFAERLRMLNAVPLKEEIGRREVACKGL

SEQ ID NO: 19473 - protein, 107 aa, Neisseria meningitidis
MMTESEFIRASEALFEHIEDQIDENGWDFDCRFAGNVLTIEAENGTQIIVNRHTPNQELWIAAKSGGYHFAEQNGKWLATRDGRDFYDVLNEALSAASGEAVEIEEL

SEQ ID NO: 19474 - protein, 58 aa, Neisseria meningitidis
MKSRRFFKALLLIAALVGAFYAGMQTQAYLYEDLCLDLGGGKNPGSYPICVIGKVSAR

SEQ ID NO: 19475 - protein, 201 aa, Neisseria meningitidis; identical to SEQ ID NO: 15193

SEQ ID NO: 19476 - protein, 791 aa, Neisseria meningitidis
MKPLQMLPIAALVGSIFGNPVLAADEAATETTPVKAEIKAVRVKGQRNAPAAVERVNLNRIKQEMIRDNKDLVRYSTDVGLSDSGRHQKGFAVRGVEGNRVGVSIDGVNLPDSEENSLYARYGNFNSSRLSIDPELVRNIEIVKGADSFNTGSGALGGGVNYQTLQGRDLLLDDRQFGVMMKNGYSTRNREWTNTLGFGVSNDRVDAALLYSQRRGHETESAGNRGYAVEGEGSGANIRGSARGIPDSSKHKYHSFLGKIAYQINDNHRIGASLNGQQGHNYTVEESYNLTASSWREADDVNRRRNANLFYEWMPDSNWLSSLKADFDYQKTKVAAVNNKGSFPMDYSTWTRNYNQKDLDEIYNRSMDTRFKRFTLRLDSHPLQLGGGRHRLSFKTFVSRRDFENLNRDDYYFSGRVVRTTSSIQHPVKTTNYGFSLSDQIQWNDVFSSRAGIRYDHTKMTPQELNAECHACDKTPPAANTYKGWSGFVGLAAQLNQAWHVGYDITSGYRVPNASEVYFTYNHGSGNWLPNPNLKAERSTTHTLSLQGRSEKGMLDANLYQSNYRNFLSEEQKLTTSGTPGCTEENAYYGICSDPYKEKLDWQMKNIDKARIRGIELTGRLNVDKVASFVPEGWKLFGSLGYAKSKLSGDNSLLSTQPLKVIAGIDYESPSEKWGVFSRLTYLGAKKAKDAQYTVYENKGWGTPLQKKVKDYPWLNKSAYVFDMYGFYKPAKNLTLRAGVYNVFNRKYTTWDSLRGLYSYSTTNSVDRDGKGLDRYRAPSRNYAVSLEWKF

SEQ ID NO: 19477 - protein, 119 aa, Neisseria meningitidis
MTGFNDAAGVASTASDIKGKYVQSVTVANGVVTAQMASSGVNKEIQGRKLSLWAKRQNGSVKWFCGQPVERNAKATADAVTAATPDTDKINTKHLPSTCRDAASAVCIETPPTAFYKNT

SEQ ID NO: 19478 - protein, 45 aa, Neisseria meningitidis
MLPRKFKNLKFRPNQHTRCPMPIEIPHANKKVPKIGTKTDNFQHY

SEQ ID NO: 19479 - protein, 671 aa, Neisseria meningitidis
MKSYPDPYRHFEDLDSAETQNFAAEANAETRARFLNNDKARALSDGILAQLQDTRQIPFCQEHRARMYHFHQDAEYPKGVYRVCTAATYRSGYPEWKILFSVADFDELLGDDVYLGGVSHLVEKPNRALLTLSKSGGDAAYTLEVDLEAGELVEGGFHFPAGKNHVSWRDENSVWVCPAWDERQLTESGYPREVWLVERGKSFEESLPVYQIDKDAMMVNAWRYLDPQGSPIDLIEASDGFYTKTYLQVSSESEAKPLNLPNDCDVAGYLAGHLLLTLRKDWNRANQSYPSGALVAVKLNRGELGAAQLLFAPDETQALESVETTKRFVVASLLENVQGRLKAWRFADGKWQEAELPRLPSGALEMTDQPWGGDVVYLAASDFTTPLTLFALDLNVMELTVMRRQPQQFDSDGINVQQFWTTSADGERIPYFHVGKNAAPDMPTLVYAYGGFGIPELPHYLGSIGKYWLEEGNAFVLANIRGGGEFGPRWHQAAQGISKHKSVDDLLAVVRDLSERGMSSPRHIGLQGGSNGGLITAAAFVCEPQSIGALVCEVPLTDMIRYPLLSAGSSWTDEYGNPQKYEVCKRWLGELSPYHNLSDGIDYPPALITTSLSDDRVHPAHALKFYAKLHETSAQSWLYSPDGGGHTGNGTQRESADELACVLLFLKEFLG

SEQ ID NO: 19480 - protein, 81 aa, Neisseria meningitidis; identical to SEQ ID NO: 2565

SEQ ID NO: 19481 - protein, 138 aa, Neisseria meningitidis; identical to SEQ ID NO: 671

SEQ ID NO: 19482 - protein, 494 aa, Neisseria meningitidis
MSKPVFKKIALYTLGAISGVAVSLAVQGFAAEKDRRDNEVLPVQSIRTMAEVYGQIKANYYQDKPDADLFEGAMKGMVAGLDPHSEYMDKKGYAEIKESTSGEFGGLGMEIGQEDGFVKVVSPIEDTPAERAGVKSGDFIVKIDNVSTRGMTVSEAVKKMRGKPGTKITLTLSRKNADKPIVVNLTRAIIKVKSVRHHLIEPDYGYIRVSQFQERTVESVNTAAKELLKENKGKPLKGLVLDLRDDPGGLLTGAVGVSAAFLPSEAVVVSTKGRDGKDRMVLKAIPEDYVYGMGGDSLAGIPAELKTIPMTVLVNSGSASASEIVAGALQDHKRAVIVGTQSFGKGSVQTLIPLSNGSAVKLTTALYYTPNDRSIQAQGIVPDVEVKDKERIFESREADLVGHIGNPLGGEDVNSETLAVPLEKDADKPAVKEKGKKKKDEDLSSRRIPNPAKDDQLRKALDLVKSPEQWQKSLGLAAKKPVSNKDKKDKKDKK

SEQ ID NO: 19483 - protein, 348 aa, Neisseria meningitidis
MSDDKSKALAAALAQIEKSFGKGAIMKMDGSQQEENLEVISTGSLGLDLALGVGGLPRGRIVEIFGPESSGKTTLCLEAVAQCQKNGGVCAFVDAEHAFDPVYARKLGVKVEELYLSQPDTGEQALEICDTLVRSGGIDMVVVDSVAALVPKAEIEGDMGDSHVGLQARLMSQALRKLTGHIKKTNTLVVFINQIRMKIGVMFGSPETTTGGNALKFYSSVRLDIRRTGSIKKGEEVLGNETRVKVIKNKVAPPFRQAEFDILYGEGISWEGELIDIGVKNDIINKSGAWYSYNGAKIGQGKDNVRVWLKENPEIADEIDAKIRALNGVEMHITEGTQDETDGERPEE

SEQ ID NO: 19484 - protein, 140 aa, Neisseria meningitidis
MNLEQLGRRDALLSGLLKQAGQWRRLDAAVKKLLPANLHPHFQTVCIEDGRLVLLAANNMAASRLKMIAPSVLPQLAGLDASIRSVSVRLVPKPEKPPKTNTLHLSKAALESFGSAAVKLEKRHPELAEALANLVRRHGA

SEQ ID NO: 19485 - protein, 147 aa, Neisseria meningitidis; identical to SEQ ID NO: 1095

SEQ ID NO: 19486 - protein, 129 aa, Neisseria meningitidis
MKNVQKGFTLLELMIAVAILGILTLITYPSYKTYIRRVRLTEVRTTLLHNAQTMERYYRQKGTFEHYNQTKLEQNEYFNITLSEVSPDHFTLKATPNPTTNDGETCFVTLNDGGIIAASGTNQSCPGFD

SEQ ID NO: 19487 - protein, 242 aa, Neisseria meningitidis
MLLGVNIDHIATVRNARGTIYPSPVEAALIAETHGADLITMHLREDRRHIKDADVFAVKNAIRTRLNLEMALTEEMLENALKVMPEDVCIVPEKRQEITTEGGLDVLAQQDKIAEFTKILTDAGIRVSLFIDADDRQIQAARDVGAPVVELHTGAYADARSHAEQLKQFERLQNGAHFAGDLGLVVNAGHGLTIHNVTPIAQILAIRELNIGHSLIAQALFLGLPEAVRQMKEAMFRARLLP

SEQ ID NO: 19488 - protein, 425 aa, Neisseria meningitidis
MNEGEVVLTPEQIQTLYGYASRGDTYGGWRYLANLGDRYADNAAAIVGKDANLNGLNLWMKKGVENLWDDTVGKKTRLEKFDRVALQHFSQYVDLINENNGRLPNTSEIERSYYKAVTYHGVSSSAAIDLVINRSLPDMADGYWALGLGIEAERIHNEQAVNNPNGSESDNRKQLISALDKGFDGSFKEKHFTFLQSVIMDVTKLGVEYTIDGWQKIGGWGNGIINDLYKSVAKREWTGIFEIVNNNIKQFRDLFPNPEGWIDDGHQCFAPWVKETKKRNGKYHVYDPLALDLDGDGIETVAAKGFSGSLFDHNGNGIRTATGWVSADDGLLVRDLNGNGIIDNGAELFGDNTKLADGSFAKHGYAALAELDSNGDNIINAADAAFQSLRVWQDLNQDGISQTNELRTLEELGIQSLDLAYQRCK

SEQ ID NO: 19489 - protein, 205 aa, Neisseria meningitidis; identical to SEQ ID NO: 6236

SEQ ID NO: 19490 - protein, 251 aa, Neisseria meningitidis
MKYIRLFFLCTALISTNAAAAEMVQIEGGSYRPLYLKKDTGLIKVKPFKLDKYPVTNAEFAEFVNSHPQWQKGRIGSKQAEPAYLKHWMKNGSRSYAPKAGELKQPVTNVSWFAANAYCAAQGKRLPTIDEWEFAGLASATQKNGSNEPGYNRTILDWYADGGRKGLHDVGKGRPNYWGVYDMHGLIWEWTEDFNSSLLSSGNANAQMFCSGASIGSSDSSNYAAFLRYGIRTSLQSKYVLHNLGFRCTSR

SEQ ID NO: 19491 - protein, 76 aa, Neisseria meningitidis
MFKTLKSIWQGLTQKGKIFPYQLAFTLLIPLRNWALSPQQITQRLHFVPHHRICCGAGYFSCVGCASAHRFLIFAC

SEQ ID NO: 19492 - protein, 68 aa, Neisseria meningitidis; identical to SEQ ID NO: 3910

SEQ ID NO: 19493 - protein, 81 aa, Neisseria meningitidis; identical to SEQ ID NO: 7948

SEQ ID NO: 19494 - protein, 86 aa, Neisseria meningitidis
LEMFDGEVEADESYFGGQRKGKRGRGAAGKVAVFGLLKRNGKVYTVTVPNTQTATLFPIIREQVKPDSIVYTDCYRSYDVIRCERI

SEQ ID NO: 19495 - protein, 263 aa, Neisseria meningitidis; identical to SEQ ID NO: 1443

SEQ ID NO: 19496 - protein, 136 aa, Neisseria meningitidis
MPVYFRTPSRKRLHKMNRRQHKKLHLGEFQTLIFGVQGSLHQAEDDAEAFGRFMDELIAYLAANGLEMAGGGDCGDFSCLFQKSGPRGLGETEKKAIISWLAGREDVATLYATPLVDGFYGDDGWENYSETYKQAD

SEQ ID NO: 19497 - protein, 94 aa, Neisseria meningitidis; identical to SEQ ID NO: 1124

SEQ ID NO: 19498 - protein, 39 aa, Neisseria meningitidis; identical to SEQ ID NO: 7406

SEQ ID NO: 19499 - protein, 322 aa, Neisseria meningitidis
MTAKPFSLNLTNLLLLAALFAVSLSVGVADFRWSDVFSLSDSTELMLVSRLPRTFAIVLTGASMAVAGMIMQILMRNRFVEPSMAGASQSAALGLLLMSLLLPAAPLPVKMSVAAVAALIGMLVFMLLIRRLPPTAQLMVPLVGIIFGGVVEAVATFIAYENEMLQMLGVWQQGDFSSVLLGRYELLWITGGLAVFAYLIADRLTILGLGETVSVNLGLNRTAVLWSGLIIVALITSPVIVTVGNIPFVGLVVPNIISRLIGDRLRQSLPAVALLGASLVLLCDIIGRVIVFPFEIPVSTVFGVLGTALFLWLLLRKPAHAV

SEQ ID NO: 19500 - protein, 310 aa, Neisseria meningitidis; identical to SEQ ID NO: 8806

SEQ ID NO: 19501 - protein, 111 aa, Neisseria meningitidis; identical to SEQ ID NO: 8680

SEQ ID NO: 19502 - protein, 239 aa, Neisseria meningitidis
LTLTRKTLFLLTAAFGTHSLQTASADAVVKAEKLHASANRSYKVAGKRYTPKNQVAEFTQTGNASWYGGRFHGRKTSGGERYDMNAFTAAHKTLPIPSYVRVTNTKNGKSVIVRVNDRGPFHGNRIIDVSKAAAQKLGFVNQGTAHVKIEQIVPGQSAPVAENKDIFIDLKSFGTEHEAQAYLNQAAQNFAVSSSGTNLSVEKRRYEYVVKMGPFASQERAAEAEAQARGMVRAVLTAG

SEQ ID NO: 19503 - protein, 299 aa, Neisseria meningitidis; identical to SEQ ID NO: 7158

SEQ ID NO: 19504 - protein, 283 aa, Neisseria meningitidis
MARHVWQAGRFEIGLDKPKIMGIVNLTPDSFSDGGAYSQNAQTALAHAERLLKEGADILDIGGESTRPGADYVSPEEEWARVEPVLAEVAGWGVPVSLDTRRTVVMEKALALGGIDIINDVAALTDEGAVELLARQADTGICLMHMQGLPENMQINPKYQDVVGEVARYLKARAAECIAAGIAPQRITLDPGFGFGKTLQHNIALMRHLPELMAETGFPLLIGVSRKRMVGELTGETDAAARVHGSVAAAVAAVARGAQIVRVHDVKATADALKVWEALGINL

SEQ ID NO: 19505 - protein, 140 aa, Neisseria meningitidis; identical to SEQ ID NO: 2533

SEQ ID NO: 19506 - protein, 431 aa, Neisseria meningitidis
LAGVGKLARLGAKFSTRAVPYVGTALLAHDVYETFKEDIQAQGYQYDPETDKFVKGYEYSNCLWYEDERRINRTYGCYGVDSSIMRLMSDDSRFPEVKELMESQMYRLARPFWNWHKEELNKLSSLDWNNFVLNRCTFDWNGGDCVVNKGDDYRNGANFSLSRNPKYKEEMDAKKLEEILSLKVDANPDKYIKATGYPGYSEKVEVAPGTKVNMGPVTDRNGNPVQVVATFGRDSQGNTTVDVQVIPRPDLTPGSAEAPNAQPLPEVSPAENPANNPAPNENPGTRPNPEPDPDLNPDANPDTDGQPGTSPDSPAVPDRPNGRDGKDGGLLCKFFPDILACDRLPEPNPAEDLNLPSETVNVEFKKSGIFQDSAQCPAPVTFTITVLDSSKQFAFSFENACTIAERLRYMLLALAWAVAAFFCIRTVSREV

SEQ ID NO: 19507 - protein, 214 aa, Neisseria meningitidis; identical to SEQ ID NO: 1408

SEQ ID NO: 19508 - protein, 476 aa, Neisseria meningitidis; identical to SEQ ID NO: 19035

SEQ ID NO: 19509 - protein, 61 aa, Neisseria meningitidis; identical to SEQ ID NO: 6755

SEQ ID NO: 19510 - protein, 74 aa, Neisseria meningitidis; identical to SEQ ID NO: 3004

SEQ ID NO: 19511 - protein, 208 aa, Neisseria meningitidis
VNPFSEDGKMSELDNILAHNRQFVESGEYEKYFTDKYPERGLAVLSCMDARIIGLLPDALGLKNGDAKLIKNAGALVTHPWGSVMRSLLVAVFELKVREIMVIAHHDCGMQGLNAEEFLGRVRESRIPEDRIETLRYAGVDLDGWLTGFDNVEDSVRHTVDLIRNHPLMPRHIAVHGLVIHPVTGKLTLVVDGSVSDGMDLSEGMETS

SEQ ID NO: 19512 - protein, 358 aa, Neisseria meningitidis; identical to SEQ ID NO: 96

SEQ ID NO: 19513 - protein, 258 aa, Neisseria meningitidis; identical to SEQ ID NO: 3248

SEQ ID NO: 19514 - protein, 208 aa, Neisseria meningitidis
MRKSRLSRYKQNKLIELFVAGVTARTAAELVGINKNTAAYYFHRLRLLIYQNSPHLEMFDGEVEADESYFGGQRKGKRGRGAAGKVAVFGLLKRNGKVYTVTVPNTQTATLFPIIREQVKPDSIVYTDCYRSYDVLDVREFSHFSFAETSFSYQSQHTFCRTTKPYWNELLEPGKTSFTQVRHSQSAFAVFKGVRMAFQQDKSSCSIL

SEQ ID NO: 19515 - protein, 306 aa, Neisseria meningitidis
MTLTELRYIVAVAQERHFGRAARRCFVSQPTLSIAIKKLEEELAVSLFDRSSNDIITTEAGERIVAQARKVLEEAELIRHLANEEQNELEGAFKLGLIFTVAPYLLPKLIVSLRRTAPKMPLMLEENYTHTLTESLKRGDVDAIIVAEPFQEPGIVTEPLYDEPFFVIVPKGHSFEELDAVSPQMLGEEQVLLLTEGNCMRDQVLSSCSELAAKQRIQGLTNTLQGSSINTIRHMVASGLAISVLPATALTENDHMLFSIIPFEGTPPSRRVVLAYRRNFVRPKALSAMKAAIMQSQLHGVSFIRD

SEQ ID NO: 19516 - protein, 67 aa, Neisseria meningitidis
MGSFSLTHWIIVLIIVVLIFGTKKLRNVGKDLGGAVHDFKQGLNEGTDGKEAQQDDVIEHKKDEDKA

SEQ ID NO: 19517 - protein, 472 aa, Neisseria meningitidis
MNIHTLLSKQWTLPPFLPKRLLLSLLILLAPNAMFWVLALLTATARPIVNLDYLPAALLIALPWRFVKIAGVLAFWLAVLFDGLMMVIQLFPFMDLIGAINLVPFILTAPAPYQIMTGLLLLYMLAMPFVLQKAAAKTDFRHIAACAAVVAAAGYFTGHLSYYDRGRMANIFGANNFYYAKSQAMLYTVSQNADFITAGLVDPVFLPLGNQQRAATHLNEPKSQKILFIVAESWGLPANPELQNATFAKLLAQKDRFSVWESGSFPFIGATVEGEMRELCAYGGLRGFALRRAPDEKFARCLPNRLKQEGYATFAMHGAGSSLYDRFSWYPRAGFQEIKTAENLIGKKTCAIFGGVCDSELFGEVSAFFKKHDKGLFYWMTLTSHADYPESDIFNHRLKCTEYGLPAETDLCRNFSLHTQFFDQLADLIQRPEMKGTEVIIVGDHPPPVGNLNETFRYLKQGHVAWLHFKIK

SEQ ID NO: 19518 - protein, 213 aa, Neisseria meningitidis; identical to SEQ ID NO: 14132

SEQ ID NO: 19519 - protein, 378 aa, Neisseria meningitidis
MEMKQTDSTIKSRAAVAFAPNQPLQIVEIDVEMPRKGEVLIRNTHTGVCHTDAFTLSGSDPEGVFPVVLGHEGAGVVVAVGEGVSSVKPGDHVIPLYTAECGECEFCCSGKTNLCVSVRDTQGKGLMPDGTTRFSYQGQPIYHYMGCSTFSEYSVVAEVSLAKINPEANHEQVCLLGCGVTTGIGAVHNTAKVQEGDSVAVFGLGAIGLAVVQGARQAKAGRIIAIDTNPAKFELAKQFGATDCLNPNDYDKPIKDVLLDINKWGIDHTFECIGNVNVMRQALESAHRGWGQSIIIGVAGAGQEISTRPFQLVTGRVWKGTAFGGVKGRSELPKMVEDSMKGDIELEPFVTHTMTLDQINEAFDLMHEGKSIRAVIHY

SEQ ID NO: 19520 - protein, 93 aa, Neisseria meningitidis
MKTLVLLLLSFSTTTAFAAYGLGLGQAPKYPADFRAYGYVYSGRQGWVLKTEADAIKLDTLFKRFVYRPSTANQNPVGQRSDGIPANHTKEKP

SEQ ID NO: 19521 - protein, 140 aa, Neisseria meningitidis; identical to SEQ ID NO: 1135

SEQ ID NO: 19522 - protein, 433 aa, Neisseria meningitidis; identical to SEQ ID NO: 2404

SEQ ID NO: 19523 - protein, 225 aa, Neisseria meningitidis; identical to SEQ ID NO: 1002

SEQ ID NO: 19524 - protein, 299 aa, Neisseria meningitidis
MKTNSEELTVFVQVVESGSFSRAAEQLAMANSAVSRIVKRLEEKLGVNLLNRTTRQLSLTEEGAQYFRRAQRILQEMAAAETEMLAVHEIPQGVLRVDSAMPMVLHLLAPLAAKFNERYPHIRLSLVSSEGYINLIERKVDIALRAGELDDSGLRARHLFDSRFRVIASPEYLAKHGTPQSAEELAGHQCLGFTEPGSLNTWAVLDAQGNPYKISPHFTASSGEILRSLCLSGCGIACLSDFLVDNDIAEGKLIPLLAEQTSNKTHPFNAVYYSDKAVNLRLRVFLDFLVEELGNNLCG

SEQ ID NO: 19525 - protein, 468 aa, Neisseria meningitidis; identical to SEQ ID NO: 1695

SEQ ID NO: 19526 - protein, 317 aa, Neisseria meningitidis; identical to SEQ ID NO: 11285

SEQ ID NO: 19527 - protein, 539 aa, Neisseria meningitidis
MDNLVWDGVPDIRTLDQTIRKHAHPLNLIVCLPDNQIPDFQTAQDASDAECRLKHRLDQATQCLQFDSINLIEHILPDVRFWLVPPSRTRRLHEHFHHISWQTEAIPQTESKPDKPWFALPQTSERQKPEYILVIGAGISGAATAHALASHGISVTVLEARKAAQAASGNRQGLLYAKISPHDTEQTELLLAGYGYTKRLLGHILPESDTWGGNGIIHLNYSRTEQQRNHELGLQKHHNHLYRSITQAEAEKIAGIPLSVPYDHPSCGLYWQHGVWLNPPAFVRALLRHPLIGLHEDTPLTDISHDGEKWIASTPNGTFTATHIIYCTGANSPYLPETNLAALPLRQIRGQTGLTPSTPFSEQLRCAVSGESYISPSWHGLHCYGASFIPNSSHTGWNEAEEASNRQALAHLNPALSESLFAANPNPQKHQGHAAIRCDSPDHLPLVGALGDIAAMRQTYTKLALDKNYRIDTPCPYLPNAYVNTAHGTRGLATAPICAAAIAAQILGLPHPFSQRLRHALHPNRTIIRAIVRRKDLTP

SEQ ID NO: 19528 - protein, 320 aa, Neisseria meningitidis; identical to SEQ ID NO: 1339

SEQ ID NO: 19529 - protein, 358 aa, Neisseria meningitidis; identical to SEQ ID NO: 9712

SEQ ID NO: 19530 - protein, 114 aa, Neisseria meningitidis; identical to SEQ ID NO: 53

SEQ ID NO: 19531 - protein, 151 aa, Neisseria meningitidis
MVDAVVKTPEFLPFTSVGIFRFGADITEYKNILETFMYEPPDEFRTEYYESPDSNLLISVKKNKIISIFCYQELYFMGVNIIGLNFEDFKQLFHHPKSYGVDKYYLSNESYPTYVYEFDEIGVQAWEAKGKIVTIIARGKDNYSTEPYYDE

SEQ ID NO: 19532 - protein, 109 aa, Neisseria meningitidis; identical to SEQ ID NO: 386

SEQ ID NO: 19533 - protein, 704 aa, Neisseria meningitidis
MDLLSVFHKYRLKYAVAVLTILLLAAIGLHASVYRIFTPENIRSRLQQSIAHTHRKISFDADIQRRLLPRPTVILKNLTITEPGGDRTAVSVQETKIGLSWKNLWSDQIQIEKWVVSSAELALTRDGKGVWNIQDLIDSQKRQASVNRIIVENSTVRLNFLQEQLILKEINLNLQSPDSSGQPFESSGILVWGKLSVPWKSRGLFLSDGIGTPKISPFHFEASTSLDGHGITISTTGTPAIRFNAGGADAAGLGLRADTSFRNLHLTAQIPALALRNNSIKIETVNGAFTAGGEYAQWDGSFKLDKANLHSGIANIGNAEISGSFKTPRHQTNFSLNSPLVWTENKGLDAPRLYVSTLQDTVNRLPQPRFISRLDGSLSVPNLQNWNAELNGTFDRQTVAAKFRYTHEDAPHLEAAVALQKLNLTPYLDDVRQQNGKIFPDTLAKLSGDIEAHLKIGKVQLPGLQLDDMETYLHADKGHIALSRFKSGLYGGHTEGGISIANTRPATYRLQQNASNIQIQPLLQDLFGFHSFSGNGDAVIDLTAGGETRKELIRSLQGSLSLNISNGSWHGIDMDNILKNGISGKTADNAAPSTPFHRFTLNSEISDGISRHIDTELFSDSLYVTSNGYTNLDTQELSEDVLIRNAVHPKNKPIPLKITGTVDKPSITVDYGRLTGGINSRKEKQKILEDTLLEQWQWLKPKEP

SEQ ID NO: 19534 - protein, 122 aa, Neisseria meningitidis
MKPLKRHPALIGLSRDHHHSLSLCVRLLRTPEERHRDELEPHFSELETHFREEEAKFAPIWQNVAPELKQRFEKDHARLRQMMASPEYGNAAWNTAFATTLRDHARFEERELFPAAEPFLPA

SEQ ID NO: 19535 - protein, 237 aa, Neisseria meningitidis; identical to SEQ ID NO: 19351

SEQ ID NO: 19536 - protein, 233 aa, Neisseria meningitidis; identical to SEQ ID NO: 3223

SEQ ID NO: 19537 - protein, 195 aa, Neisseria meningitidis; identical to SEQ ID NO: 15117

SEQ ID NO: 19538 - protein, 324 aa, Neisseria meningitidis
MTEYPGIGSPLFYGVFFAAVLVMIALDMFSLKKNGSHKVGVKEALAWSGLWVAVSCLFAGWLYFELAGNLGYGAAVAKEKVLEFFTGYILEKSLAVDNIFVFLMIFGYFKVAPQFQHRVLLYGVLGALVLRTVMIFVGAALVQQFEWILYLFGAFLLYTGIHMMKPEGDEKEDLANSRLLNAVKKVVPVGTEFHGEKFFTVENGKKIATPLFLVLVMIELSDVVFAVDSIPAVFAVTTDPFIVLTSNIFAILGLRAMYFLLADVAERFIFLKYGLAFVLSFIGVKMLVMHWVHIPISVSLSVVFGALGASILTSLIYTKKQPDK

SEQ ID NO: 19539 - protein, 135 aa, Neisseria meningitidis; identical to SEQ ID NO: 803

SEQ ID NO: 19540 - protein, 488 aa, Neisseria meningitidis; identical to SEQ ID NO: 3695

SEQ ID NO: 19541 - protein, 473 aa, Neisseria meningitidis
MDTKEILGYAAGSIGSAVLAVIILPLLSWYFPTDDIGRIVLMQTAAGLTVSALCLGLDQAYVREYYAAADKDTLFKTLFLPPLLSAAAIAVLLLSRPTLPSEILFSLDDAAAGIGLVLFELSFLPIRFLLLVLRMEGRALAFSSAQLVPKLAILLLLPLTVGLLHFPARTAVLTAVYALANLAAAAFLLFQNRCRLKAVRRAPFSSAVLHRGLRYGIPIALSSIAYWGLASADRLFLKKYAGLEQLGVYSMGISFGGAALLFQSIFSTVWTPYIFRAIEENAPPARLSATAESAAALLASALCLTGIFSPLASLLLPENYAAVRFIVVSCMLPPLFCTLVEISGIGLNVVRKTRPIALATLGALAANLLLLGLAVPSGGARGAAVACAASFWLFFVFKTESSCRLWQPLKRLPLYMHTLFCLASSAAYTCFGTPANYPLFAGIWAAYLAGCLLRHRKDLHKLLHYLKKQGFPL

SEQ ID NO: 19542 - protein, 137 aa, Neisseria meningitidis; identical to SEQ ID NO: 14675

SEQ ID NO: 19543 - protein, 102 aa, Neisseria meningitidis
MTLKTDLLLKINNEDYQRLILKHISEFSEGEIRLLNEILEKFNFDVVQAQALAQAVMQQVRFDPNAYHIDSDDEDTTGICPHCINPPMPPLRDYLVWRETRG

SEQ ID NO: 19544 - protein, 481 aa, Neisseria meningitidis
MAHFFNINYPTYKGKNMTVRIEHDLLGDREIPAEVYWGIHTLRAIENFKISTQKISDVPQFVRSMVMVKKATAQANGELGAVKPEIAAAIEKACDEVLLNNRCLDQFPSDVYQGGAGTSVNMNTNEVIANLALEVLGYEKGRYDIVNPMDHVNASQSTNDAYPTGFRLAVYYSIGELLDKLTVLKNAFAAKAEEFKDVLKMGRTQLQDAVPMTAGQEFQSFQVLLEEEILNLDRTRQLLLEVNLGATAIGTGVNTPKGYAELVVKKLSEVSGLPCKLTENLIEATSDCGAYVMVHGALKRTAVKLSKICNDLRLLSSGPRAGLKEINLPELQAGSSIMPAKVNPVIPEVVNQVCFKVIGNDTTITFAAEAGQLQLNVMEPVIAQCMFETISLLGNAAVNLSDKCVKGITVNREICERYVFNSIGLVTYLNPYIGHHNGDLVGKICAQTGKGVREVVLERGLLSEEELNRILSPENLMNPHL

SEQ ID NO: 19545 - protein, 197 aa, Neisseria meningitidis; identical to SEQ ID NO: 5504

SEQ ID NO: 19546 - protein, 384 aa, Neisseria meningitidis
MKFIDEAKIEVAAGKGGNGATSFRREKFVPRGGPDGGDGGKGGSVWAEADENTNTLVEYRFVKRYQAKNGEKGHGSDRYGAGADDIVLKMPIGTLIRDLDTDEIVADLTYHGQRVCLAKGGKGGLGNIHFKSSVNRAPKQSTPGEEGETRSLQLELKVLADVGLLGMPNAGKSTLITAVSAARPKIANYPFTTLHPNLGVVRIDENHSFVMADIPGLIEGAAEGAGLGHRFLKHLSRTGLLLHVVDLAPFDETANPAEEALAIINELRKYDEELYDKPRWLVLNKLDMLDEEEAQARSAAFLEAIGWDYPKPDDRFQFDMETPRLFQISALTHQGTQELVHQINQYLTEKKRIEAEKAEAEKAAANVEIIEQQPKTDTGVFKPE

SEQ ID NO: 19547 - protein, 41 aa, Neisseria meningitidis
LKEDFINNERYEKTELYPQKDKVILFPKFGEYDLVLNPDII

SEQ ID NO: 19548 - protein, 259 aa, Neisseria meningitidis; identical to SEQ ID NO: 331

SEQ ID NO: 19549 - protein, 140 aa, Neisseria meningitidis; identical to SEQ ID NO: 2732

SEQ ID NO: 19550 - protein, 181 aa, Neisseria meningitidis
MLKTSFAVLGGCLLLAACGKSENMAEQPQNAVQSAPKPVFKVKYIDNTAIAGLALGQSSEGKTNDGKKQISYPIKGLPEQNVVWLTGKHTNDLEAVVGKCMETDGKGAPSGWAANGVCHTLFAKLVGNIAEDGGKLTDYLISHSALQPYQAGKSGYAAVQNGRYVLEIDSEGAFYFRRRHY

SEQ ID NO: 19551 - protein, 503 aa, Neisseria meningitidis; identical to SEQ ID NO: 8447

SEQ ID NO: 19552 - protein, 160 aa, Neisseria meningitidis; identical to SEQ ID NO: 2526

SEQ ID NO: 19553 - protein, 230 aa, Neisseria meningitidis
MYSNNAITNNRNNITLGAYRDAIISIFSDENVVRAIGTINSMYEEYLTLSHKIDQRAFLREGERLSAKAREFQRTAEEAQKSLKEGIGRAASKFRGNSKEAFVARKVQSDLQKALNASNYNKQQYARRAATALENASKSKVMAANLGKFTYGATVAMGTLSMGSAWWKALDEEGNWSDVGLSSASFLGGLMGFQWGAALGVGAFGLLTGGAGWLVVGTIIGGGSELGGDH

SEQ ID NO: 19554 - protein, 144 aa, Neisseria meningitidis; identical to SEQ ID NO: 6930

SEQ ID NO: 19555 - protein, 369 aa, Neisseria meningitidis; identical to SEQ ID NO: 8556

SEQ ID NO: 19556 - protein, 123 aa, Neisseria meningitidis; identical to SEQ ID NO: 130

SEQ ID NO: 19557 - protein, 57 aa, Neisseria meningitidis; identical to SEQ ID NO: 735

SEQ ID NO: 19558 - protein, 249 aa, Neisseria meningitidis
MLIQAVTIFPEMFDSITRYGVTGRANRQGIWQFEAVNPRKFADNRLGYIDDRPFGGGPGMIMMAPPLHAAIEHAKAQSSQAAKVIYLSPQGKPLTHPKAAELAELPHLILLCGRYEGIDERLLQTSVDEEISIGDFVVSGGELPAMMLMDAVLRLVPGVLGDMQSAEQDSFSSGILDCPHYTKPLEFQGMAVPEVLRSGNHGLIAEWRLEQSLRRTLERRPDLLEKRSLIPKESRILNKILQEQREIQS

SEQ ID NO: 19559 - protein, 142 aa, Neisseria meningitidis
LGNFAKVSGYTYNKSRYRNAAEVNAERLAKNSSADPYNFSNFTPVHIFRFGTSFHIPNTGLTVGGGVSAQSSTSSLYNIRQGGYGLIDGFVRYELGKHAKLSLIGTNLNGRTYFENNYNRTRGANNFYGEPRTVSMKLDWQF

SEQ ID NO: 19560 - protein, 290 aa, Neisseria meningitidis
MPILNHIALIGVGLIGGSFVLDLKRQGLVRTVTGIDTDRDNLERALERGVIDRASVAIDADSIGGADLVLIATPVATVPAILTALRPVLPEHTWISDVGSTKSSVIEAFRRCLPDRLHHCIATHPIAGSDRSGAQAAQFGLFRHRKLIITPHGGEHSDGIALIENLWHAVGAEIYTMDAQRHDAVFAAVSHMPHLTAFAYVHQILDHPDGQEYLKFAATGFRDFTRIASGHPAVWADICLANKDSLLQLVQGLGKQLDVLADILTADDREALYRYFEEAKTTRDRWLDGN

SEQ ID NO: 19561 - protein, 489 aa, Neisseria meningitidis; identical to SEQ ID NO: 7627

SEQ ID NO: 19562 - protein, 134 aa, Neisseria meningitidis
MTQETALGAALKSAVQTMSKKKQTEMIADHIYGKYDVFKRFKPLALGIDQDLIAALPQYDSALIARVLANHCRRPRYLKALARGGKRFDLNNRFKGEVTPEEQAIAQNHPFVQQALQQQSAQAVAEAAGSSAAE

SEQ ID NO: 19563 - protein, 120 aa, Neisseria meningitidis
MDIRYFGTTPRYSEAVGANGLIFLSGMVPENGETAAEQTADVLAQIDRWLAECGSDKAHVLDAVIYLRDMGDYAEMNGVWDAWVAAGRTPARACVEARLARPEWRVEIKITAVKKDAATA

SEQ ID NO: 19564 - protein, 435 aa, Neisseria meningitidis
MKPVNIGLLGLGTVGGGTAAVLRDNAEEISRRLGREVRISAVCDLSEEKARQICPSAAFVKDPFELVARKDVDVVVELFGGTGIAKDAVLKAIENGKHIVTANKKLLAEYGNEIFPLAEEKNVMVQFEAAVAGGIPIIKALREGLAANRIKSIAGIINGTSNFILSEMREKGSAFADVLKEAQALGYAEADPTFDIEGNDAGHKITIMSALAFGTPMNFSACYLEGISKLDSRDIKYAEELGYRIKLLGITRKTGKGIELRVHPTLIPESRLLANVNGVMNAVRVNADMVGETLYYGAGAGALPTASAVVADIIDIARLVEADTAHRVPHLAFQPAQVQAQTILPMDEITSSYYLRVQAKDEPGTLGQIAALLAQENVSIEALIQKGVIDQTTAEIVILTHSTVEKHIKSAIAAIEALDCVEKPITMIRMESLHD

SEQ ID NO: 19565 - protein, 215 aa, Neisseria meningitidis; identical to SEQ ID NO: 1514

SEQ ID NO: 19566 - protein, 325 aa, Neisseria meningitidis
MIYPWHNEQWRQIAEHWERRPNAWLFAGKKDTGKTTFARFAAKALLCETPAPGCKPCGECMSCHLFGQGSHPDFYEITPLSDEPENGRKLLQIKIDAVREIIDNVYLTSVRGGLRVILIHPAESMNVQAANSLLKVLEEPPPQVVFLLVSHAADKVLPTIKSRCRKMVLPAPSHGEALAYLRDRGVAEPEEFLAFHSGAPLFDEADGVRALRIKLLDILAEPRLLKILDYAALFDKEKLPLDVFVGWMQKWLVDLGLCLQHMKPVYYPAYEDRLLQTASGFRPRNVFAAEDMLKQLAPYGFHTLNVKMQIEHLLINYLELKKENG

SEQ ID NO: 19567 - protein, 183 aa, Neisseria meningitidis
MKVLNGWSDRKMWRVLSALPIGVVFFDLIYGFVLNILQGLDLQRAVPDSEGVLAVTPDIAFNSLQIVANGGMAAVVCFGLAVVFLLNRSVRRRQVLEIGVFRMLGLVAVLAFSAPSVWEWANALPLLLKGADVVNTGNARYVLTALCMPFPAVSCVIGLVGRFRLQTASGRAAKAGGAVKAGG

SEQ ID NO: 19568 - protein, 123 aa, Neisseria meningitidis; identical to SEQ ID NO: 3099

SEQ ID NO: 19569 - protein, 178 aa, Neisseria meningitidis; identical to SEQ ID NO: 5654

SEQ ID NO: 19570 - protein, 313 aa, Neisseria meningitidis; identical to SEQ ID NO: 2333

SEQ ID NO: 19571 - protein, 181 aa, Neisseria meningitidis
MKHYALLISFLALSACSQGSEDLNEWMAQTRREAKAEIIPFQAPTLPVAPVYSPPQLTGPNAFDFRRMETDKKGGNAPDTKRIKETLEKFSLENMRYVGILKSGQKVSGFIEAEGYVYTVGVGNYLGQNYGRIESITDDSIVLNELIEDSTGNWVSRKAELLLNSSDKNTEQAAAPAAEQN

SEQ ID NO: 19572 - protein, 227 aa, Neisseria meningitidis
MELVFIRHGQSEWNAKNLFTGWRDVKLSGQGLAEAAAAGKKLKENGYEFDIAFTSVLTRAIKTCNIVLEESDQLFVPQIKTWRLNERHYGRLQGLDKKQTAEQYGDEQVRIWRRSYDTLPPLLDKDDEFSAHKDRRYAHLPADVVPDGENLKVTLERVLPFWEDQIAPAILSGKRVLVAAHGNSLRALAKHIEGISDKDIMGLEIPTGQPLVYKLDDNLKVIEKFYL

SEQ ID NO: 19573 - protein, 354 aa, Neisseria meningitidis
MKAARFHDKGDIRIEDIPEPTVAPGTVGINVAWCGICGTDLHEFMEGPIFIPPCGHPHPISGESAPVTMGHEFSGVVYAVGEGVDDIKVGQHVVVEPYIVHDDVPTGPGSNYHLSKDMNFIGLGGCGGGLSEKIAVKRRWVHPISDKIPLDQAALIEPLSVGHHAYVRSGAKAGDVALVGGAGPIGLLLAAVLKAKGIKVIITELSKARKDKARESGVADYILDPSEVDVVEEVKKLTNGEGVDVAFECTSVNKVLDTLVEACKPAANLVIVSIWSHPATVNVHSVVMKELDVRGTIAYCNDHAETIKLVEEGKINLEPFITQRIKLDELVSEGFERLIHNNESAVKIIVSPNL

SEQ ID NO: 19574 - protein, 159 aa, Neisseria meningitidis
MKHILPLIAASALCISTASAHPAGKPPTQNETAMTTHTLTSKYSFDETVSRLETAIKSKGMNIFAVIDHQEAARRNGLTMQPAKVIVFGTPKAGTPLMVKDPAFALQLPLRVLVTETDGKVRAAYTDTRALIAGSRIGFDEVANTLANAEKLIQKTVGE

SEQ ID NO: 19575 - protein, 130 aa, Neisseria meningitidis; identical to SEQ ID NO: 4345

SEQ ID NO: 19576 - protein, 768 aa, Neisseria meningitidis
MAKNLLIVESPSKAKTLKKYLGGDFEILASYGHVRDLVPKSGAVDPDNGFAMKYQLISRNGKHVDAIVAGAKEAENIYLATDPDREGEAISWHLLEILKSKRGLKNIKPQRVVFHEITKNAVLDAVAHPREIEMDLVDAQQARRALDYLVGFNLSPLLWKKIRRGLSAGRVQSPALRLICERENEIRAFEAQEYWTVHLDSHKGRSKFTAKLAQYNGAKLEQFDLPNEAAQADVLKELEGKEAVVTAIEKKKRSRNPAAPFTTSTMQQDAVRKLGFTTDRTMRTAQQLYEGIDVGQGAIGLITYMRTDSVNLADEALTEIRHYIENKIGKEYLPSAAKQYKTKSKNAQEAHEAIRPTSVYRTPESVKPFLSADQFKLYQMIWQRTVACQMTPAKFDQTTVDITVGKGVFRVTGQVQTFAGFLSVYEESSDDEEGEDSKKLPEMSEGDKLPVDKLYGEQHFTTPPPRYNEATLVKALEEYGIGRPSTYASIISTLKDREYVTLEQKRFMPTDTGDIVNKFLTEHFAQYVDYHFTAKLEDQLDEIADGKRQWIPLMDKFWKPFIKQVEEKEGIERAKFTTQELDETCPKCGEHKLQIKFGKMGRFVACAGYPECSYTRNVNETAEEAAERIAKAEAEQAELDGRECPKCGGRLVYKYSRTGSKFIGCANYPKCKHVEPLEKPKDTGVQCPQCKKGNLVERKSRYGKLFYSCSTYPDCNYATWNPPVAETCPKCAWPVLTIKTTKRWGVEKVCPQKECGWKEQIEPPAPKE

SEQ ID NO: 19577 - protein, 290 aa, Neisseria meningitidis
LRPSESLGQTMCQLLGMNCNTPTDIMFSFEGFRRRGGITDHHADGFGIGFFEGKGVRLFHDDKPSANSPVADLVRAYQIKSENVVAHIRKASQGQTSLANTHPFMREMWGGYWLFAHNGHLIDFFPEQGEFFHPVGTTDSERAFCHILNRLRTRFAARPDDDTLFDAIAGLTHEIRKFGLFNFMLSDGIALFAHASTLLHYIVRQAPFGKARLLDDDVMVDFAEVTTPSDRVAVIATLPLTRDESWSQLAVDELVMFREGNIVRHDRPENPVYMSVEEGLETARAAGVAV

SEQ ID NO: 19578 - protein, 495 aa, Neisseria meningitidis; identical to SEQ ID NO: 2837

SEQ ID NO: 19579 - protein, 272 aa, Neisseria meningitidis; identical to SEQ ID NO: 1395

SEQ ID NO: 19580 - protein, 280 aa, Neisseria meningitidis
MDIKINDFTLGNNSPFVLFGGINVLESLDSTLQTCAHYVEVTRKLGIPYIFKASFDKANRSSIHSYRGVGLEEGLKIFEKVKAEFGIPVITDVHEPHQCQPVAEVCDVIQLPAFLARQTDLVAAMAETGNVINIKKPQFLSPSQMKNIVEKFHEAGNGKLILCERGSSFGYDNLVVDMLGFGVMKQTCGNLPVIFDVTHSLQTRDAGSAASGGRRAQALDLALAGMATRLAGLFLESHPDPKLAKCDGPSALPLHLLEDFLIRIKALDDLIKSQPILTIE

SEQ ID NO: 19581 - protein, 149 aa, Neisseria meningitidis; identical to SEQ ID NO: 4552

SEQ ID NO: 19582 - protein, 218 aa, Neisseria meningitidis
MKNKTKVWDFPTRLFHWLLAASLPFMWYSAKTGGDMLQWHTRVGLFILFLLVFRLCWGIWGSDTARFSRFVRGWSGIREYMKNGIPEHVQPGHNPLGALMVVALLAAVSFQVGTGLFAADENTFSTNGYLNHLVSEHTGSLMRKIHLNFFKLLAVFSAIHIAAVAAYRVFKKKNLVLPMITGFKYIEGKTSIRFAGKTALAAALSVAALAAAAILLLS

SEQ ID NO: 19583 - protein, 163 aa, Neisseria meningitidis; identical to SEQ ID NO: 6300

SEQ ID NO: 19584 - protein, 106 aa, Neisseria meningitidis; identical to SEQ ID NO: 853

SEQ ID NO: 19585 - protein, 408 aa, Neisseria meningitidis
MPSETFRSKKMSQKLILVLNCGSSSLKGAVLDNGSGEVLLSCLAEKLNLPDAYITFKVNGEKHKVDLSAHPDHTGAVEALMEELKAHGLDSRIGAIGHRVVSGGELYSESILVDDEVIAGIEKCIPLAPLHNPAHLLGLRAAQSIFKGLPNVVVFDTSFHQTMPEVAYKYAVPQELYEKYGLRRYGAHGTSYRFVADETARFLGKDKKDLRMVIAHLGNGASITAVANGESRDTSMGLTPLEGLVMGTRSGDIDPSVFGFLAENANMTIAQITEMLNKKSGLLGISGLSNDCRTIEEEAAKGHKGAKLALDMFIYRLAKYIGSMAVAAGGLDALVFTGGIGENSDIIRERVIGYLGFLGLNIDQEANLKARFGNAGVITTAGSKAVAVVIPTNEELMIAHDTARLSGL

SEQ ID NO: 19586 - protein, 298 aa, Neisseria meningitidis; identical to SEQ ID NO: 5738

SEQ ID NO: 19587 - protein, 383 aa, Neisseria meningitidis
MSSRDQLFKAPPFENHSPLTWYQAASQLPNFIRDDAQAAAIEHLDRLWTELMMFKRKRNRFLGRSLRSPQVPKGLYFYGGVGRGKSFLMDAFFGCLPYRRKRRVHFHAFMAEIHRRLKTLKSESNPLKSVAAEIAKETRVLCFDEFHVSDIADAMILGRLLENLLNEGVVLVATSNYAPSELYPQGQNRSSFLPTIALIESSLTVLNVDGGEDYRLRTLRPAEIFFTPANEENEAKLAKLFKEMTGITDLNPGISTIHGREIPHKAESGRAIWFDFRALCFGPRSQSDYLYLAEHYEMVFISGLEQLSPQEKAEARRLTWLIDVLYDFRVKLCATGAVDVNHIYTEGDFAEEFTRTASRMVEMQSEVYLEQPHLTLSPKASGG

SEQ ID NO: 19588 - protein, 79 aa, Neisseria meningitidis; identical to SEQ ID NO: 831

SEQ ID NO: 19589 - protein, 160 aa, Neisseria meningitidis; identical to SEQ ID NO: 236

SEQ ID NO: 19590 - protein, 231 aa, Neisseria meningitidis
MSELILKCEGVGKRYRDGGLDVRVLHGLDLEILAGESTGIIGSSGSGKSTLLHILGGLDMPSEGRVLLMGEDLRTLSQRQLGILRNRHLGFVYQFHHLLPEFSALENVMMPLLIGKKKREEAAETAMAMLEKVGLKHRSAHRAGELSGGERQRAAIARALVTQPKCLLADEPTGNLDRANARNVLDMMLELKTELGTGLVVVTHDDELAGRFERVMVMKDGSLHPKQGANA

SEQ ID NO: 19591 - protein, 456 aa, Neisseria meningitidis; identical to SEQ ID NO: 10506

SEQ ID NO: 19592 - protein, 578 aa, Neisseria meningitidis
MPSETVFRRHCSAQFHFKRPIPMEKIWLDSYEQGVNAEIDITQYGSVSDVFCQSVKKFAGQPAFQNMGKTLTYAETGKLATDFASYLQNVLKLPRGERVAIMMPNVLQYPIALFGILQAGLVAVNTNPLYTPRELEHQLKDSGAAAIIVLENFANTLELVLPRTQIKHVIVASVGEMFGLLKGSLINFIIRKIKKMVPEYRIRETVSFQTALKEGAKHVFQPVALNREDTALLQYTGGTTGVAKGAVLSHGNICANMLQAKEWIKNQLREGKETVIAALPLYHIFALTVNLMIFANAGSKIVLITNPRDMKGFIGELKKQRVNVFIGVNTLFNAMVNRPDFAEVDFSELRLTLGGGMATQKAVAEKWKKITGTPIVEAYGLTEASPGVCCNPLNIESYSGSIGLPVSSTEVELRDANGKEVPVGQPGELWVKGPQVMQGYWNRPEETAKAIDARGFLETGDIAVMDEKGWLKLVDRKKDLVVVSGFNVYPNEIEEVIAHHGKVMEVACIGVPDEKTGEALKVFVVKKDPSLTKEELIAFCRTELTAYKVPKNIEFRDELPKSNVGKILRRELRQSTGK

SEQ ID NO: 19593 - protein, 159 aa, Neisseria meningitidis; identical to SEQ ID NO: 38

SEQ ID NO: 19594 - protein, 287 aa, Neisseria meningitidis; identical to SEQ ID NO: 8500

SEQ ID NO: 19595 - protein, 72 aa, Neisseria meningitidis
MKEYKVVIYQESLLSSLFFGAAKVNPVNFSAFLNKQIPRRLAGRNDGKRFAPYAAVFQTRGLRRHFGAGSCL

SEQ ID NO: 19596 - protein, 357 aa, Neisseria meningitidis; identical to SEQ ID NO: 14144

SEQ ID NO: 19597 - protein, 502 aa, Neisseria meningitidis; identical to SEQ ID NO: 1458

SEQ ID NO: 19598 - protein, 279 aa, Neisseria meningitidis
MTATAAAIDRLLPQTQCRECGYDGCLPYAQAVATGEAYNLCAPGGEAVIRDISALLGKPLVAPAKTQAKALARIDETACIGCTACIRACPADAIMGAGKLMHTVIADECTGCGLCVAPCPVDCIHMQPVADTVLPRARRFSLSADSRFAAAEHARARYLKRNERKQREADERKAMLAEREAAVRNARPQTPDTPKKPAFNPADLIAKAMAKAQTQQDRLAAADNRKDYQAKQIAEARERAELRRAQRDMKYGSDSEKAAALEYLKQYKAKQEAAQNTAS

SEQ ID NO: 19599 - protein, 748 aa, Neisseria meningitidis
LRNFDHTGVQTASRNLDCRLNIKAGITLMQQKIRFQIEGMTCQACASRIEKVLNKKDFVESAGVNFASEEAQVVFDDSKTSVADIAKIIEKTGYGAKEKTEDTLPQPEAEHHIGWRLWLLFTINVPFLIGMAGMMIGRHDWMIPPLWQFALASVVQLWLAIPFYKSAWASIKGGLANMDVLVTIGTVSIYLYSVYMLFFSPHAAHGMAHVYFEAGVMVIGFVSLGKFLEHRTKKSSLNSLGLLLKLTPTQVNVQRNGEWKQLPIDQVQIGDLIRANHGERIAADGIIESGSGWADESHLTGESNPEEKKAGGKVLAGALMTEGSVVYRATQLGSQTQLGDMMNALSEAQGSKAPIARVADKAAAVFVPAVVGIALLTFIVTWLIKGDWTVALMHAVAVLVIACPCALGLATPAAIMVGMDKAVKHGIWFKDAAAMEEAAHVDAVVLDKTGTLTEGRPQVAAVYCVPDSGFDEDDLYRIAAAVEQNATHPLARAIVSAAQTRSLEIPAAQNAQTVVGAGIAAEVEDVGLVKAGKAEFAELTLPEFSDGVWDIASIVAVSVDNKPIGAFALADALKADTAEAIGRLKKHNIDVYIMSGDNQGTVEYVAKQLGIAHAFGNMSPRDKAAEVQKLKAAGKTVAMVGDGINDAPALAAANVSFAMKGGADVAEHTASATLMQHSVNQLADALLVSQATLKNIKQNLFFAFFYNILGIPLAALGFLNPVIAGAAMAASSVSVLSNALRLKRVKID

SEQ ID NO: 19600 - protein, 244 aa, Neisseria meningitidis
VNEKTDQKAVSAQQAKEQTSFNNPEPMTGFEHTVTFDFQGTKMVIPYGYLARYTQDNATKWLSDTPGQDAYSINLIEISVYYKKTDQGWVLEPYNQQNKAHFIQFLRDGLDSVDDIVIRKDACSLSTTMGERLLTYGVKKMPSAYPEYEAYEDKRHIPENPYFHKLYYIKKGENPAIITHRNNRINQTEEDNYSTSVGSCINGFTVRYYPFIREKQQLTQQELVGYHQQVEQLVQSFVNNPSKK

SEQ ID NO: 19601 - protein, 258 aa, Neisseria meningitidis; identical to SEQ ID NO: 5438

SEQ ID NO: 19602 - protein, 222 aa, Neisseria meningitidis
  misc_feature 218, 219, 220: 'Xaa' is any amino acid
MSTFFQQTAQAMIAKHIDRFPLLKLDRVIDWQPIEHYLNRQKTRYLRDHRGRPAYPLLSMFKAVLLGQWHSLSDPELEHSLITRIDFNLFCRFDELSIPDYSTLCRYRNWLAQDNTLSELLKLINRQLTEKGLKIEKASAAVVDATIIQTAGSKQRQAIEVDEEGQVSGQTTPSKDSDARWIKKSGLYKLGYKQHTRTDGEGYIEKLHITPANAHECXXXHT

SEQ ID NO: 19603 - protein, 368 aa, Neisseria meningitidis; identical to SEQ ID NO: 5075

SEQ ID NO: 19604 - protein, 1144 aa, Neisseria meningitidis
MTEPTYIPLRLHTEFSITDGMVRIKKLIAKAQEYGLPALGISDLMNEFGLVKFYKACRGAGIKPIGAADVWIGNPNAPDKPFRAMLIIRNDAGYLRLSELLTEAYVGKDRNIHHAELNPEWLENGDNSGLICLSGAHYGEVGMNLLNGNEDAARAAALKYAAWFPDAFYLELQRLPERPEWEACVSGSVKLAEELGLPVVATHPTQFMSRDDFNAHEARVCIAGGWVLTDKKRPRDFTPGQFFIPPETMAERFADLPEALENTVEIAKRCNLHITLGKNFLPLFPTPDGLSLDDYLIKLSNEGLQERMVQLYPDEAERAAKMPEYQKRLDFELNIIIQMKFPGYFLIVQDFINWAKTHGCPVGPGRGSGAGSLVAYSLKITDLDPLKYALLFERFLNPERVSMPDFDVDFCQSNRGRVIEYVREKYGAEAVSQIVTFGTMSSKAVIRDVGRVLELPFMLCDKLSKLIPLEANKPLSLEKAMETEPQIQELIEAEEADELITLAKKLEDLTRGLGMHAGGVLIAPGKISDYSPVYQADESASPVSMYDKGDVEDVGLVKFDFLGLRNLTIIEMAQDNIKNTTGDIIDVGKIPLDDQVAYQIFRDANTTAVFQFESTGMKKMLKTAHTTKFEELIAFVSLYRPGPMDNIPDFVARMKGQEFQYIHPLLEGILAPTYGIMVYQEQVMQAAQIIGGYSLGGADLLRRAMGKKKPEEMVKHREIFAEGAAKQGISREKSDEIFNYMEKFAGYGFNKSHAAAYALISYQTAWLKAHYPAEFMAATMSSELDNTDQLKHFYDDCRANGIEFLPPDINESDYRFTPYPDMKIRYALGAIKGTGEAAVESIIAARQSGGKFTGLLDFCERVGKEHMNRRTLEALIRGGAFDSIEPNRAMLLANIDLAMDNADQKAANANQGGLFDMMEDAIEPVRLIDAPMWSESEKLAEEKTVIGFYLSGHPFGPYAQEVRQIAPQKLSKLKPQDSVRLAGFVTAVRTMMGKRGKIAFVSLEDLSGQVEIMVGGQTLENCADCLKADQVLIIESKVSRDDYGGGDGLRILANQVMTLQMARERYARSLSLALAPHHDIGKLVQLLAAHQLPDTPRIPLQLSYANEKASGRLQVPPKWTVTPSSALFGELETLLGSRSVRVNW

SEQ ID NO: 19605 - protein, 152 aa, Neisseria meningitidis
MNIQTRLAATALALFLSACGNGGAPAQPKGEISENRTAAFKSMMPDFSRMGKMVKGEEPYDVEKFKQATASFAESSKKPFTLFESDPQGNGRALPAVWSDGAKFEAEKTKFAAAVEKLNAAAQTGKLDEIKAAYGETGASCKSCHDSFRAPE

SEQ ID NO: 19606 - protein, 114 aa, Neisseria meningitidis; identical to SEQ ID NO: 5923

SEQ ID NO: 19607 - protein, 213 aa, Neisseria meningitidis
MLKPETIHISGPAGILETIHIPSEQVLARGVAVINHPNPLQGGTNTNKVIQTAAKALSKLGFHCYLPNLRGVGGSEGTHDYGRGETQDCLAVIDYARAQHPEAPEFALSGFSFGGYVATFAAQARIPDLLLLMGAAVCHYTDRPEPSAVPNVAKTLMIHGAEDEVVEIEKALKWAEPQDLPVITIAGSTHFFHGKLIVLRDTILRFAPVCLNG

SEQ ID NO: 19608 - protein, 258 aa, Neisseria meningitidis
MAKKFDKDSFSGTLIVVLAVSLICSVIVAGAVVGLKPIQEKQKLQDKQGYILSVAGLMDKDTDIGKTFAERIEQRVVDLATGEYVKDAPKDFSARIAGKDPAQSIRIKPEDDLAGIKSRAKYTEVYLVKGEDGKIGQIILPMHGNGLWSVMYGFVAIQPDGNTINGITYYEQGETPGLGGEIGNPLWQQKFVGKKLFDGQGKLALHVGKGAGSDKEHGVDALSGASLTSKGVQGSFAYWFGENGYIPYLNKLKSVGAQ

SEQ ID NO: 19609 - protein, 867 aa, Neisseria meningitidis
MSKTVRYLKDYQTPAYRILETDLHFDIAEPQTVVKSRLTVEPQRVGEPLVLDGSTKLLSVKINGVAADYVLEGETLTIADVPSERFTVEVETEILPAENKSLMGLYASGGNLFTQCEPEGFRKITFYIDRPDVMSKFTTTIVADKKRYPVLLSNGNKIDGGECSDGRHWVKWEDPFAKPSYLFALVAGDLAVTEDCFTTMGGRNVKIEFYTAEADKPKVGFAVESLKNAMKWDETRFGLEYDLDIFMVVAVGDFNMGAMENKGLNIFNTKFVLADSRTATDTDFEGIESVVGHEYFHNWTGNRVTCRDWFQLSLKEGLTVFRDQEFSGDRASRAVRRIENIRLLRQHQFPEDAGPTAHPVRPASYEEMNNFYTMTVYEKGAEVVRMYHTLLGEEGFQKGMKLYFQRHDGQAVTCDDFRAAMADANGINLDQFALWYSQAGTPVLEAEGRLKNNIFELTIKQTVPPTPDMADKQPMMIPVKVGLLNRNGEAVAFDYQGKRATEAVLLLTEAEQTFQFESVTEAVVPSLLRGFSAPVHLNYPYSNDDLLLLLAHDSDAFTRWEAAQTLYRRAVAANLAALSDGIELPKHEKLLAAVEKVISDGLLDNAFKALLLGVPSEAELWDGAENIDPLRYHQAREALLDTLAVRFLPKWHELNRQAAKQENQSYEYSPEAAGWRTLRNVCRAFVLRADPAHIETVAEKYAEMAQNMTHEWGILSAVNGNESDTRNRLLAQFADKFSDDALVMDKYFALVGSSRRSDTLQQVQTALQHPKFSLENPNKARSLIGSFSRNVPHFHAEDGSGYRFIADKVIEIDRFNPQVAARLVQAFNLCNKLEPHRKNLVKQALQRIRAQEGLSKDVGEIVGKILD

SEQ ID NO: 19610 - protein, 1491 aa, Neisseria meningitidis
MRFTHTTPFCSVLSTLGLFAVSPAYSSIVRNDVDYQYFRDFAENKGAFAVGASNISIQDKQGKILGRVLNGIPMPDFRVSNRQTAIATLIHPQYVNSVKHNVGYGSIQFGNDTQNPEEQAYTYRLVSRNPHPDYDYHLPRLNKLVTEISPAALSSVPLLGNGQPKANAYLDTDRFPYFVRLGSGTQQVRKADGTRTRTAPAYQYLTGGTPLKVLGFQNHGLLVGGSLTDQPLNTYAIAGDSGSPLFAFDKHENRWVLAGVLSTYAGFDNFFNKYIVTQPEFIRSTIRQYETRLDVGLTTNELIWRDNGNGDSTLQGLNERITLPIANPSLAPQNDSRHMPSEDAGKTLILSSRFDNKTLMLADNINQGAGALQFDSNFTVVGKNHTWQGAGVIVADGKRVFWQVSNPKGDRLSKLGAGTLIANGQGINQGDISIGEGTVVLAQKAASDGSKQAFNQVGITSGRGTAVLADSQQIKPENLYFGFRGGRLDLNGNNLAFTHIRHADGGAQIVNHNPDQAATLTLTGNPVLSPEHVEWVQWGNRPQGNAAVYEYINPHRNRRTDYFILKPGGNPREFFPLNMENSTSWQFIGNNRQQAAKQVAQAENARPDLITFGGYLGENAQTGKAAPSYSKTNIEWVNGPNTPHKPSPYTNTPTRTGAGVPTITASKKAATPAPTSHGMPTAPKTGNFSDMTGEAAIEKTRHIANAAVYGRPEYRYNGALNLHYRPKRTDSTLLLNGGMNLNGEVLIEGGNMIVSGRPVPHAYDHQAKREPVLENEWTDGSFKAARFTLRNHARLTAGRNTAHLDGDITAYDLSGIDLGFIQGKTPECYRSYHSGSTHCTPNAVLKAENYRALPATQVRGDITLNDRSELRLGKAHLYGSIRAGKDTAVRMEADSNWTLSQSSHTGALTLDGAQITLNPDFANNTHNNRFNTLTVNGTLDGFGTFRFLTGIVRKQNAPPLKLEGDSRGAFQIHVKNTGQEPQTTESLALVSLNPKHSHQARFTLQNGYADLGAYRYILRKNNNGYSLYNPLKEAELQIEATRAEHERNQQAYNQLQATDISRQVQHDSDATRQALQAWQNSQTELARIDSQVQYLSAQLKQTDPLTGILTRAQNLCAAQGYSVDICRQVAKAADTNDLTLFETELDTYIERVEMAESELDKARQGGDAQAVETARHAYLNALNRLSRQIHSLKTGVAGIRMPNLAELISRSANTAVSEQAAYNTGRQQAGRRIDRHLTDPQQQNIWLETGTQQTDYHSGTHRPYQQTTNYAHISIQTGITDRLSVGTILTDERTNNRFDEGVSARNRSNGAHLFVKGENGALFAAADLGYSNSRTRFTDYDGAAVRRHAWDAGINTGIKIDTGINLRPYAGIRINRSNGNRYVLDGAEINSPAQIQTTWHAGIRLDKTVELGQAKLTPAFSSDYYDTRQNSGSALSVNDRTLLQQAAHGTLHTLQIDAGYKGWNAKLHAAYGKDSNTARHKQAGIKIGYNW

SEQ ID NO: 19611 - protein, 69 aa, Neisseria meningitidis
MKSKFMYKLLVLAKYLYILICISIPIVFIYESYQGDDVDFMIYIHAFIIFSILGVLTQYSTSNFFGKEK

SEQ ID NO: 19612 - protein, 214 aa, Neisseria meningitidis
MKLKHLLPLLLSAVLSAQAYALTEGEDYLVLDKPIPQEQSGKIEVLEFFGYFCVHCHHFDPLLLKLGKALPSDAYLRTEHVVWQPEMLGLARMAAAVNLSGLKYQANPAVFKAVYEQKIRLENRAVAGKWALSQKGFDGKKLMRAYDSPEAAAAALKMQKLTEQYRIDSTPTVVVGGKYRVIFNNGFDGGVHTIKELVAKVRAERKLSNHPVQK

SEQ ID NO: 19613 - protein, 395 aa, Neisseria meningitidis; identical to SEQ ID NO: 1105

SEQ ID NO: 19614 - protein, 215 aa, Neisseria meningitidis
MKALFLGAPGAGKGTQAQFITAAFGIPQISTGDMLRAAIKAGTPLGLEAKKIIDEGGLVRDDIIIGMVKERIAQDDCKNGFLFDGFPRTLAQAEAMVEAGVDLDAVVEIDVPDSVIVDRMSGRRVHLASGRTYHVTYNPPKVEGKDDVTGEDLIQRDDDKEETVKKRLAVYHEQTEVLVDFYSKLEGEHAPKYIKVDGTQPVEAVKAEVLGALGK

SEQ ID NO: 19615 - protein, 77 aa, Neisseria meningitidis
MKLTLMFREYCSLCHKMRDELKPFQDEYGFGLEVVDVDENPVLEEKYNELVPVLLAGDEEICHWFLDEDRLKQFLER

SEQ ID NO: 19616 - protein, 245 aa, Neisseria meningitidis; identical to SEQ ID NO: 4045

SEQ ID NO: 19617 - protein, 291 aa, Neisseria meningitidis; identical to SEQ ID NO: 827

SEQ ID NO: 19618 - protein, 463 aa, Neisseria meningitidis; identical to SEQ ID NO: 2284

SEQ ID NO: 19619 - protein, 117 aa, Neisseria meningitidis; identical to SEQ ID NO: 5140

SEQ ID NO: 19620 - protein, 188 aa, Neisseria meningitidis
MLLQNILPFAHCLLRKALPEGGNALDGTAGNGHDTLFLAQTAGIRGKVWAFDIQPQALSRTRCRLKEARYENVQLILDGHENLKQYVSEPLNAAIFNFGWLPGGDKSLTTRTETSIAALSATLSLLKENGMLIAVLYPGHENGKQEAEAVGQWAKNLPQEQFAVLRYGFTNRKNSPPYLLAFEKLRQK

SEQ ID NO: 19621 - protein, 451 aa, Neisseria meningitidis
MSEYTPQTAKQGLPALAKSTIWMLSFGYLGVQTAFTLQSSQMSRIFQTLGADPHNLGWFFILPPLAGMLVQPIVGYYSDRTWMPRLGGRRLPYLFYGTLIAVIVMILMPNSGSFGFGYASLAALSFGALMIALLDVSSNMAMQPFKMMVGDMVNEEQKSYAYGIQSFLANTGAVVAAILPFVFAYIGLANTAEKGVVPQTVVVAFYVGAALLVITSAFTIFKVKEYDPETYARYHGIDVAANQEKANWFELLKTAPKAFWTVTLVQFFCWFAFQYMWTYSAGAIAENVWHTTDASSVGYQEAGNWYGVLAAVQSVAAVICSFVLAKVPNKYYKAGYFGCLALGALGFFSVFFIGNQYALVLSYTLIGIAWAGIITYPLTIVTNALSGKHMGTYLGLFNGSICMPQIVASLLSFVLFPMLGGLQATMFLVGGVVLLLGAFSVFLIKETHGGV

SEQ ID NO: 19622 - protein, 360 aa, Neisseria meningitidis
MPSEAASDGILPLYPTRTIFQKPIMLPFLPEPSLSYTQQNRTAVLLLNLGTPDAPTAQAVRPYLKSFLTDRRVVELPKWLWYPILHGLVLTLRPKKSAHAYEKIWFKEGSPLEVYTARQAAALAERMPDLIVRHAMTYGNPSVADVLSELKAQGAGRLLVIPMYPQYAASSSGAAVDKVCEQLLLQRNQMSVRTVSRFYDDTGYIDAMKNHILRYWAEHGRGKKLMLSFHGVPQKHYDLGDPYPDECRHTAKLLAEALELTEDQYVVSFQSQFGRAKWVTPSTQDLFGKLPKQGVTELDVFCPGFLADCLETMEEIALMGREQFYEAGGKSYRYIPCLNDNPDWIDALVALAEENLGGWR

SEQ ID NO: 19623 - protein, 219 aa, Neisseria meningitidis; identical to SEQ ID NO: 8069

SEQ ID NO: 19624 - protein, 259 aa, Neisseria meningitidis
MFFVLSPAKNLNEKDPAPVSEFTQPDLLAESDILMQQLRELAPQQIAELMHVSDKIALLNAQRNAEWHTPFTPENAKQAVFMFNGDVYEGMDANTLDIGQIRYLQNHVRLLSGLYGLLRPLDLIQPYRLEMGTAFANLRGKNLYEFWGDIITNLLNDTLAQAGSNTLVNLASQEYFKSVNTKKLRARLITPIFKDEKNGKYKIISFYAKRVRGLMVRYAVEHHITDPEMLKNFNYEGYAFNDAASNESEWVFMRSEQIK

SEQ ID NO: 19625 - protein, 425 aa, Neisseria meningitidis
MRSSDILIVDDEIGIRDLLSEILQDEGYSVALAENAEEARKLRHQARPAMVLLDIWMPDCDGITLLKEWAKNGQLNMPVVMMSGHASIDTAVEATKIGALDFLEKPISLQKLLSAVENALKYGAAQTETGPVFDKLGNSAAIQEMNREVEAAAKRTSPVFLTGEVGSPFETVARYFHKNGTPWVSPARVEYLIDMPTELLQKAEGGVLYVGDIAQYSRNIQTGIAFIIGKAERCRVRVVASGSRAAGSDGIACEEKLAELLSESVVRIPPLRMQHEDIPFLIQGIACNVAESQKIAPASFSEEALAALTRYDWPGNFDQLQSVVATLLLEADGQEIGAGAVSSLLGQNVPAEGAEDMVGGFNFNLPLRELREEVERRYFEYHIAQEGQNMSKVAQKVGLERTHLYRKLKQLGIGVSRRAGEKTEE

SEQ ID NO: 19626 - protein, 166 aa, Neisseria meningitidis; identical to SEQ ID NO: 1240

SEQ ID NO: 19627 - protein, 161 aa, Neisseria meningitidis; identical to SEQ ID NO: 7269

SEQ ID NO: 19628 - protein, 301 aa, Neisseria meningitidis; identical to SEQ ID NO: 5026

SEQ ID NO: 19629 - protein, 481 aa, Neisseria meningitidis
MNWSDLNLMPAMPEIVLLALLVLLLLADLWVSDDKRRWTHYGALATVAVTAVVQLAVWEQGSTSSFNGMYIADGMSRLAKMVLYALTFALFVYAKPYNQVRGIFKGEFYTLSLFALLGMGVMVSAGHFLTAYIGLELLSLALYALIALRRDSGFAAEAALKYFVLGALASGLLLYGISMVYGATGSLEFAGVLASSFNEEANEWLLKLGLVFIVVAVAFKLGAVPFHMWVPDVYHGAPTSVTALVGTAPKIAAVVFAFRILVTGLGTVHHDWSLMFALLAAASLLVGNLAAIMQTNIKRMLAYSTVSHMGFILLAFMAGAVGFAAGLYYAITYALMAAAGFGVLMVLSDGDNECENISDLAGLNQHRVWLAFLMLLVMFSMAGIPPLMGFYAKFGVIMALLKQGYVWLSVFAVVMSLIGAFYYLRVVKVMYFDESGRARPAAGGNNAAKFLLSINALLLVLWGIMPQTVIDWCAKALENTL

SEQ ID NO: 19630 - protein, 128 aa, Neisseria meningitidis
MSNNIPAELKYVASHEWLRLEEDGTITVGITHHAQELLGDIVFVELPEVGANLAAEEQAGVVESVKAASDVYAPIAGEVVAVNEDLPSAPETANSDSYGAGWFFKIKPVNPADYDGLLTAEQYAGEVD

SEQ ID NO: 19631 - protein, 103 aa, Neisseria meningitidis; identical to SEQ ID NO: 392

SEQ ID NO: 19632 - protein, 321 aa, Neisseria meningitidis; identical to SEQ ID NO: 7205

SEQ ID NO: 19633 - protein, 1391 aa, Neisseria meningitidis; identical to SEQ ID NO: 4736

SEQ ID NO: 19634 - protein, 604 aa, Neisseria meningitidis
MSEHDMQNTNPPLPPLPPEITQLLSGLDAAQWAWLSGYAWAKAGNGASAGLPALQTALPTAEPFSVTVLSASQTGNAKSVADKAADSLEAAGIQVSRAELKDYKAKNIAGERRLLLVTSTQGEGEPPEEAVVLHKLLNGKKAPKLDKLQFAVLGLGDSSYPNFCRAGKDFDKRFEELGAKRLLERVDADLDFTASANAWTDNIAALLKEEAAKNRATPAPQATPPADLQTASEGRYCKAAPFPAALLANQKITARQSDKDVRHIEIDLSGSDLHYLPGDALGVWFDNDPALVREILDLLGIDQATEIQAGGKTLPVASALLSHFELTQNTPAFVKGYAPFADDDELDRIAADNAVLQGFVQSTPIADVLHRFPAKLTAEQFAGLLRPLAPRLYSISSSQAEVGDEVHLTVGAVRFEHEGRARAGGASGFLADRLEEDGTVRVFVERNDGFRLPEDSRKPIVMIGSGTGVAPFRAFVQQRAAENAEGKNWLIFGNPHFAADFLYQTEWQQFAKDGFLHRYDFAWSRDQEEKIYVQDKIREQAEGLWQWLQEGAHIYVCGDAAKMAKDVEAALLDVIIGAGHLDEEGAEEYLDMLREEKRYQRDVY

SEQ ID NO: 19635 - protein, 915 aa, Neisseria meningitidis
MQQQHLFRLNILCLSLMTALPAYAENVQAGQAQEKQLDTIQVKAKKQKTRRDNEVTGLGKLVKTADTLSKEQVLDIRDLTRYDPGIAVVEQGRGASSGYSIRGMDKNRVSLTVDGLAQIQSYTAQAALGGTRTAGSSGAINEIEYENVKAVEISKGSNSVEQGSGALAGSVAFQTKTADDVIGEGRQWGIQSKTAYSGKNRGLTQSIALAGRIGGAEALLIHTGRRAGEIRAHEAAGRGVQSFNRLVPVEDTNQYANFIVEEECESKNYETCKANPKKDVVGKDERQTVSTRDYTGPNRFLADPLSYESRSWLFRPGFRFENKRHYIGGILERTQQTFDTRDMTVPAFLTKAVFDENKKQAGSLSGNGKYAGDHKYGGLFTNGENGALVGAEYGTGVFYDETHTKSRYGLEYVYTNADKDTWADYARLSYDRQGIGLDNHFQQTHCSADGSDKYCRPSADKPFSYYKSDRVIYGESHRLLQAAFKKSFDTAKIRHNLSVNLGFDRFGSNLRHQDYYYQNANRAYSSNTPPPNGDKKISPNGSTSTPYWVSIGGGNVVTGQICLFGNNTYTDCTPRSINGKSYYAAVRDNVRLGRWADVGAGLRYDYRSTHSDDGSVSTGTHRTLSWNAGIVLKPADWLDLTYRTSTGFRLPSFAEMYGWRAGVQSKAVKIDPEKSFNKEAGIVFKGDFGNLEASWFNNAYRDLIVRGYEAQIENGKETAKGDPAYLNAQSARITGINILGKIDWNGVWDKLPEGWYSTFAYNRVHVRDIKKRADRTDIQSHLFDAIQPSRYVVGLGYDQPEGKWGVNGMLTYSKAKEITELLGSRALLNGNSRNTKATARRTRPWYIVDVSGYYTIKKHFTLRAGVYNLLNYRYVTWENVRQTAGGAVNQHKNVGVYNRYAAPGRNYTFSLEMKF

SEQ ID NO: 19636 - protein, 261 aa, Neisseria meningitidis
MSRIRQAFAALDGGKALIPYITVGDPDIRTTLALMHGMVANGADILELGVPFSDPMADGPVIQRAAERALANGISLRDVLDVVRKFRETDTQTPVVLMGYLNPVHKMGYREFAQEAAMAGVDGVLTVDSPVETIDPLYRELKDNGVDCIFLIAPTTTEDRIKTIAELAGGFVYYVSLKGVTGAASLDTDEVSRKIEYLHQYIDIPIGVGFGISNAESARKIGRVADAVIVGSRIVKEIENNAGNEAAAVGALVKELKDAVR

SEQ ID NO: 19637 - protein, 642 aa, Neisseria meningitidis; identical to SEQ ID NO: 269

SEQ ID NO: 19638 - protein, 346 aa, Neisseria meningitidis
MNTPIPFSERLIRWQKQHGRHHLPWQVKNPYCVWLSEIMLQQTQVATVLDYYPRFLEKFPTVQTLAAAPQDEVLSLWAGLGYYSRARNLHKAAQQVVRQFGGTFPSERKDLETLCGVGRSTAAAICAFSFNRRETILDGNVKRVLCRVFARDGNPQDKKFENSLWTLAESLLPSENADMPAYTQGLMDLGATVCKRTKPLCHQCPMADICEAKKQNRTAELPRKKTAAEVPTLPLYWLIIRNRNGAILLEKRPAKGIWGGLYCVPCFESLNGLSDFAAKFSLTMADMDEQTALTHRLTHRLLMITPFEGQMPSESPSDGIWIKPAHLKDYGLPKPLEIYLNGNRLE

SEQ ID NO: 19639 - protein, 313 aa, Neisseria meningitidis
MKILFLLIPLILTACGTLTGIPAHGGGKRFAVEQELVAASSRAAVKEMDLSALKGRKAALYVSVMGDQGSGNISGGRYSIDALIRGGYQNNPDSATRYSYPTYDTTATTKADALSSVTTSTSLLNAPAAALTKNSGRKGERSAGLSVNGTGDYRNETLLANPRDVSFLTNLIQTVFYLRGIEVVPPEYADTDVFVTVDVFGTVRSRTELHLYNAETLKAQTKLEYFAVDRDSRKLLIAPETAAYESQYQEQYALWMGPYSVGKTVKASDRLMVDFSDITPYGDTTAQNRPDFKQNNGKKPDVGNEVIRRRKGG

SEQ ID NO: 19640 - protein, 415 aa, Neisseria meningitidis
MFSLEAWIGLRYLRAKKRNGFMSFITMVSIAGIALGVTALIVVLSVMNGFQKEIRGQLLNVAPHAEIGYIDNTDTDWRNLLRFTENRKGILAAAPYVSNQALLANAGEIRGVQMRGILPSEERKVVEYGDKMPAGKFEDLIPGEFDIILGVGLAEALGAEVGNKVTVITPEGNVTPAGVVPRLKQFTVVGLVKTGVYEVDNSLAMTHIQDARVLYRLDKEVAGLRLKLADPQNAPALTAKLIPEAQRDTVWVRDWTFSNRSYFEAVELEKRMMFIILTLIIAVAAFNLVSSLVMAVTEKQADIAILRTLGLSPAGVMKIFMVQGAFSGFFGTLAGVVCGVLLGWNVGRVVAFFENLLGVHLINSQVYFIDYLPSDVDMGDVALIACISLGLSFVATLYPSWRASKTQPAEALRYE

SEQ ID NO: 19641 - protein, 594 aa, Neisseria meningitidis
MELMTVLLPLAALVSGVLFTWLLMKGRFQGEFADLNAQLAEKAARCDFVEQAHAEIASELAVLDGKYRHLQDENYALGNRFSAAEKQIAHLQEKEAESVRLKQSYIELQEKAQGLAVENERLATQLGQEQKAFADQYALERQIRQRIETDLEESRQTVRDVQNDLSDVGNRFAAAEKQIAHLQEKEAEAERLRQSHIDLQEKAQGLAVENERLTTQIEQERLASEEKLSLLGEARKSLSDQFQNLANTILEEKSRRFTEQNREQLHQVLNPLNERIHGFGELVRQTYDKESRERLTLENELKRLQGLNAQLHSEAKALTNALTGTQNKVQGNWGEMILETVLENSGLQKGREYVVQAAAVRKEEDGGTRRLQPDVLVNLPDNKQIVIDSKVSLTAYVRYTQAADADTAARELAAHVASIRAHMKGLSLKDYTDLEGVNTLDFVFMFIPVEPAYLLALQNDAGLFQECFDKRIMLVGPSTLLATLRTVANIWRNEQQNQNALAIADEGGKLYDKFVGFVQTLESVGKGIDQAQNSFQTAFKQLAEGRGNLVGRAEKLRLLGVKANKQLARDLTERANETTALSESLEYAAEDEAV

SEQ ID NO: 19642 - protein, 604 aa, Neisseria meningitidis
MPAETTVSGAHPAAKLPIYILPCFLWIGIVPFTFALKLKPSPDFYHDAAAAAGLIVLLFLTAGKKLFDVKIPAISFLLFAMAAFWYLQARLMNLIYPGMNDIVSWIFILLAVSAWACKSLVAHFGQERIVTLFAWSLLIGSLLQSCIVVIQFAGWEDTPLLQNLIVYSGQGVIGHIGQRNNLGHYLMWGILAAAYLNGQRKIPPALGAICLIMQTAVLGLVNSRTILTYIAAIALILPFWYFRSDKSNRRTMLGIAAAVLLTALFQFSMNTILETFTGIRYETAVERVANGGFTDLPRQIEWNKALAAFQSAPIFGHGWNSFAQQTFLINAEQHNIHDNLLSNLFTHSHNIVLQLLAEMGISGTLLVAATLLTGIAGLLKRPLTPASLFLICTLAVSMCHSMLEYPLWYVYFLIPFGLMLFLSPAEASDGIAFKKAANLGILTASAAIFAGLLHLDWTYTRLVNAFSPATDDSAKTLNRKINELRYISANSPMLSFYADFSLVNFALPEYPKTQTWAEEATLKSLKYRPHSATYRIALYLMRQGKVAEAKQWMRATQSYYPYLMPRYADEIRKLPVWAPLLPELLKDCKAFAAAPGHPEAKPCK

SEQ ID NO: 19643 - protein, 159 aa, Neisseria meningitidis
MSTFFQQTAQAMIAKHIDRFPLLKLDQVIDWQPIEQYLNRQKTRYLRDHRGRPAYPLLSMFKAVLLGQWHSLSDPELEHSLITRIDFNLFCRFDELSIPDYSTLCRYRNWLAQDDTLSELLKLINRQLTEKNLKVEKASAAVVDATIIQTAGSKQRQAR

SEQ ID NO: 19644 - protein, 197 aa, Neisseria meningitidis; identical to SEQ ID NO: 2603

SEQ ID NO: 19645 - protein, 176 aa, Neisseria meningitidis; identical to SEQ ID NO: 1829

SEQ ID NO: 19646 - protein, 289 aa, Neisseria meningitidis; identical to SEQ ID NO: 2681

SEQ ID NO: 19647 - protein, 338 aa, Neisseria meningitidis
MNTRPFYFGLIFIAIIAILANYLGNTDFSHHYHISALIIAILLGMAIGNTIYPQFSTQVEKGVLFAKGALLRTGIVLYGFRLTFGDIADVGLNAVVTDAIMLISTFFFTALLGIRYLKMDKQLVYLTGAGCSICGAAAVMAAESVTKAESHKVSVAIAIVVIFGTLAIFTYPLFYTWSQDLINAHQFGIYVGSSVHEVAQVYAIGENINPIVANTAVISKMIRVMMLAPFLLMLSWLLTRSDGVSENTSHKITIPWFAVLFIGVAIFNSFDLLPKELVKLFVEIDSFLLISSMAALGLTTQASAIKKAGLKPFVLGILTYLWLVVGGFLVNYGISKLI

SEQ ID NO: 19648 - protein, 482 aa, Neisseria meningitidis
MKLPIQKFMMLFAAAISLLQIPISHANGLDARLRDDMQAKHYEPGGKYHLFGNARGSVKNRVYAVQTFDATAVGPILPITHERTGFEGIIGYETHFSGHGHEVHSPFDNHDSKSTSDFSGGVDGGFTVYQLHRTGSEIHPEDGYDGPQGSDYPPPGGARDIYSYYVKGTSTKTKTNIVPQAPFSDRWLKENAGAASGFFSRADEAGKLIWESDPNKNWWANRMDDIRGIVQGAVNPFLMGFQGLGVGAITDSAVNPVTYAAARKTLQGIHNLGNLSPEAQLAAATALQDSAFAVKDSINSARQWADAHPNITATAQTALSVAEAATTVWGGKKVELNPTKWDWVKNTGYKKPAARHMQTVDGEMAGGNRPPKSITSNSKADASTQPSLQAQLIGEQISSGHAYNKHVIRQQEFTDLNINSPADFARHIENIVSHPTNMKELPRGRTAYWDDKTGTIVIRDKNSDDGGTAFRPTSGKKYYDDL

SEQ ID NO: 19649 - protein, 575 aa, Neisseria meningitidis
MQLSGAQIIVQSLKAEGVEYVFGYPGGAVIEIYDALFQLNKFKHILTRHEQAAVHAADAYARVSGKVGVALVTSGPGVTNALTGIATAYTDSIPMVVISGQVGNSLIGTDAFQEVDTVGITRPCVKHNFLVTDINELAETIKKAFQIAASGRPGPVVVDVPKDVTQAMAKFSYPQEDIFIRSYQPVVQGHIGQIKKAVQMLASAKRPVVYFGGGVVLGNASEELTRFVRMTGAPCTGTLMGLGAYPSGDRQFLGMLGMHGTYEANLAMQNADVVLAVGARFDDRVVSVPSKFFEKAKKVIHIDVDPSSIAKRVKADIPIVGDVKNVLSEMVALWQKQESVPSEDALGKWWKTIEEWRSRDCLWFDNGSEIIKPQYVIQKLAEITGNSAIITSDVGQHQMFAAQYYPFERPRQWLNSGGLGTMGVGLPYAIGAKLAAPDQDVFCITGDGSIQMNIQELSTCFQYRIPVNVITLNNGYLGMVRQWQEIYYGGRESETYFDSLPDFVKLAEAYGHIGIRVDKKSDVEGALLEALNQKDRLVFIDFLTDQKQNVMPMVGNGKGLDEMVLPPHMRADEKA

SEQ ID NO: 19650 - protein, 265 aa, Neisseria meningitidis
MAAVFSVCACFMCSCLVVKNTVIGSGRTKIAVPLVARDAAVLSAVLDQIKNLPFDIVEFRADFLECAGSIGEVLRHTQTVRDALPDKPLLFTFRRHGEGGSFPCSDDYYFKLLDALIESRLPDIIDIELFSGETAVRCAVANAQKNGIAALLCNHEFHRTPPQEEIVCRLKQMEDCGADICKIAVMPQSAEDVLTLLSATLKAKQLVAKPIVTMSMGQKGAVSRLAGQTFGSSITFGSGTQNSAPGQIGVSALRAALDCLESGAD

SEQ ID NO: 19651 - protein, 99 aa, Neisseria meningitidis
MKKMFVLFCMLFSCAFSLAAVNINAASLQELEALPGIGPAKAKAIAEYRAQNGAFKSVDDLTKVKGIGPAVLAKLKDQASVGAPAPKGPAKPATTAVKK

SEQ ID NO: 19652 - protein, 306 aa, Neisseria meningitidis
LHQTFHSFRFSDGIVKVVLPFPYFQHCFMLPLKTPGVLPGFKLSLGLTVLCLSLLVVLPFAMMAAKAAEIGWGGFWNTIAEPNVLAAVWLSLRMSFYAMLTNVVFGTLVAWVLVRYEFPGKGLANALVDLPFALPTAVTGIALATLYAPNGWIGRFFEPLGIKIAFTPVGIWIALVVVSLPFIVRAVQPVLEELSGEYEEAAATLGASRWTTFRRVLLPEITPALLTGAGMMFARATGEYGSVIFIAGNIPMVSEILPLIITGKLEQFDVQGASAVALFMLLVSFVILFALNVMQWALGRRSGAKG

SEQ ID NO: 19653 - protein, 81 aa, Neisseria meningitidis; identical to SEQ ID NO: 6740

SEQ ID NO: 19654 - protein, 765 aa, Neisseria meningitidis
MQPHAPHTDSNTLMLGRYAERAYLEYAMSVVKGRALPEVSDGQKPVQRRILFAMRDMGLTAGAKPVKSARVVGEILGKYHPHGDSSAYEAMVRMAQDFTLRYPLIDGIGNFGSRDGDGAAAMRYTEARLTPIAELLLSEINQGTVDFVPNYDGAFDEPLHLPARLPMVLLNGASGIAVGMATEIPSHNLNEVTQAAIALLKKPTLETADLMQYIPAPDFAGGGQIITPADELRRIYETGKGSVRVRARYEIEKLARGQWRVIVTELPPNANSAKILAEIEEQTNPKPKAGKKQLNQDQLNTKKLMLDLIDRVRDESDGEHPVRLVFEPKSSRIDTDTFINTLMAQTSLEGNVSMNLVMMGLDNRPAQKNLKTILQEWLDFRTVTVTRRLKFRLNQVEKRLHILEGRLKVFLHIDEVIKVIRESDDPKADLMAAFGLTEIQAEDILEIRLRQLARLEGFKLEKELNELREEQGRLNILLGDENEKRKLIIKEMQADMKQYGDARRTLVEEAGRAVLTQTTADEPITLILSEKGWIRSRAGHNLDLSQTAFKEGDRLKQTLEGRTVLPVVILDSLGRTYTLDAAEIPGGRGDGVPVSSLIELQNGAKPVAMLTGLPEQHYLLSSSGGYGFIAKLADMVGRVKAGKVVMTTDSGETVLPPIAVYASSFINPDCKIIAATSQNRALAFPIGELKIMAKGKGLQIIGLNAGESLTHTAVSSEPEILIESEGRRGAAHKDRIPVSLLEAKRGKKGKLLPISGSLKQLSSPK

SEQ ID NO: 19655 - protein, 250 aa, Neisseria meningitidis; identical to SEQ ID NO: 2637

SEQ ID NO: 19656 - protein, 521 aa, Neisseria meningitidis
  misc_feature 2, 3, 4: 'Xaa' is any amino acid
VXXXDEIIKLIKESPNAAEAKDKLLARPWRSSLVEEMLTRSGLDLEMMRPEGLAANIGLKEQGYYLSEIQADAILRMSLRNLTGLDQEEIVESYKNLMGKIIDFVDILSKPERITQIIRDELEEIKTNYGDERRSEINPFGGDIADEDLIPQREMVVTLTHGGYIKTQPTTDYQAQRRGGRGKQAAATKDEDFIETLFVANTHDYLMCFTNLGKCHWIKVYKLPEGGRNSRGRPINNVIQLEEGEKVSAILAVREFPEDQYVFFATAQGLVKKVQLSAFKNVRAQGIKAIALKEGDYLVGAAQTGGADDIMLFSNLGKAIRFNEYWEKSGNDEAEDADIETEISDGIEDETADSENALPSGKHGVRPSGRGSGGLRGMRLPADGKIVSLITFAPETEESGLQVLTATANGYGKRTPIADYSRKNKGGQGNIAINTGERNGDLVAATLVGETDDLMLITSGGVLIRTKVEQIRETGRAAAGVKLINLDEGETLVSLERVAEDESELSDASVISNVTEPEVEN

SEQ ID NO: 19657 - protein, 444 aa, Neisseria meningitidis
MAKKYFGTDGVRGEVGQFPITPDFVLKLGYAAGQVLVQHDTDQKPTVLIGKDTRISGYMLEAALVAGFTAAGVNVVQTGPLPTPGVAYLTRALRLSAGVMISASHNAYSDNGIKFFAEGGVKLSDEVELEIEAKIDGEMKTQPSARLGRARRINGADDRYIEFCKSTFPTHSDLRGLKLVVDAANGAAYSVAPKVFHELGAQVVSIGDEPNGYNINEKCGATYTKTLQAAVLQHEADYGIALDGDGDRLMMVDKNGKVYDGDSLIYVIAKARAREGINIGGVVGTVMTNMAMEIALKEQGVDFCRAKVGDRYVLEQLNQRGWLIGGEASGHILCMDKHNTGDGIISALQVLAALQILNQDLATVCADWQPYPQTMINVRIGKGQNWQEASKDVLAEVEKELEGKGRVVLRASGTEPVVRVMVEARQADWAREGAERIAAAIGGI

SEQ ID NO: 19658 - protein, 340 aa, Neisseria meningitidis
MLTKKEFEKFLDEVCTVLRQEAKNAPFKSQDIFENRVRALCIAKIPAYADIVINPEPVPQIFPDVPIGEYGVEVKFTLKDTWRSVANSIQEKNKADGVQHIYVIFGKMGGIPDVKWQLYEDSVIHVRTSHVPRFEVEIESDRPSLFEGFGISYAEFADLDMHEKMEYIRKYARNRLKEGERLWWIEDIDAVDSHDLPLEVRLYTSLPQEEKIRLRAEAALVSPRIVCSGRAKHKYDNAVLYLITYRGVLCHQARDLFSAGSVANSAEDYRGGNYVEKSLKLIEHEIEKAALEMDDALIVEYWGESVPTEKRLEYWIKMLDDLADGWIPSESLFNGRYKAK

SEQ ID NO: 19659 - protein, 274 aa, Neisseria meningitidis; identical to SEQ ID NO: 14716

SEQ ID NO: 19660 - protein, 307 aa, Neisseria meningitidis
MTKTEPNNAQLDWLESESIHIIREVAAECENPALLFSGGKDSVVLLALACKAFRLGSRPVKLPFPLVHIDTGHNYPEVIAFRDAQAAKLNARLIVGRVEDSIAKGTVVLRKETDSRNAAQAVTLLETIEANGFDALMGGARRDEEKARAKERIFSFRDEFGQWNPKAQRPELWSLYNTRLHKGENMRVFPISNWTELDIWQYIARENLELPPIYYSHRREVVRRRGLLVPVTPLTPKMPSETSEILDVRFRTVGDISCTCPVESTASTPTEIIRETAVADISERSATRLDDQASEAAMEKRKKEGYF

SEQ ID NO: 19661 - protein, 168 aa, Neisseria meningitidis
MAHPQEIREKLRRLYVSGEQTLETAALMCEIPQTTARAWKRADKEKGDDWDKMRAAYTLAGGGIEDLSRAMLAGFMVQYNSTMTMLQDSSTEDLPPSDRAKLLASLADAFTKTVSANARVMPETSKLATALELIEFLMAFVQEKHPKHLPAFVEVLEPFGAEVEKKFG

SEQ ID NO: 19662 - protein, 462 aa, Neisseria meningitidis; identical to SEQ ID NO: 6381

SEQ ID NO: 19663 - protein, 396 aa, Neisseria meningitidis
LKHRLKPCADNPPAPNRLPPPDRDSMIYQRNLIKELSFTAVGIFVVLLAVLVSTQAINLLGRAADGRVAIDAVLALVGFWVIGMTPLLLVLTAFISTLTVLTRYWRDSEMSVWLSCGLALKQWIRPVMQFAVPFAVLVAVMQLWVIPWAELRSREYAEILKQKQELSLVEAGGFNSLGKRNGRVYFVETFDTESGIMKNLFLREQDKNGGDNIIFAKEGNFSLNDNKRTLELRHGYRYSGTPGRADYNQVSFQKLNLIISTTPKLIDPVSHRRTIPTAQLIGSSNPQHQAELMWRISLTVSVLLLCLLAVPLSYFNPRSGHTYNILIAIGLFLIYQNGLTLLFEAVEDGKIHFWLGLLPMHIIMFVIAIVLLRVRSMPSQPFWQAVGKSLTLKGGK

SEQ ID NO: 19664 - protein, 180 aa, Neisseria meningitidis; identical to SEQ ID NO: 5949

SEQ ID NO: 19665 - protein, 117 aa, Neisseria meningitidis; identical to SEQ ID NO: 3438

SEQ ID NO: 19666 - protein, 507 aa, Neisseria meningitidis; identical to SEQ ID NO: 2566

SEQ ID NO: 19667 - protein, 366 aa, Neisseria meningitidis
METQLYIGIMSGTSMDGADAVLVRMDGGKWLGAEGHAFTPYPDRLRRQLLDLQDTGTDELHRSRILSQELSRLYAQTAAELLCSQNLAPSDITALGCHGQTVRHAPEHGYSIQLADLPLLAERTRIFTVGDFRSRDLAAGGQGAPLVPAFHKALFRDDRETRAVLNIGGIANISVLPPDAPAFGFDTGPGNMLMDAWMQAHWQLPYDKNGAKAAQGNILPHLLDRLLAHPYFSQPHPKSTGRELFALNWLETYLDGGENRYDVLRTLSRFTAQTVCDAVSHAAADTHQMYICGGGIRNPVLTADLADCFGTRVSLRSTAELNLDPQWVEAAAFAWMAACWINRIPGSPHKATGASKPCILGAGYYY

SEQ ID NO: 19668 - protein, 265 aa, Neisseria meningitidis
MNRLYPHPIIAREGWPIIGGGLALSLLVSMCCGWWSLPFWVFTVFALQFFRDPAREIPQNPEAVLSPVDGRIVVVERARDPYRDVDALKISIFMNVFNVHSQKSPADCTVTKVVYNKGKFVNADLDKASTENERNAVLATTASGREITFVQVAGLVARRILCYTQAGAKLSRGERYGFIRFGSRVDMYLPVDAQAQVAIGDKVTGVSTVLARLPLTAPQIESEPESEPALQAAPVETAANPSAEQRQIEAAAAKIQAAVQDVLKD

SEQ ID NO: 19669 - protein, 659 aa, Neisseria meningitidis
MSQLANAIRFLSADAVQKANSGHPGAPMGMAEMAETLWTKFLNHNPANPKFYNRDRFVLSNGHASMLLYSLLHLTGYNLSIEDLKNFRQLHSKTPGHPEYGYTDGVETTTGPLGQGIANAVGMALAEKILAAEFNKDGLNIVDHYTYVFMGDGCLMEGVSHEACSLAGTLGLGKLIVLYDDNNISIDGKVDGWFTENIPQRFESYGWHVVPNVNGHDTAAIQAAIEAARAETGKPSIICCKTLIGKGSANKEGSHKTHGAPLGADEIEATRKHLGWTYPAFEIPQEIYDAWNAKEQGAKLEADWNELFAQYQAKYPAEAAEFVRRMDKKLPDNFDEYVQTALKEVCAKAETIATRKASQNSIEILAKELPELVGGSADLTPSNLTDWSNSVSVTRDKGGNYIHYGVREFGMGAIMNGLALHGGVKPFGATFLMFSEYERNALRMAALMKINPVFVFTHDSIGLGEDGPTHQPIEQTATLRLIPNMDVWRPCDTAESLVAWAEAVKAADHPSCLIFSRQNLKFQARSEQQLNDIKRGGYIISEAQGNAQAVIIATGSEVELALEAQKALAAQNIAVRVVSMPSTNVFDRQDAAYQATVLPEGLPRVAVEAGHADGWYKYVGLNGAVVGINRFGESAPADLLFKAFGFTVDNVVDTVKSVL

SEQ ID NO: 19670 - protein, 415 aa, Neisseria meningitidis; identical to SEQ ID NO: 8108

SEQ ID NO: 19671 - protein, 65 aa, Neisseria meningitidis; identical to SEQ ID NO: 127

SEQ ID NO: 19672 - protein, 455 aa, Neisseria meningitidis
MPDLHTEFSRLLPADEIAELSPTLLKDQRNRFTSAPDIILQPRSVESVQTIMRFCYEHRIPVTPQGGNTGLCGAAVSENGVLLNLSKLNRIRSINLSDNCITVEAGSVLQTVQQAAEASNRLFPLSLASEGSCQIGGNIACNAGGLNVLRYGTMRDLVIGLEVVLPNGELVSHLHPLHKNTTGYDLRHLFIGSEGTLGIITAATLKLFARPSDKATAWVGIPDIESAVRLLTETQAHFAERLCSFELIGRFAAELSSEFSKFPLPTHSEWHILLELTDSLPDSNLDDRLVEFLYKKGFTDSVLAQSEQERIHMWALRENISASQRKLGTSIKHDIAIPIGRVADFVRRCAKDLEQNFKGIQIVCFGHLGDGSLHYNTFLPEILSNEVYRYENDINDAVYRNVLACNGTIAAEHGIGIIKKQWLDKVRTPAEIALMKSIKQHLDPYNIMNPGKLLP

SEQ ID NO: 19673 - protein, 90 aa, Neisseria meningitidis; identical to SEQ ID NO: 1142

SEQ ID NO: 19674 - protein, 470 aa, Neisseria meningitidis; identical to SEQ ID NO: 14842

SEQ ID NO: 19675 - protein, 39 aa, Neisseria meningitidis; identical to SEQ ID NO: 7406

SEQ ID NO: 19676 - protein, 536 aa, Neisseria meningitidis
MPSEMLSIIYQTAFYPPSLWPLAVKNLFTVSNGHLLVFSSPERHLTQKDPIMKPTIALVGRPNVGKSTLFNRLTRTKDALVHDLPGLTRDRHYGHGKVGSKPYLVIDTGGFEPVVDSGILHEMAKQTLQAVDEADAVVFLVDGRTGLTPQDKIIADRLRQSPRPVYLAVNKGEGGNRAVLAAEFYELALGDPYVISGAHGDGVYYLIEDILETFPEPEAEEADAKHPVFAVIGRPNVGKSTLVNAILGEERVIAFDMAGTTRDSIHIDFEREGKPFTIIDTAGVRRRGKVDEAVEKFSVIKAMQAVEAANVAVLVLDAQQDIADQDATIAGFALEAGRALVVAVNKWDGISEERREQVKRDINRKLYFLDFAKFHFISALKERGIDGLFDSIQAAYNAAMIKMPTPKITRVLQSAIERQQPPRAGLVRPKMRYAHQGGMNPPVIVVHGNSLHAISDSYTRYLTQTFRKAFNLQGTPLRIQYNVSENPYENAEDKPKKKPLRRVSLSNRIEKREGRKEEKNRFKKKTKVSVKKQFSK

SEQ ID NO: 19677 - protein, 91 aa, Neisseria meningitidis; identical to SEQ ID NO: 9295

SEQ ID NO: 19678 - protein, 534 aa, Neisseria meningitidis
VPSDKQNMPNKKKKAAFARAATENGVPDVSNIKNSYDDLMYESKAFSQTAINALEARARMMGLQPAPAANAKVLELGCSMGGNIITQALYYPDAEFVGIDLSGRQVAQGNAIIEKMGLKNVRLEEKDILTVDESFGKFDYIIVHGIWSWVPDAVKDKIFSICRNNLTEQGIAYISYNVYPGWKRQEQLREIMYFAGRDVLEEPLEARTRKGLDALKALAEILENDKGLDGGGKLPAIQKILNHNFYYIAHEYMEAFNDPIYVNGFIEWANRHRLAYIGDTDLHASFVSWMAEHTRERILALAGGDYIAKEFYSDILSDRQFRRSLLCREEVGDTVRRDESVAVEVIESLNFRPARGETIDFDENDTLLSGIRDVMKTGEPFKTEDVAENLARRFPGLEFDRMKINSQLLLQTILGRFSVSSDNAGKQFFEDHKTYVPARFTDYAAAFVEHGAEAFVRPASRYNESTPSFGYGHLYIMRQLSRPTSKQALIETVAENLNIVSTTPDGLTFHPPAEVYVEEILADLADRHFLVSAD

SEQ ID NO: 19679 - protein, 83 aa, Neisseria meningitidis; identical to SEQ ID NO: 15092

SEQ ID NO: 19680 - protein, 553 aa, Neisseria meningitidis
MLTYTPPDARPPAKTHEKPWLLLLMAFAWLWPGVFSHDLWNPAEPAVYTAVEALAGSPTPLVAHLFGQTDFGIPPVYLWVAAAFKHLLSPWAADPYDAARFAGVFFAVVGLTSCGFAGFNFLGRHHGRSVVLILIGCIGLIPTVHFLNPAAAAFAAAGLVLHGYSLARRRVIAASFLLGTGWTLMSLAAAYPAAFALMLPLPVLMFFRPWQSRRLMLTAVASLAFALPLMTVYPLLLAKTQPALFAQWLDDHVFGTFGGVRHVQTAFSLFYYLKNLLWFALPALPLAVWTVCRTRLFSTDWGILGIVWMLAVLVLLAVNPQRFQDNLVWLLPPLALFGAAQLDSLRRGAAAFVNWFGIMAFGLFAVFLWTGFFAMNYGWPAKLAERAAYFSPYYVPDIDPIPMAVAVLFTPLWLWAITRKNIRGRQAVTNWAAGVTLTWALLMTLFLPWLDAAKSHAPVVRSMEASLSPELKRELSDGIECIDIGGGDLHTRIVWTQYGTLPHRVGDVQCRYRIVRLPQNADAPQGWQTVWQGARPRNKDSKFALIRKIGENI

SEQ ID NO: 19681 - protein, 404 aa, Neisseria meningitidis; identical to SEQ ID NO: 756

SEQ ID NO: 19682 - protein, 156 aa, Neisseria meningitidis
MTDTDTQADRFEQMMWQAVDKLFEQHDGKLESMDGREQELVLIWRTEADIGNGGILQFVCNWGFPAAEKTCSVLKKIGAIHSAMLIHRAADALRKEIRHLQSEGKNLKEMWDITKHLDNKTASLPNSLDEQYWQDPDKLYLPGWQYYSGNPVQTLF

SEQ ID NO: 19683 - protein, 188 aa, Neisseria meningitidis
MPSEACWRFRRHIPIEKMMILKTAPLKRRFAAMLYEMLLVGAATCLAALFAGIAAIFLNPVSIAVSALVTSILIMGSWWLYFRANWHGQGQTLAMRTWKIGLCDLNGIQPSLHLLRLRFIWACIFIVFIPMLAYAGLRHFLGIPPKGAAGAALIWLILPWGFALLNPDRQFLYDFLAGTRLVAVKGKP

SEQ ID NO: 19684 - protein, 471 aa, Neisseria meningitidis; identical to SEQ ID NO: 7428

SEQ ID NO: 19685 - protein, 336 aa, Neisseria meningitidis
MPIFKGLDMKNFLSLFASILMSALIAVWFSQNPINAYWQQTYHRNSPLEPLAAYGWWRSGAALQENAYTLSDGIKAFLSGETPPTAQDGGSADMPPEAAASEAVPQTGEIQEWKQNTDTAAVRSGDKVFFAGDSLMQGVAPFVQKSLKQQYGIESVNLSKQSTGLSYPSFFDWPKTIEETLQKHPEISVLAVFLGPNDPWDFPVGKHYLKFAADEWAQEYLKRTDRILEAARAHHVQVVWLGIPYMKKAKLDGQMRYLDKLLSEHLEGKIILIPTAHTLSGGEDRYTDSVNVNGKPVRYRSKDGIHFTAEGQKLLAAKIMEKIVFEPSTQPSSTQP

SEQ ID NO: 19686 - protein, 201 aa, Neisseria meningitidis
LNTLYLGSNSPRRMEILTQLGYRVIQLPAGIDESVKAGETPFAYVQRMAEEKNRTALTLFCETNGTMPDFPLITADTCVVSDGIILGKPRSQAEAATFLNLLSGTGHTVLTAVCIHYRGKTSSRVQTNRVVFKPLSSEEISAYVQSGEPMDKAGAYAVQGIGGIFIQSIEGSFSGIMGLPVYETVSMLQDLGYRTPPFIRA

SEQ ID NO: 19687 - protein, 143 aa, Neisseria meningitidis; identical to SEQ ID NO: 9142

SEQ ID NO: 19688 - protein, 1080 aa, Neisseria meningitidis
MQNMKNQVRGSGMDARSNPANVSDGLQNSSSHIGTNTRYRLTKLGEQMARLPIDPKIARILLAAKKHDCMAEILVIASALSIQDPRERPLEARDAASKAHERFTDKQSDFLAYLNIWDSFQRERDKGLSNKQLVQWCRQYFLSHLRMREWRELHHQLAQTAIEMGLTTKEAAFRRSPEVRQLTSSENAGDQDLSAKLKQKQLDKKQHRAQIRAAKEAGYEQIHRALLTGLIANVGMKSPDGNDYTSTRGSRFHLFPASALFKAKPKWVMAAELVETTKLYARDVAAIQPEWIEQEAPHLVRYHYFEPHWEQKRGEVIASERVTLYGLTVLPRRPVSYGRIAPEEAREIFIRGALVAQECDLKADFFVHNKKLIKEITELEHKSRKQDVLVDDEALFAFYNERLPEMAWKDAQGSVWGSEDSVRIIESDKAERSSENERNEFRKNKRNGSRQNENHGNTVGWVENPTSAATAKTVGFDNPTYATQQPTPSPEREGRGEGKTVAAQTNFSATAANPLPQEREQSASASTFSDDLRPANLQQTAPSPVGEGWGESKTVATQTNFSATSTLSDDPKPKKQPAPQKGRLKPLPLADIRTFQAWLKTAECDNPRLLFLSRDDLMQHAAAHITEEQFPKFWQTADGKFKLSYRFEPHHPLDGVTMTVPLTVLNRLHAPSLEWLVPGMLREKIQLLIKALPKQIRRICVPVPDFITKFLESNPDRQATIIPQLAHFIAKSASDMRILEQIDQDAWAAQELPEHCYLNLRIIDDGGQELAGGRKLHELQQQLGQAAAVTFRDNTQEFERDNVTTWDIGTLPESIKFARGKQQLTGYLGLQKEKDGRIALRLFDTTEAAEQAHRQGVIELMKLQLKEQVKDLNKGIQGFTQAAMLLKHINADTLRDDLTQAVCDRAFIGEDELPRNEKAFKEQIKRARSRLPAVKEALSRYLQETAAAYAELNGKLGKHPLTHLLRLRLQTLLAPGFATRTPWAQWPRLPIYLKAMTLRLEKYSSNPARDAAREADIQELEQMWQEKNDGLVKQGQPISDNLAAFKWMIEELRVSLFAQELKTPYPVSVKRLLKEWEKIF

SEQ ID NO: 19689 - protein, 223 aa, Neisseria meningitidis
MTFSAILFYILAAIVLYGAVRTVTAKNPVHAALHLVLTFCVSAMLWMLMQAEFLGVTLVVVYVGAVMVLFLFVVMMLNIDIEEMRAGFWRHAPVAGVVGTLLAVALILILVNPKTDLAAFGLMKDIPADYNNIRDLGSRIYTDYLLPFELAAVLLLLGMVAAIALVYRKTTNPKRMDPADQVKVRADQGRMRLVKMEAVKPQVESAEESEVSDGLKPEGEGKA

SEQ ID NO: 19690 - protein, 198 aa, Neisseria meningitidis; identical to SEQ ID NO: 12496

SEQ ID NO: 19691 - protein, 590 aa, Neisseria meningitidis
MIPSDFIDELLAKTDIVDIIDEQVPLKKGGANYMACCPFHKEKTPSFSVSPTKQFYHCFSCGAHGSAIGFVMEHQGLSFPEAVQFLADRVGMVVPKVRGQNDNPEVRAERKKKQQTLEETTAAAADFYAQQLKFNPAAKAYLDKRGLSAEVIAHYGLGYAPDGWQPLAQVFQPYPNTALVDTGMVIDNEGRYYDRFRHRIMFPIRNPRGQVIGFGGRVLDDSKPKYLNSPDTPLFDKGKNLYGLYEGRAAVKEAERILVVEGYMDVVALAQFGVGYGVAALGTATTAEHVKILMRQADSIYFCFDGDSAGRKAAWRALENALPQLKDDKSLHFLFLPEEHDPDSYIRAYGKAQFEDALLNQSKPLSEYFWEHLSDGIHLNTQEGKAELVKTSSPLLAQITAPALAYLLKQRLSELVGIDPDNLAQLLGQEAPKRHVKQKNYKLPPISVKQPVMPTLVQRQIRSLLINPDWAAYIDLPDYLALDGDFACLANLAETIKNHPSVPATAQVLEHMRGSPYEETITRIFHSTHQSEEMNSSSEEDCENFQIGMKKLLNELKYSQIEALKQKSLQSGLNESEKKLLLSLLTAKQN

SEQ ID NO: 19692 - protein, 78 aa, Neisseria meningitidis; identical to SEQ ID NO: 1622

SEQ ID NO: 19693 - protein, 436 aa, Neisseria meningitidis
VLTLDAFEQCLKDCFPQGLNGKKTAVALSGGLDSVVLLHLLVRAGKKGGFIPDALHIHHGLSPRADDWADFCQNYCDMLGVGLETVKVCVEKNGLGIEAAARQKRYAAFAEKGFDVLALAHHRDDQIETFMLAVARGGGLRALAAMPTVRPFGEKGIIWRPLLPFSRQDIWDYAQKHGLPNIEDESNSDTAYLRNRFRHRILPELSAQIPHFGRHVLNNVRALQEDLALLDEIIGQDCRWVCEEGSFDTVRWQAFSPRRKTHILRYFLKENGIPMPNQNALADIARVLTEAKTGRWNLQGFELHHYAGRLFVFRLEKTDKLRFLKDRQISGNLREILTGQGFVLKRHPFGLPEHLLEQDGILRTVAVSDTLAVGGIHKDVKKILQGKRVLPVLRPIWPLVADSGNRPLALANCCADFQISVSDGILPVHPDFPILF

SEQ ID NO: 19694 - protein, 201 aa, Neisseria meningitidis; identical to SEQ ID NO: 14993

SEQ ID NO: 19695 - protein, 280 aa, Neisseria meningitidis; identical to SEQ ID NO: 4431

SEQ ID NO: 19696 - protein, 728 aa, Neisseria meningitidis
LPRCLKQAVRHVMPSETGADAAKPSDGIACPLRPNNNHLWENLMPEQNRILCRELSLLAFNRRVLAQAEDKNVPLLERLRFLCIVSSNLDEFFEVRMAWLKRENKLHPRRRLDNGKMPSETIADVTEAARSLIRHQYDLFNNVLQPELARESIHFYRRRNWTGAQKKWIEDYFDRELLPILTPIGLDPSHPFPRPLNKSLNFAVELDGTDAFGRPSGMAIVQAPRILPRVVPLPSELCGGGHGFVFLSSILHAHVGKLFPGMNVKGCHQFRLTRDSDLTVDEEDLQNLRAAIQNELHDREYGDGVRLEVADTCPAYIRDFLLAQFKLTAAELYQVKGPVNLVRLNAVPDLVNRPDLKFPTHTPGRLKALGKTASIFDLVRQSPILLHHPYQSFDPVVEMMREAAADPDVLAVKMTIYRTGTRSELVRALMKAALAGKQVTVVVELMARFDEANNVNWAKQLEEAGAHVVYGVFGYKVHAKMALIIRREDGVLKRYAHLGTGNYHQGTSRIYTDFGIITADEQITADVNTLFMEITGLGKPGRLNKLYQSPFTLHKMVIDRIARETEHAKAGKPARITAKMNSLIEPTVIEALYRASAAGVQIDLIVRGMCTLRPGVKGLSENIRVRSIIGRQLEHARVYCFHNNGADDTFISSADWMGRNFFRRIETAAPIAAPELKKRVIREGLEMALADNTHAWLMQPDGGYIRAAPAEGESEADLQNDLWTLLGG

SEQ ID NO: 19697 - protein, 391 aa, Neisseria meningitidis; identical to SEQ ID NO: 2334

SEQ ID NO: 19698 - protein, 675 aa, Neisseria meningitidis
LSLSEFIERRTSFNPMVILTTLFFVCVLAVLVLTVPDQVQMWLDRAKEVIFTEFGWFYVLTFSIFLGFLLILSVSSLGNIRLGRDEDVPEFGFLSWLAMLFAAGMGVGLMFFGVAEPLMHYFSDITAGTPEHRQQQALLHTVFHWGVHAWSVYGTIALALAYFGFRYKLPLALRSCFYPLLKEKISGRFGDAIDIMALLATFFGIITTLGFGASQLGAGLQEMGWIAENSFSVQVLIIAAVMSLAVVSAISGVGKGVKVLSELNLSLAFLLLFFVLAAGPTVYLLSAFGDNIGNYLENLVRLSFKTYAYEREHKPWFESWTVLYWAWWCSWAPFVGLFIARISKGRTIREFVFGVLLIPGLFGVLWFTVFGNTAIWLNDGVAGGMLEKMTSSPETLLFKFFNYLPLPELTSIVSLLVISLFFVTSADSGIYVLNNITSRDKGLSAPRWQAVMWGVLMSAVAVLLMRSGGLGNLQSMTLIVSLPFALLMLIMCFSLWKGLSADKKYFETRVNPTSVFWTGGKWKERLVQIMSQTQEQDILKFLKHTASPAMHELQRELSEEYGLSVRVDKMFHQDEPAIEFVIRKETMRDFMYGIKSVGQDVSDQLINDGKLPHIRHQTTYKPYAYFFDGRVGYDVQYMNKDELIADILKNYERYLMLLDDVGQELMAHEQVELAE

SEQ ID NO: 19699 - protein, 166 aa, Neisseria meningitidis
LPQCRLKPFRRHRPAKCSNNMPKATFYTHVAQVPIFTCRLIARAIRDGGRILVWSDSFGQLQELDKMLWQYEAESFIPHEIWEMEEAMPSETSVLLACGGNPPRIPEGMTVLNLSDGFWNTAPVLPARVLEIVGNSLEDLADARERFTAYRRSGFAIEHHGMEGKA

SEQ ID NO: 19700 - protein, 124 aa, Neisseria meningitidis
MIVLHGIPNCDTVKKAKNRLAGYGLEFEFRDFKKQMPSEAEICSWLEQVPLETLLNKRGTSWRKLDAETQQKALSSTAEAVKLMSEMPSLIKRPVLECGGKVYAGFSEETYDGIFNRQAPCRQG

SEQ ID NO: 19701 - protein, 1161 aa, Neisseria meningitidis
MRLTHIKLSGFKSFTDPTTIHVPGQLVAVIGPNGCGKSNVIDAVRWVLGEASAKQLRGESMQDVIFNGAATRRPAPRASVELVFDNSDHSLQGAWGQYAEVSIKRQLTRQGESTYFINNQTVRRRDITDLFLGTGVGARGYAVIEQGMISRIIEARPEELRAYIEEAAGVSKYKERRKETEGRLKDTREHLQRLGDLQNELARQVEKLEKQAETAERYKSLTAQLNRQQDLLDYAQWQQSLAAADKATEQHQSLQAQQDETAAQVQALNDEVHALQTAEQSQQQAVHELSNKRGVLREQIARLEEQIRHQQNLHQRIERDKQAAQAQMQRIHQEQQQIRVQLEENELYVEEKQTELAEWAMQVAEHEERLPELEETQTALNAAFQTQQDEANRIRRELALKQQQLAHAEQTVAKHEERKGRLKQENQALNLPDEAETAAAQEAAALLQSRQEHYEEQIIAAEEALHAAREAFQTASNRFQSLKQQHITLQAQQQALSQILSQQQEAADFWQATGHAAAPQLWQHITAPAEWQHALSVILAERLHARDVPQGFVPPEPLPQGQAAWLSDGLSGGIKKSLPVQALLNQIQAQPPFQTALHHWLDGVLCAPDLSYALAHQSDLGAHQIWLTPEGHQVDKVSVLLYAKPAQESLITQKAHLDGIASELENLAPELSAAEAAFKQAEAAVRSSEVQHKNLMQQQQQHTRQYSQAQQRAAELLARTNQGQIRREHIERELAQLAEEQTVLQHTSDGLSDDIVTLQEAAAELEHQQQTTAHSRQEQQGRLKQAQLALLEANRQYGLAEVAVHKLNQQKQNYRQQIAQLEQQTFDWQERQQELALAYETEFQNDEQHIKLEELSEAVQTLDEEYIVVQEKLAQIQEQGREQYAKVQTLQTQLPQLQAATQTALLQQQEALINAKRYHQNLTERAADLDALEALAKESPKVLNSSIGSLSQQIEALGAVNLAALQELEEARERDGYYRSQSEDVQAAITLLEEAIAQIDDKTKARFKETFDAVNSKVQTFFPTLFGGGEATLKMIGDDLLTAGVSIMARPPGKKNSTIHLLSGGEKALTAMSLVFALFSLNPAPFCLLDEVDAPLDDANTSRFCNLVKEMSAQTQFLYISHNRLTMEMAEQLVGVTMQEKGVSRVVAVDIKQALEMAEAV

SEQ ID NO: 19702 - protein, 123 aa, Neisseria meningitidis; identical to SEQ ID NO: 4020

SEQ ID NO: 19703 - protein, 431 aa, Neisseria meningitidis
MSVIQDLQSRDLIAQTTDIEALDALLNEQKIALYCGFDPTADSLHIGHLLPVLALRRFQQAGHTPIALVGGATGMIGDPSFKAAERSLNSAETVAGWVESIRSQLTPFLSFEGGNAAIMANNADWFGKMNCLDFLRDIGKHFSVNAMLNKESVKQRIDRDGAGISFTEFAYSLLQGYDFAELNKRHGAVLEIGGSDQWGNITAGIDLTRRLYQKQVFGLTLPLVTKSDGTKFGKTEGGAVWLNAKKTSPYQFYQFWLKVADADVYKFLKYFTFLSIEEIDAIEAKDKASGSKPEAQRILAEEMTRLIHGEEALAAAQRISESLFAEDQSSLTESDFEQLALDGLPAFEVSDGINVVEALVKTGLASSNKEARGFVNSKAVLLNGKPAEANNPNHAAERPDDACLLNGEHKRFGKYTILRRGKRNHALLVWK

SEQ ID NO: 19704 - protein, 121 aa, Neisseria meningitidis; identical to SEQ ID NO: 1865

SEQ ID NO: 19705 - protein, 273 aa, Neisseria meningitidis
MTFDEWLGLSKLPKIEARMLLQYVSEYTRVQLLTRGGEEMPDEVRQRADRLAQRRLNGEPVAYILGVREFYGRRFTVNPSVLIPRPETEHLVEAVLARLPENGRVWDLGTGSGAVAVTVALERPDAFVRASDISTPALETARKNAADLGARVEFAHGSWFDTDMPSEGKWDIIVSNPPYIENGDKHLLQGDLRFEPQIALTDFSDGLSCIRTLAQGAPDRLAEGGFLLLEHGFDQGAAVRGVLAENGFSGVETLPDLAGLDRVTLGKYMKHLK

SEQ ID NO: 19706 - protein, 288 aa, Neisseria meningitidis
VKIFLFYEYGVENESSPKKPSLLFSSLLFSSLLLSSLLFSSLLFSSAAQAASEDGSRSPYYVQADLAYAAERITHDYPQATGANNTSTVSDYFRNIRAHSIHPRVSVGYDFGGWRIAADYARYRKWNNNKYSVNTKNVQKNDNGNRQDLKTENQENGTFHAVSSLGLSAIYDFKLNDKFDKFKPYIGVRVAYGHVRHSIDSTKKTTNVVTVAGAANTAPTIYYAPETQNAYHESHSIRRLGLGVIAGVGFDITPKLTLDTGYRYHNWGRLENTRFKTHEVSLGMRYRF

SEQ ID NO: 19707 - protein, 136 aa, Neisseria meningitidis; identical to SEQ ID NO: 1274

SEQ ID NO: 19708 - protein, 85 aa, Neisseria meningitidis
MKPRNLFFAGCLLTSATFAEDIGVPVELINVGNRIAMPSEGESLALLPFAEDVPPVRDAMPSEVPKSAAGGDVRGDRIGMPINIG

SEQ ID NO: 19709 - protein, 841 aa, Neisseria meningitidis
LKNNRQIKLIAASVAVAASFQAHAGLGGLNIQSNLDEPFSGSITVTGEEAKALLGGGSVTVSEKGLTAKVHKLGDKAVIAVSSEQAVRDPVLVFRIGAGAQVREYTAILDPVGYSPKTKSALSDGKTHRKTAPTAESQENQNAKALRKTDKKDSANAAVKPAYNGKTHTVRKGETVKQIAAAIRPKHLTLEQVADALLKANPNVSAHGRLRAGSVLHIPNLNRIKAEQPKPQTAKPKAETASMPSEPSKQATVEKPVEKPEAKVAAPEAKAEKPAVRPEPVPAANTAASETAAESAPQEAAASAIDTPTDETGNAVSEPVEQVSAEEETESGLFDGLFGGSYTLLLAGGGAALIALLLLLRLAQSKRARRTEESVPEEEPDLDDAADDGIEITFAEVETPATPEPAPKNDVNDTLALDGESEEELSAKQTFDVETDTPSNRIDLDFDSLAAAQNGILSGALTQDEETQKRADADWNAIESTDSVYEPETFNPYNPVEIVIDTPEPESVAQTAENKPETVDTDFSDNLPSNNHIGTEETASAKPASPSGLAGFLKASSPETILEKTVAEVQTPEELHDFLKVYETDAVAETAPETPDFNAAADDLSALLQPAEAPSVEENITETVAETPDFNATADDLSALLQPSKVPAVEENAAETVADDLSALLQPAEAPAVEENVTETVAETPDFNATADDLSALLQPSEVPAVEENAAETVADDLSALLQPAEAPAVEENAAEITLETPDSNTSEADALPDFLKDGEEETVDWSIYLSEENIPNNADTSFPSESVGSDAPSEAKYDLAEMYLEIGDRDAAAETVQKLLEEAEGDVLKRAQALAQELGI

SEQ ID NO: 19710 - protein, 101 aa, Neisseria meningitidis; identical to SEQ ID NO: 705

SEQ ID NO: 19711 - protein, 434 aa, Neisseria meningitidis
MKKHIWAASLLPASLSAEPLNWWKPYSAVNSGDTAWVMTAAALVLLMTLPGLALFYGGMVRKKNLLSTMMHSFSIATLVGILWVAVGYSLAFTPGNAFIGGLGRVFLSGMQIDAAAQMLTVSPNAPTVPEPVFMFFQMTFAIISTAIITGAFAERMKYSAMMLFSGIWFLLVYVPGAHWVWGGGFMSKGGVLDYAGGTVVHINAGIAGLVAALVLGRRIGYGREAMPPHNMAMTLIGAAMLWFGWFGFNAGSALAADAAAGMAMAVTQVSAVFGAAGWLACEKIAGHKPSALGLASGAVSGLVGITPAAGFTGPSGAAAIGILTAAACFVSVTVVKHKLRYDDSLDAFGIHGFGGLVGGILTGIFFDNRIFGGDAAVWQQLWIQVKDGVVMAAYSGLMSWAILKVVGKICGGLRVGKDVEREGLDLNIHGERVE

SEQ ID NO: 19712 - protein, 416 aa, Neisseria meningitidis
  misc_feature 2, 3: 'Xaa' is any amino acid
VXXGGYIVDIPKGNLKTEIEKLAKQPEYAYLKQLQTAKNVDWKQVQLAYDKWDYKQEGLTGAGAAIVVIIVTALTYGYGAAAAGSVTAAGSSTAAAATTTAAATTTVSTAAAMQTAALASLYSQAAVAIINNKGDVGKALKDLGTSDTVKQIVTSALTAGALNQMGADIAQLNSKVRTELFSSTGNQTIANLGGRLATNLSNAGISAGINTAVNGGSLKDNLGNAALGALVNSFQGEAASKIKTTFSDDYVAKQFAHALAGCVSGLVQGKCKDGAIGAAVGEIVAESILGGRNPATLSDAEKHKVISYSKIIAGSVAALNGGDVNTAANAAEVAVVNNALNFDSTPTNAKKHQPQKPDKTALEKIIQSIMPAHAAGAMTNPQDKDAAIWISNIRNGITGPIVITSYGVYAAVGQLR

SEQ ID NO: 19713 - protein, 319 aa, Neisseria meningitidis
MKPVFLDFEQPIAELTNKIDELRFVQDESAVDISDEIHRLQKKSNDLTKSIFSKLTPAQVSQVSRHPQRPYTLDYIDALFTDFEELHGDRHFADDHAIVGGLARFNGQSVMVVGHQKGRDTKEKIRRNFGMPRPEGYRKALRLMKTAEKFGLPVMTFIDTPGAYPGIGAEERGQSEAIGKNLYELTRLHVPVLCTVIGEGGSGGALAVAVGDYVNMLQYSTYSVISPEGCASILWKTAEKAADAAQALGITADRLQKLDLVDTVIKEPLGGAHRDFGQTMKNVKAVLEKQLHEAQSIPLADLLSRRFDRIMAYGKFSEQ

SEQ ID NO: 19714 - protein, 588 aa, Neisseria meningitidis
LSEIIKRIFYYKCLKICPSVSDGGAVMLQSENSKNLISCSIKALPIMISTNGITMQFGAKPLFENVSVKFGEGSRYGLIGANGSGKSTFMKILGGDLEQTAGEVAIENGVRLGKLRQDQFAYEDMRVLDVVMMGHTEMWAAMTERDAIYANPEATEDDYMKAAELEAKFAEYDGYTAEARAAELLSGVGISEDLHNAKMAEVAPGFKLRVLLAQALFSKPDVLLLDEPTNNLDINTIRWLEGVLNQYDSTMIIISHDRHFLNEVCTHMADLDYNTITIYPGNYDDYMLASAQSRERALKDNAKAKEKLQELQEFVARFSANKSKARQATSRLKQADKIKSEMVEVKPSTRQNPYIRFEADEKAKLHRQAVEVEKLAKRFETQLFKNLNFILEAGQRLAIIGPNGAGKSTLLKLLAGAYNPEYSDGLLPDEGSIKWAEKASVGYYPQDHENDFDVDMDLSEWMRQWGQEGDDEQVIRGTLGRLLFGSNDVVKKVKVLSGGEKGRMLYGKLLLLKPNVLVMDEPTNHMDMESIESLNMALEKYNGTLIFVSHDRQFVSSLATQIIELDGKGGYEHYLGDYESYLEKKGVA

SEQ ID NO: 19715 - protein, 305 aa, Neisseria meningitidis
MSIIHYLSLHVESARTALKQLLRQPFGTLLTLIMLAVAMTLPLFMYLGIQSGQSVLGKLNESPQITIYMETAAAQSDSDTVRSLLARDKRLDNIRFIGKEDGLEELQSNLDQNLISMLDGNPLPDVFIVTPDPATTPAQMQAIYRDITKLPMVESANMDTEWVQTLYQINEFIRKILWFLSLTLGMAFVLVAHNTIRLQILSRKEEIEITKLLGAPASFIRRPFLYQAMWQSILSAAVSLGLCGWLLSAVRPLVDAIFKPYGLNIGWRFFYPGEIALVFGFVIALGVFGAWLATTQHLLGFKAKK

SEQ ID NO: 19716 - protein, 228 aa, Neisseria meningitidis; identical to SEQ ID NO: 380

SEQ ID NO: 19717 - protein, 320 aa, Neisseria meningitidis
MQARLLIPILFSVFILSACGTLTGIPSHGGGKRFAVEQELVAASARAAVKDMDLQALHGRKVALYIATMGDQGSGSLTGGRYSIDALIRGEYINSPAVRTDYTYPRYETTAETTSGGLTGLTTSLSTLNAPARSRTQSDGSGSRSSLGLNIGGMGDYRNETLTTNPRDTAFLSHLVQTVFFLRGIDVVSPANADTDVFINIDVFGTIRNRTEMHLYNAETLKAQTKLEYFAVDRTNKKLLIKPKTNAFEAAYKENYALWMGPYKVSKGIKPTEGLMVDFSDIRPYGNHTGNSAPSVEADNSHEGYGYSDEVVRQHRQGQP

SEQ ID NO: 19718 - protein, 321 aa, Neisseria meningitidis; identical to SEQ ID NO: 6649

SEQ ID NO: 19719 - protein, 716 aa, Neisseria meningitidis
MKTPLLKPLLITSLPVFASVFTAASIVWQLGEPKLAMPFVLGIIAGGLVDLDNRLTGRLKNIIATVALFTLSSLTAQSTLGTGLPFILAMTLMTFGFTILGAVGLKYRTFAFGALAVATYTTLTYTPETYWLTNPFMILCGTVLYSTAILLFQIVLPHRPVQESVANAYDALGGYLEAKADFFDPDEAAWIGNRHIDLAMSNTGVITAFNQCRSALFYRLRGKHRHPRTAKMLRYYFAAQDIHERISSAHVDYQEMSEKFKNTDIIFRIHRLLEMQGQACRNTAQALRASKDYVYSKRLGRAIEGCRQSLRLLSDSNDNPDIRHLRRLLDNLGSVDQQFRQLQHNGLQAENDRMGDTRIAALETGSLKNTWQAIRPQLNLESGVFRHAVRLSLVVAAACTIVEALNLNLGYWILLTALFVCQPNYTATKSRVRQRIAGTVLGVIVGSLVPYFTPSVETKLWIVIASTTLFFMTRTYKYSFSTFFITIQALTSLSLAGLDVYAAMPVRIIDTIIGASLAWAAVSYLWPDWKYLTLERTAALAVCSNGAYLEKITERLKSGETGDDVEYRATRRRAHEHTAALSSTLSDMSSEPAKFADSLQPGFTLLKTGYALTGYISALGAYRSEMHEECSPDFTAQFHLAAEHTAHIFQHLPETEPDDFQTALDTLRGELDTLRTHSSGTQSHILLQQLQLIARQLEPYYRAYRQIPHRQPQNAA

SEQ ID NO: 19720 - protein, 307 aa, Neisseria meningitidis
MPSEHPFSDGISTPNPKETMNDTAQITASYGRRYIVRTPDGTTYEASTRKKRVDFACGDRVRISPVNAEQVVIEDFLPRQSLLYRQDAWKTKLIAANVTQLLIVTAAVPSPSVRLLQRALLAAEAAGIRAVIVLNKADLPETALWREKLKFYETLGYPVIETRALENAGSLRPALQGHSNILLGQSGMGKSTLTNALLGSQTARTGDISAALDSGKHTTTHARLYDLNGETQLIDSPGLQEFGLHHLQAADLPRYFPDFRHLVGQCRFHNCTHRAEPGCAFKAAAQTGAASPERLAFLQGITDELPG

SEQ ID NO: 19721 - protein, 352 aa, Neisseria meningitidis; identical to SEQ ID NO: 327

SEQ ID NO: 19722 - protein, 168 aa, Neisseria meningitidis
MFRRHFPVREKALNITVLAVGTKMPRWVDEAVAEYAKRFGRDVAYALKEIKPEKRGAGVNAAQGMAAEEKRILEAVPQGAFLVVLDERGKAPTSVELAEHLKSWRQNGEHVCFVIGGADGMTDRLKQQARMMMRLSSLTLPHGMVRVLLTEQLYRAVSILHNHPYHRE

SEQ ID NO: 19723 - protein, 548 aa, Neisseria meningitidis; identical to SEQ ID NO: 20

SEQ ID NO: 19724 - protein, 674 aa, Neisseria meningitidis
MNDMTLYLIIALVPLAGSLIAGLFGNKIGRAGAHTVTILGVAVSAVLSAYVLWGFLNGSRAKFDENVYTWLTMGGLDFSVGFLVDTMTAMMMVVVTGVSLMVHIYTIGYMHDEKVGYQRFFSYISLFTFSMLMLIMSNNFIQLFFGWEAVGLVSYLLIGFYFKRPSATFANLKAFLINRVGDFGFLLGIGLVLAYFGGSLRYQDVFAYLPNVQNATIQLFPGVEWSLITVTCLLLFVGAMGKSAQFPLHVWLPDSMEGPTPISALIHAATMVTAGLFMVSRMSPIYEMSSTALSVIMVIGAITALFMGFLGVIQNDIKRVVAYSTLSQLGYMTVALGASAYSVAMFHVMTHAFFKALLFLAAGSAIIGMHHDQDMRHMGNLKKYMPITWLTMLIGNLSLIGTPFFSGFYSKDSIIEAAKYSTLPGSGFAYFAVLASVFVTAFYAFRQYFMVFHGEEKWRSLPEHHDDHHGEEHHSLGKNDNPHESPLVVTLPLILLAIPSVIIGYVAIEPMLYGDFFKDVIFVNADAHPTMHIMKEEFHGALAMVSHSLHSPVLYLAIAGVLSAWLLYVKLPHLPAKIAQTFRPIYVLFENKYYLDALYFNVFAKGTRALGTFFWKVGDTAIIDNGIVNGSAKLVGAIAAQVRKAQTGFIYTYAAAMVFGVLVLLGMTFWGLFR

SEQ ID NO: 19725 - protein, 233 aa, Neisseria meningitidis; identical to SEQ ID NO: 18483

SEQ ID NO: 19726 - protein, 234 aa, Neisseria meningitidis
MLSEGISDGIFRGEMLQFAPFLPTQGNRIMFTGIVQGLGKLTAIHRPSEAFHTYVVELPQEAADNLQRGASVANNGCCLTITEIEGNRVSFDLMAETLAKTNLGLLKEGDCVNIERAARFGDEIGGHVMSGHIMATVPIVEIERDGFNRTVWFSLPHELKPYILTKGFVGLDGCSLTIGKVEDGRFNVHLIPETLERTLFGSRKVGDRINIEIDPNTQAIVDTVERLMTQRYAK

SEQ ID NO: 19727 - protein, 172 aa, Neisseria meningitidis; identical to SEQ ID NO: 14215

SEQ ID NO: 19728 - protein, 716 aa, Neisseria meningitidis
MLTDLEKNAIRDHYQNIGKNLPGFRPRASQREMIAAVANAFSRTLAREEGGEPPKREGESIAVIEGPTGVGKSLAYLLAGGIMAQTRGKRLIVSSATVALQEQLVDRDLPFLVEKSGLELSFALAKGRGRYLCPYKLYQLTQSNAQQNLLGFEAPAVLWDSKPKPEELKLLRDIADEFSARRFNGDRDTWPEKIDDAIWLKVTNDRHGCLKTACPNRPECPFYLARDVLETVDVVVANHDLLLADISMGGGVILPAPENSFYCIDEAHHLPKKALSRFAAEHSWNIAVWTLEKLPQLTGKIAALTDKAELANLADEAAASLLDSLHEWQFHLAEEPSLSMGPSENDRRTNSEPTWLWEDGKIPEGLETTVSNTAIAARSLLKHVVGLNDALSAVRREKEQDGALLDRLTGEFGIFIVRIEQISAVWDLLSTVPLEGEEPLAKWITRRADDKNDYIFNASPISSASHLANSLWRRAAGAVLTSATLQSLGNFNLMLRQTGLQWLPETTTLALKSPFDFEKQGELYIPPIYASPKDPEAHTAAVIEWLPKLISPTEAIGTLVLFSSRKQMQDVALRLPGDYLPLLLVQGELPKAVLLQKHHRAIEEGKASIIFGLDSFAEGLDLPGTACVQVIIAKLPFAMPDNPIEKTQNRWIEQRGGNPFIEITVPEAGIKLIQAVGRLIRTEQDYGRVTILDNRIKTQRYGQQLLAGLPPFKRIG

SEQ ID NO: 19729 - protein, 261 aa, Neisseria meningitidis; identical to SEQ ID NO: 7966

SEQ ID NO: 19730 - protein, 222 aa, Neisseria meningitidis
LPSASDGILSHWERQTAIMKTSNFSKRTSAMKTFALILADGQASRMGGEDKGLALLGGKALIDHVIDRVRPQVSHIAISTNRNLEEYARRSPHIFPDARQWQHFGPLSALCTAANDLQLATADWLLVVPCDMPYLPGDLVARFETVSKRTPLCNAYYVETPITMHYNIMYIRPQILQSAIPYLFSGMKTLRSWLQQQRARSVRFEFDGHFADLNTQIDLQEG

SEQ ID NO: 19731 - protein, 288 aa, Neisseria meningitidis
MKAKILTSVALLACSGSLFAQTLATVNGQKIDSSVIDAQVAAFRAENSRAEDTPQLRQSLLENEVVNTVVAQEVKRLKLDRSAEFKNALAKLRAEAKKSGDDKKPSFKTVWQAVKYGLNGEAYALHIAKTQPVSEQEVKAAYDNISGFYKGTQEVQLGEILTDKEENAKKAVADLKAKKGFDAVLKQYSLNDRTKQTGAPVGYVPLKDLEQGVPPLYRAIKDLKKGEFTATPLKNGDFYGVYYVNDSREVKVPSFDEMKGQIAGNLQAERIDRAVGALLGKANIKPAK

SEQ ID NO: 19732 - protein, 284 aa, Neisseria meningitidis; identical to SEQ ID NO: 6145

SEQ ID NO: 19733 - protein, 514 aa, Neisseria meningitidis
MCGVLGLVSHEPVNQFLYDGLQMLQHRGQDAAGIATAEGGTFHMHKGKGMVREVFRTRNMRDLTGNAGIAHVRYPTAGNAGSSAEAQPFYVSSPFGIVLAHNGNLTNTAELYENVCNKHLRHVNTSSDSEVLLNVFAHELRREVSKNADPHRLNADNIFNAVAQVHRLVRGAYGVIAMIAGYGMLAFRDPYGIRPLVLGSQTDSEGRKSYAVASESVAFNALTYDLERDIRPGEAVFVGFDGTMIARQCSDRAKLSPCLFEYVYFARPDSVIDGVSVYQSRLDMGVSLAEKIKRELPVDGIDVVMPIPDTSRPSAMELAVHLDKPYREGLIKNRYIGRTFIMPGQATRKKSVRQKLSPMETEFAGKSVLLVDDSIVRGTTSREIVEMVRAAGARKVYIASAAPEVRYPNVYGIDMPTREELIANGRSAAEIAAEIGADGIVFQDLGDLEAVVKALNPKIESFDSSCFNGIYQTGDIDDAYLDRLSAEKSGCGGLKIHPSRMEHSISISDAGDEE

SEQ ID NO: 19734 - protein, 96 aa, Neisseria meningitidis; identical to SEQ ID NO: 1976

SEQ ID NO: 19735 - protein, 43 aa, Neisseria meningitidis; identical to SEQ ID NO: 2340

SEQ ID NO: 19736 - protein, 144 aa, Neisseria meningitidis
MTEPKHEMPTEEQVAARKKAKAKIRTIRIWAWVILALLASTALLSQCAMSKPQAKQKIVESCVKNIPFAEKWQNDLRARGLDSNNTRLTVDYCKCMWEQPLDRLSEKQISSFGKLGAQEQLDLLGGANAFETRDKQCVADLKSE

SEQ ID NO: 19737 - protein, 304 aa, Neisseria meningitidis
MKHLKLTLIAALLTTAATAAPLPVVTSFSILGDVAKQIGGERVSIQNLVGANQDTHAYHMTSGDIKKIRSAKLVLINGLGLEAADVQRAVKQSKVSYTEATKGIQPLKAEEEGGHHHDHDHDHEGHHHDHGEYDPHVWNDPVLMSAYAQNVAEALIKADPEGKVYYQQRLGNYQMQLKKLHSDAQAAFNAVPAAKRKVLTGHDAFSYMGKRYHIEFIAPQGVSSEAEPSAKQVAAIIRQIKREGIKAVFTENIKDTRMVDRIAKETGVNVSGKLYSDALGNAPADTYIGMYRHNVKALTNAMKQ

SEQ ID NO: 19738 - protein, 109 aa, Neisseria meningitidis; identical to SEQ ID NO: 10359

SEQ ID NO: 19739 - protein, 243 aa, Neisseria meningitidis
MVKLTAQQIFDKLLNEEKILSVNGQIRFFLGDVDIIVKQKDVVGNIIQEWLGGWLRKREIEFDVSTNTQMPPDFFLNKKDRSRELLEVKAFNRNASPGFDIADFKMYSDEIIHKPYMLDVDYLIFGYDMDDNGNVTIKDLWLKKVWQITRSMDGWAINLQVKKGVVHKIRPGVWYSINKKNMPMFECLEDFVSAIEETVYQNPATRHNASLWKKKFEEAYKKHYNRSISIPRWHEIAHKYKKK

SEQ ID NO: 19740 - protein, 260 aa, Neisseria meningitidis; identical to SEQ ID NO: 485

SEQ ID NO: 19741 - protein, 162 aa, Neisseria meningitidis; identical to SEQ ID NO: 9363

SEQ ID NO: 19742 - protein, 132 aa, Neisseria meningitidis; identical to SEQ ID NO: 1178

SEQ ID NO: 19743 - protein, 414 aa, Neisseria meningitidis
MTLFCEQVPYPRLAEAFGTPLYVYSQSALTEAFEHYQTAFAELSPLVCYAVKANGNLSIIKHFASLGSGFDIVSGGELARVLAAGGDATKTIFSGVGKNEAEIEFALNAGVKCFNMESIPEIDRIQKVAARLGKTASVSLRVNPDVDAKTHPYISTGLKANKFGIAYADALEAYRHAAQQPNLKIIGIDCHIGSQLTDLSPLVEACERILILVDALAAEGIVLEHLDLGGGVGIVYQDENVPDLGAYAQAVQKLIGTRRLKLILEPGRSLVGNAGSLLTRVEFVKYGEEKNFVMVDAAMNDLMRPALYDAYHHIEAVETKDIEPLTANIVGPICETGDFLGKDRTIACEEGDLLLIRSAGAYGASMASNYNARNRAAEVLVDGNEYRLIRRRETLEQQMANELACLQAEHQNAV

SEQ ID NO: 19744 - protein, 64 aa, Neisseria meningitidis
MNIILNGEPAELHGTSVADLIAQTAPQKPFAVAVNTVFVPKGAYAETVLNENDKIDIVRPVVGG

SEQ ID NO: 19745 - protein, 377 aa, Neisseria meningitidis; identical to SEQ ID NO: 2272

SEQ ID NO: 19746 - protein, 159 aa, Neisseria meningitidis
MPESIFKQISLDILKLHRDSVYSLLATSGCNCQVHEAAYVNIDGKYYIALSCEPEVGEVKTGILLIEDESRSLRLSWVGSARELDRKDSAYKRALSALSRKMGRCKDKLHTAVQPFLLELVPEKGRFSVGDEEVWISRNDLVRALYPVGYSMRQAVLQI

SEQ ID NO: 19747 - protein, 416 aa, Neisseria meningitidis
MTKLTRRQIIRRTAGTLFALSPIASAVAKTVRAPQFTAARIWPSHTYTRLTLESTTALKYQHFTLDNPGRLVVDIQNANINTVLHGLSQKVMADDPFIRSIRAGQNTPTTVRLVIDLKQPSYAQVFSLPPVGGFKNRLVVDLYPHGMDADDPMMALLNGSLNKTRRGSPEADLAQNTPAQTERGKNGRRPVIMIDPGHGGEDPGAVSPGGLQEKHVVLSIARETKKQLEALGYNVFMTRNEDVFIPLGVRVAKGRARRADVFVSIHADAFTSPSARGTGVYMLNTKGATSSAAKFLEQTQNNADAVGGVPTSGNRNVDTALLDMTQTATLRDSRKLGKLVLEELGRLNHLHKGRVDEANFAVLRAPDMPSILVETAFLSNPAEEKLLGSESFRRQCAQSIASGVQRYINTSVLKRG

SEQ ID NO: 19748 - protein, 367 aa, Neisseria meningitidis; identical to SEQ ID NO: 6599

SEQ ID NO: 19749 - protein, 279 aa, Neisseria meningitidis
MLVAFLIMLREGIEAALIVGIVAGFLKQSGHSKLMPKVWFGVVLASLMCLGIGYGIHSATGEIPQKQQEFVVGIIGLVAVAMLTYMILWMKKAARSMKRQLQDSVQAALNRGSGQGWALVGMAFLAVAREGLESVFFLLAVFKQSPTWQMPAGAVAGGLAAAVIGALIYQGGMRLNLAKFFRWTGAFLIAVAAGLLAGSLRALHEAGIWNALQDIVFDSSKYLHEDSPLGVLLGGFFGYTDHPTQGEALVWLLYLIPVITWFLCGSRPSETLTRKEELK

SEQ ID NO: 19750 - protein, 181 aa, Neisseria meningitidis; identical to SEQ ID NO: 1552

SEQ ID NO: 19751 - protein, 204 aa, Neisseria meningitidis
MRKSRLSRYKQNKLIELFVAGVTARTAAELVGVNKNTAAYYFHRLRLLIYQNSPHLEMFDGEVEADESYFGGQRKGKRGRGAAGKVAVFGLLKRNGKVYTVTVPNSNRYFISYYPTSETQYCLYGLLSLCIRCERIPFLRNFVFVSITAHILPNDKTILMELRTFGTRQNVIYASLTAFPKRILSCIRSANGVLTTVRKFLFHF

SEQ ID NO: 19752 - protein, 136 aa, Neisseria meningitidis
MTTYTIPKKDYQFLYIYEGTLLNYTLKNDEFHIIVQNVDYPDFPQEIPTPNYTDWVKIKFKQFSYLKFVYGYATKSQDINIDNTLELGELKQDDEILDYGGALELIGGRYDFPTAFRIDIVCREIELEFLDQEGFN

SEQ ID NO: 19753 - protein, 419 aa, Neisseria meningitidis; identical to SEQ ID NO: 6779

SEQ ID NO: 19754 - protein, 203 aa, Neisseria meningitidis; identical to SEQ ID NO: 352

SEQ ID NO: 19755 - protein, 41 aa, Neisseria meningitidis; identical to SEQ ID NO: 3182

SEQ ID NO: 19756 - protein, 272 aa, Neisseria meningitidis; identical to SEQ ID NO: 7451

SEQ ID NO: 19757 - protein, 307 aa, Neisseria meningitidis
MDMSVYTSVSDDEMRGFLDDYDLGEFVSLQGIAQGITNSNYFLTTTSGRYVLTVFEVLKQEELPFFLELNRHLSMKGVAVAAPVARKDGRLDSVLAGKPACLVACLKGSDTALPTAEQCFHTGAMLAKMHLAAADFPLEMENPRYDAWWTEACARLLPVLSQDDAALLCSEIDALKDNLGNHLPSGIIHADLFKDNVLLDGGQVSGFIDFYYACRGNFMYDLAIAVNDWARTADNKLDEALKKAFIGGYEGVRPLSAEEKAYFPTAQRAGCIRFWVSRLLDFHFPQAGEMTFIKDPNAFRNLLLSLG

SEQ ID NO: 19758 - protein, 265 aa, Neisseria meningitidis
MDTAQKQRWAITLSYDGSRFYGWQKQADGVPTVQAALETALAQIAGESVATTVAGRTDTGVHATAQVVHFDTTAARPQQAWVRGVNAHLPEGIAVLHARQVAPEFHARFDAYGRHYRYLLESAPVRSPLLKHRAGWTHLKLDIGQMRQAAALLIGEQDFSSFRAAECQAKSPVKTIYRADLTQSAGLVRLDLHGNAFLHHMVRNIMGALVYVGSGRLSVEGFAALIQERSRLKAPPTFMPDGLYLTGVDYPEAYGIIRPQIPEWL

SEQ ID NO: 19759 - protein, 145 aa, Neisseria meningitidis; identical to SEQ ID NO: 14768

SEQ ID NO: 19760 - protein, 304 aa, Neisseria meningitidis; identical to SEQ ID NO: 3720

SEQ ID NO: 19761 - protein, 418 aa, Neisseria meningitidis
MKVLVLGAGVAGVSSAWYLAEAGHEVTVIDRAKGVAMETSFANAGQLSYGYTTPWAAPGIPTKALKWLFKSHPPLLFRPDGSLYQIEWLWRMLQNCTAAHYQTNKERMVRISEYSREMFRRFEAQTGMNFEGRKKGTLQIFRQAKEVEAAEQDIAVLERYGVPYRRLKPEECAEFEPALARVTAKIAGGLHLPADATGDCRLFTENLYKLCQEKGVRFHFNQTISRIDHNGLRIKTVETETGRFEADAVVCALGCFSRTVLAQLDLNLPIYPVKGYSLTLPVTNSDGAPVSTVLDESYKVAITRFDNRIRVGGMAELSGYEIKLPEKRRETLALVVNDLFPEGGDLSQASFWSGLRPMTPDSTPLIGRTRFDNLFLNTGHGTLGWTMSLGSAKLTADIVSGKDTEIRSDDLSLSRYQA

SEQ ID NO: 19762 - protein, 213 aa, Neisseria meningitidis; identical to SEQ ID NO: 9820

SEQ ID NO: 19763 - protein, 228 aa, Neisseria meningitidis
MTVLQERYCEVSDRIGKLVLQAGRKPHSVSLIAVGKTFPSDGIREVYAAGQRDFGENYIQEWYGKTEELADLTDIVWHVIGDVQSNKTKFVAERAHWVHTVCRLKTAVRLSGQRPSSMPPLQVCIEVNIAGEAVKHGVAPEEAVALAVEVAKLPNIVVRGLMCVAKANSSETELKVQFQTMRKLLADLNTAGVKADVLSMGMSDDMPAAIECGATHVRIGSAIFGKRG

SEQ ID NO: 19764 - protein, 520 aa, Neisseria meningitidis
LFEVMKKPLISVAAALLGVALGTPYYLGVKAEESLTQQQKILQEAGFLTVESHQYERGWFTSTETTVIRLKPELLNNARKYLPDNLKTVLEQPVTLVNHITHGPFAGGFGTQAYIETEFKYAPETEKVLERFFGKQVPVSLANTVYFNGSGKMEVSVPAFDYEELSGIRLHWEGLTGKTVYQKGFKSYRNSYDAPLFKIKLADKGDAAFEKAHFDSETSDGINPLALGSSNLTLEKFSLEWKEGVDYNVKLNELVNLVTDLQIGAFINPNGSIAPSKIEVGKLAFSTKTGESGSFINSEGQFRFDTLVYGNEKYGPLDIHIAAEHLDASALTVLKRKFAQISAKKMTEEQIRNDLIAAVKGEASGLFTNNPVLDIKTFRFTQPSGKIDVGGKIMFKDMKKEDLNQLGLMLKKTEADIRMSIPQKMLEDLAVSQAGNIFSVNAEDEAEGRASLDDINETLRLMVDSTVQSMAREKYLTLNGDQIDTAISLKNNQLKLNGKTLQNEPEPDFDEGGMVSEPQQ

SEQ ID NO: 19765 - protein, 143 aa, Neisseria meningitidis; identical to SEQ ID NO: 28

SEQ ID NO: 19766 - protein, 329 aa, Neisseria meningitidis
MKQPVFAVTSGEPAGIGPDICLDLAFARLPCRCAVLGDKNLLRARAEALGKSVVLRDFDPESGGAAYGELEVLHIPAVEAVEAGKLNPANAAYVLQLLDTALAGISDGIFDGIVTAPLHKGIINDARASTGFFSGHTEYLAEKSGTGQVVMMLAGKGLRVALVTTHLPLKDVAAAITQPLIESVARILHHDLKHKFGIKNPKILVAGLNPHAGEGGHLGHEETDTIIPALENLRREGINLAGPYPADTLFQPFMLEGADAVLAMYHDQGLPVLKYHSFGQGVNITLGLPFIRTSVDHGTALDLAATGRADSGSLITAVETAVEMARGSL

SEQ ID NO: 19767 - protein, 245 aa, Neisseria meningitidis; identical to SEQ ID NO: 388

SEQ ID NO: 19768 - protein, 619 aa, Neisseria meningitidis
MPDYRSKTSTHGRNMAGARALWRATGVMETDFGKPIIAVANSFTQFVPGHVHLHNMGQLVAREIEKAGAIAKEFNTIAIDDGIAMGHSGMLYSLPSRDLIADSIEYMVNAHCADALVCISNCDKITPGMLIAAMRLNIPTIFVSGGPMEAGKVIGVANIQPERRLDLIDAMIESADDNISNRQVEEVEQNACPTCGSCSGMFTANSMNCLTEALGLSLPGNGSYLATHAGRKELFLEAGRMIVEITKRYYEQDDETVLPRSIATKKAFENAMTMDIAMGGSTNTILHLLAVANEAGVDFKMADIDRLSRVVPCICKTAPNNHDYYMEDVHRAGGIFAILKELDKAGKLHTDVYTIHAPTLKDAIEKWDVTNPENTRAIERFKAAPGGVRTTQAFSQNRMWKTLDLDREKGCIRDVEHAYSQDGGLAVLFGNIAERGCVVKTAGVDESILKFTGRARVFESQEDAVEGILGNQIVAGDIVIIRYEGPKGGPGMQEMLYPTSYLKSKGLGKACALLTDGRFSGGTSGLSIGHASPEAAEGGAIGLVHEGDTVEIDIPNRSIHLAISDEELAARRAEMEARGSKAWKPKNRDRYVSAALRAYGAMATSADKGAVRDVAQIER

SEQ ID NO: 19769 - protein, 153 aa, Neisseria meningitidis
MQTLDGEMAGGNKPPKPSTQQHPTHSDNNIGLPASYVKPDTSISPTGTIQDRIRWTKSKFPTEKSLNGHFKAHGKEFGDITIEDYQKMASDLLSKQTSDKILGYQTEHRRVRYDINNNIYVLANPKTFKIKTMFKPNLGKKYYDGEFKKDMGN

SEQ ID NO: 19770 - protein, 563 aa, Neisseria meningitidis; identical to SEQ ID NO: 2966

SEQ ID NO: 19771 - protein, 504 aa, Neisseria meningitidis
MCCSLSFAEPARIDDRIIKFRPSKSKFFESTGYRKINNEFSKFTEAANVEHIPTGAKARINAKITASVSRAAVLSGVGKLARLGAKFSTRAVPYVGTALLAHDVYETFKEDIQAQGYQYDPETDKFVKGYEYSNCLWYEDERRINRTYGCYGVDSSIMRLMSDDSRFPEVKELMESQMYRLARPFWNWHKEELNKLSSLDWNNFVLNRCTFDWNGGDCVVNKGDDYRNGANFSLSRNPKYKEEMDAKKLEEILSLKVDANPDKYIKATGYPGYSEKVEVAPGTKVNMGPVTDRNGNPVQVVATFGRDSQGNTTVDVQVIPRPDLTPGSAEAPNAQPLPEVSPAENPANNPAPNENPGTRPNPEPDPDLNPDANPDTDGQPGTSPDSPAVPDRPNGRDGKDGGLLCKFFPDILACDRLPEPNPAEDLNLPSETVNVEFKKSGIFQDSAQCPAPVTFTITVLDSSKQFAFSFENACTIAERLRYMLLALAWAVAAFFCIRTVSREV

SEQ ID NO: 19772 - protein, 228 aa, Neisseria meningitidis; identical to SEQ ID NO: 445

SEQ ID NO: 19773 - protein, 950 aa, Neisseria meningitidis; identical to SEQ ID NO: 9050

SEQ ID NO: 19774 - protein, 658 aa, Neisseria meningitidis
MSKLKTIALTASGLSVCPGFLYAQNTSSHQIGLAIMRLNSSILDLPPTKQYFQSGSLWSELRQGFRMGEVNPELVRRHESKFIASHSYFNRVINRSRPYMYHIANEVKKRNMPAEAALLPFIESAFVTKAKSHVGASGLWQFMPATGRHYGLEKTPVYDGRHDIYAATDAALNYLQYLYGLFGDWPLAFAAYNWGEGNVGRAINRARAQGLEPTYENLRMPNETRNYVPKLLAVRNIIATPQSFGMNISDIDNKPYFQAVEPDRPLDNEAIVRLAGITQSELLALNPAFNVPAFIPKSKRKLLLPVASVQTFQSNYLNAAPDSLFSWEVYTPAAKTSLSDISTATGMSIADIKRLNNLNGNLVNAGRSILVAKNGKTLQTASESVVSIDIDNTPDTYRSNMPAGTVNVGIARIRPAAAQTADITVAPLPQKTVRTEPDPLVRIAEPALATAAAQPQTEKQTAMPSETQTATLAQIIPQNDMQAADELMQLVARNNLRRQAEETISAVIGTPDTVAEHNISSSPQHTVAADGKRRARLETRVAKAADGEAEISPLHASIHRVVEGDTLFNIAKRYNVSVADLIVANNIKGNTIQKGQVLRLAQAAPAQTRIEKVSYTVRKGDTFKSIAARFNIHIDDIRRLNPNLNTINPGQRVKLIGS

SEQ ID NO: 19775 - protein, 463 aa, Neisseria meningitidis
MSGQLGKGADAPDLVYGLEDRPPFGNALLSAVTHLLAIFVPMITPALIVGGALELPVEMTAYLVSMAMVASGVGTYLQVNRFGPVGSGMLSIQSVNFSFVTVMIALGAGMKEGGLTKDAMISTLLGVSFVGAFLVCFSAWLLPYLKKVITPTVSGVVVMLIGLSLVHVGITDFGGGFGAKADGTFGSMENLGLASLVLLIVLIFNCMKNPLLRMSGIAVGLIAGYIVALFLGKVDFSALQNLPLVTLPVPFKYGFAFDWHAFIVAGAIFLLSVFEAVGDLTATAMVSDQPIEGEEYTKRLRGGVLADGLVSVIATALGSLPLTTFAQNNGVIQMTGVASRHVGKYIAVILVLLGLFPVVGRAFTTIPSPVLGGAMVLMFGLIAIAGVRILVSHGIRRREAVIAATSVGLGLGVAFEPEVFKNLPVLFQNSISAGGITAVLLNLVLPEDKTEAAVKFDTDHLEH

SEQ ID NO: 19776 - protein, 75 aa, Neisseria meningitidis; identical to SEQ ID NO: 8304

SEQ ID NO: 19777 - protein, 336 aa, Neisseria meningitidis; identical to SEQ ID NO: 19047

SEQ ID NO: 19778 - protein, 395 aa, Neisseria meningitidis; identical to SEQ ID NO: 1108

SEQ ID NO: 19779 - protein, 628 aa, Neisseria meningitidis
MPSETVFQVIDMNKETRFPEHFDIPLFLKNLPNLPGVYRFFNESGNVLYVGKAVNLKRRVSGYFQKNDHSPRIALMVKQVHHIETTITRSESEALILENNFIKALSPKYNILFRDDKSYPYLMLSGHQYPQMAYYRGTLKKPNQYFGPYPNSNAVRDSIQVLQKVFMLRTCEDSVFEHRDRPCLLYQIKRCSAPCVGHISEEDYHDSVREASTFLNGKTDELTRTLQHKMQTAAANLQFEEAARYRDQIQALGIMQSNQFIDSKNPNNPNDIDLLALAVSDGIVCVHWVSIRGGRHVGDKSFFPDTKNDPEPNGQDYAEAFVAQHYLGKSKPDIIISNFPMPDALKEALESEHGKQMQFVTKTIGERKVWLKMAEQNAQMAIAQRRLQQSSQQHRIDELAKILGMDSDGLNRLECFDISHTQGEATIASCVVYDEQNIQPSQYRRYNITTAKPGDDYAAMREVLMRRYGKMQEAEANGETVKWPDVVLIDGGKGQIGVAVSVWEELGLHIPLVGIAKGPERKAGMEELILPFTGEVFRLPPNSPALHLLQTVRDESHRFAITGHRKKRDKARVTSSLSDIPGVGSKRRQALLTRFGGLRGVVAASKEDLEQVEGISKALAETIYEHLH

SEQ ID NO: 19780 - protein, 420 aa, Neisseria meningitidis
MSNTQKQLALAKAAKKSVNTADTEEKNRALLAMADSLEAAAADILAANRQDLEAAAGKIPESMTDRLLLDGKRICAMADGIRAVAALPDPVGEILETSTLPNGLEIVKKRVAMGVIGIIYESRPNVTSDAAALALKSGSAVVLRSGKDAFQSARAIVAALKAGLAQTRIDPDALQLIEDTGREGSYEMMRAKDYLDLLIPRGGAGLIRAVVENAVVPVIETGTGIVHIYIDKDADWDKALRIVYNAKTSRPSVCNSMEVLLVHEDIAADFLPKLERLLVRDRIEAGLPPVRFRLDPQAARHIGGEAAGADDFDTEFLDYILAVKTVASVEEAVGHIEAHGTHHSDGIVTENRHAADYFTTHIDSAAVYVNASTRFTDGGEFGLGCEMGISTQKLHARGPMGLKELTSYKYIVQGTGQVRE

SEQ ID NO: 19781 - protein, 96 aa, Neisseria meningitidis; identical to SEQ ID NO: 4744

SEQ ID NO: 19782 - protein, 119 aa, Neisseria meningitidis; identical to SEQ ID NO: 420

SEQ ID NO: 19783 - protein, 74 aa, Neisseria meningitidis
MNSETLDVTGLKCPLPILRAKKALAQMQQGDVLTVLATDGGAPGDFEAFCRQTGHVLLDASEQDGVFTLVVKHK

SEQ ID NO: 19784 - protein, 384 aa, Neisseria meningitidis
MSIHLDFGISPKTFRQTYLYQKPKLFKGAARNLEAASWKDINEIYQRADPTAPLFYLRKKGAIVPKEEYVESFDALGKTRYRFIKSVIYEHMKNGASLVYNHINNEPFSDHISRQVARFAGAHTIVSGYLAFGSDESYKNHWDTRDVYAIQLFGKKRWQLTAPDFPMPLYMQQTKDTDISIPEHIDMDIILEAGDVLYIPRGWWHRPIPLGCETFHLAVGTFPPNGYNYLEWLMKKFPTIESLRHSFSDWEQDRTRINDTAAQIAAMIADPVNYEAFSEDFLGKERTDTAFHLEQFANPNATPLSDDVRLRLNANNLDTLEKGYLIGNGMKISVDELGKKVLEHIGKNEPLLLKNLLVNFNQGKHEEVRKLIYQLIELDFLELL

SEQ ID NO: 19785 - protein, 239 aa, Neisseria meningitidis; identical to SEQ ID NO: 11311

SEQ ID NO: 19786 - protein, 259 aa, Neisseria meningitidis
MLKIISANVNGIRSAYKKGFYEYIAASGADIVCVQELKAQEADLSADMKNPHGMHGYWHCAEKRGYSGVAVYSKRKPDNVQIGMGIEEFDREGRFVRCDFGRLSVISLYLPSGSSAEERQQVKYRFLDAFYPMLEAMKNEGRDIVVCGDWNIAHQNIDLKNWKGNQKNSGFLPEEREWIGKVIHTLGWTDMWRTLYPDNPGYTWWSNRGQAYAKDVGWRIDYQMVTPELAAKAVSAHVYKDEKFSDHAPLVVEYDYAAE

SEQ ID NO: 19787 - protein, 421 aa, Neisseria meningitidis
MSHLFRKEVFVAQQNKWTGQVILTRPFSFLFLTFCAFLIALCIIIFLIFGSYTNKTTVEGQLLPTMGVVRVYSSDIGTITHKFVEDGNFVKAGEPLFKLSTSRFGEKGNVQAKLAAEANLKKTLALQELERLKRIHQNEQKNVHNNIHRLNNQLENIKQQITGQNRQIRLAEKTLNKNKFLASQGAVSQQDKMTAESHLLEQRSRLESLKLEQNNAIRELDEQKITLSSLPERHKTELSQLNRAITEMNQEILDFDLKSEQTIRASKSGYISTINVDIGQQVEPSKLLLSIVPEQTELVANLYIPSKAVGFIKPKDKVVLRYQAYPYQKFGHATGEIISVARTALGKQELSGLGIIFTNPTLLNEPAYLVKVKLEKQTIKAYGENKPLQIGMILEADILHERKKLYEWVLDPLYSISGKIN

SEQ ID NO: 19788 - protein, 896 aa, Neisseria meningitidis
MSDNRLDTARRHSLFLARQLDNGKLKPEIFLPMLDKVLTEADFQAFADWDKIRAEENEEELARQLRGLRRYVVSQIIVRDINRISDLNEVTRTITLFADFAVNTALDFSYAYYQDMYGTPIGRYTKSPQHLSVVAMGKAGGYELNVSSDIDLIFIYPESGDTDGRRERGNQEFFTKVGQKLIALLNDITADGQVFRVDMRLRPDGDSGALVLSETALEQYLITQGREWERYAWCKGRVVTPYPNDIKSLVRPFVFRKYLDYGAYEAMRKLHRQIHSEVGKKGMADNIKLGAGGIREVEFIAQIFQMIRGGQMRALQLKGTRETLEKLAESGIMPSENVETLLAAYRFLRDVEHRLQYWDDRQTQTLPASPEQRQLLAESMGFDDYADFLNALNQHRNQVNRLFNEILSEPEEQTQSNSEWQWVWQDKPDEEERQGRLKEHGFDAETIATRLDQIRHSHKYRHLSAHAQPRFDAVVPLFVQAAAAQSNPTDTLMRLLDFLENISRRSAYLAFLNEHPQTLAQLAQIMGQSSWVAAYLNKYPILLDELISAQLLDTAFDWQALAAALSDDLKACGGDTEAQMDTLRHFQHAQVFRLAVQDLAGLWTVESLSDQLSALADTILAAALLCAWADMPKKHRDTPQFAVVGYGKLGGKELGYASDLDLVYLYDDPHPEAGDVYSRLARRLTNWLSTATGAGSLYETDLRLRPNGDAGFLAHSIAAFEKYQRENAWTWEHQSLTRARFICGTPEIQTAFDRIRTEILTAERDQTALADEIIEMREKMFPTHPPADSNVKYARGGVVDVEFIVQYLILAHARKYPQLLDNYGNIALLNIATDCGLIDKTLAEQSRTAYRFYRRQQHNTKLRDAEKTEVSGELLAHYGNVRKLWREVFGEEAATA

SEQ ID NO: 19789 - protein, 290 aa, Neisseria meningitidis
LSDEGRHKPTSAPNRVFMMKGMDKLRYQQDFLNIRPIFTAGEQEYLTELSDRLPLSVLTDSVRNIEEIGIDFVYSSAKLEGNTYNQYDTQALLKLGQTAGGKLYSDAVMLINLRESYRHLLSGLDSPDPFDWLDFLKTTHSLISENLLEKGSGGVVRRDSVTISGTDYTPLSNPQSLDTELKWLLQEAPKIENPFDRAVYLHNNLAYLQYFKDCNKRTARNCMTLSLMRSGFFPCVFSPDSYPAYAEAVVAYYETGDYGLFKKYFISAYENTVNKYGPQPDMDIFRNFSL

SEQ ID NO: 19790 - protein, 945 aa, Neisseria meningitidis
MLDKYSPAEIESKHYQNWESQGYFQPDMDLTKPSFSIQLPPPNVTGTLHMGHAFNQTIMDGLTRYYRMKGCNTAWIPGTDHAGIATQIVVERQLAAQNVSRHNLDREKFLEKVWEWKEVSGGTITQQMRRVGCSADWTREYFTMDDVRAETVTEVFVRLYEQGLIYRGKRLVNWDPVLGTAVSDLEVESVEEQGSMWHIRYPLADNPAEAVIVATTRPETLLGDVAVAVNPEDERYTHLIGKELILPLTGRTIPVIADEYVEKDFGTGCVKITPAHDFNDYEVGKRHDTRLVNVFDLEAKVLANAEVFNFKGEAQPSFAMPEKYAGLDRFAARKQMVADLQEQGFLVEIKAHTLMTPKGDRTGSVIEPMLTSQWFVAMSATPNGGEPDSEFKGLSLADKAKKAVDSGAVRFIPENWVNTYNQWMNNIQDWCISRQLWWGHQIPAWYDEAGNVYVARNQVEAEKQAGKTGLTREEDVLDTWFSSALVPFSTLGWPSETDELKAFLPSNVLVTGYEIIFFWVARMIMMTTHFTGKVPFKDVYIHGIVRDHEGKKMSKSEGNVIDPVDLIDGIGLEKLLVKRTTGLRKPETAPKVEEATKKLFPEGIPSMGADALRFTMASYASLGRSVNFDFKRAEGYRNFCNKIWNATNFVLMNTENQDCGYGATAAEPRGYSFPDMWIVGRLNQTIEQVTQAYETYRFDLAAETLYSFVWNDYCDWYLELAKVQLQTGCASRQRATRHTLLRVLEAALRLLHPIIPFITEELWQTVAPMCDAKTADSIMLARFPEADGGDIVQTAFGQMTVLQDLIGAVRNLRGEMGIQPNVKAPLFVESADDLADYLKYLPMMTRLTEAQQVAALPESEDAPVAVCNGARLMLKVEIDKAAETARLGKEAEKLQKALDKLNAKLSKPGYTEKAPAHLVEKDKADLAELEDKMAKVQTQLSKLKD

SEQ ID NO: 19791 - protein, 158 aa, Neisseria meningitidis
MLAVCQSGSAPKNAHTASAGTPAGESCKVIRDDTAGSGKNIIYRCCNGQAAINAAIADGVLESGIPVSFGGGGVPVANGRNLVTRQAANGVGKSDSEACEHALINAARKFQQTAGKLGGRGVTGFHSYFDKQPLQGGQYDCQAGSFHVRVVMRANVVR

SEQ ID NO: 19792 - protein, 524 aa, Neisseria meningitidis
MFRRYLPNRQMNMVSKLDKYWQHPALYWPLLILFAAATPFTFAPYYHFWLMPLIFGAFVRLIELRPRFAVSSAYLFGLTAYTTQFYWIHTALHDVSGLPDLYAVPLTFLLPAYLALYPALCFWLWKKFTLPRGIKIGLVLPILWTLTEFARERFLTGFGWGAIGYSQITPDSPLAGFAPLGGIHMVTLATAFLGVWLVLASDNTARSGKRLLPIILIAALLAAGYTARQTDFTRPDGSRSTVALLQGNIDQTLKWREDQVIPTIQKYYEQVGKTTADIVILPETAIPVMRQNLPENILAKFAEQAQNNGSALAVGISQYTSDGNGYENAVINLTGYQENNQDGIPYYAKNHLVPFGEYKPLPFLTTPLYKMMNMPLSDFRKGGGKQSALLMKNQKIAFNICYEDGFGDELIAAAKDATLLANASNMAWYGKSNAMYQHLQQSQARAMELGRYMVRATNTGATAIISPKGNIIAQAQPDTETVLEGHIKGYVGETPYMKTGSSWWLMGILTLAALILFIFRNKEH

SEQ ID NO: 19793 - protein, 109 aa, Neisseria meningitidis; identical to SEQ ID NO: 9983

SEQ ID NO: 19794 - protein, 143 aa, Neisseria meningitidis; identical to SEQ ID NO: 303

SEQ ID NO: 19795 - protein, 330 aa, Neisseria meningitidis
MPSETVCPFSDGISVTHPSPYTVRPYSEGLLRKPAMPYQQITVNVNDAVAERLADALMEHGALSAAIEDAYAGTENEQAIFGEPGMPTEQIWQQSKVIALFGEHDEAAAIIQTAAQECGLKDLAYTGETLEDQDWVRLTQAQFDPIRISERLWITPSWHEAPEGTAVNLRLDPGLAFGTGSHPTTRLCLKWLDTQLKNGESVLDYGCGSGILTIAALKLGAGSAVGVDIDEQAVRAGKDNAEQNNVDAQFFLPDGLPQGQFDVVVANILANPLRMLGEMLAARTKQGGRIVLSGLLDEQAEELGGIYSQWFDLDPAETEESWARLSGTKR

SEQ ID NO: 19796 - protein, 312 aa, Neisseria meningitidis
MLELNGLCKRFGGKTVADDICLTVGRGKILAVLGRSGCGKSTLLNMIAGIIRPDGGEIRLNGENITRMPPEKRRISLMFQDYALFPHMSALENAAFGLKMQKMPKAEAERLAMAALAEVGLENEVHRKPEKLSGGEKQRLALARALVVRPSLLLLDESFSSLDTHLRDRLRRMTAERIRNGGIPAVLVTHSPEEACTTADEIAVMHEGRILQYGTPETLVQTPAGVQVARLMGLPNTDDDRHIPQNAVRFDQDGMECRVLSRTCLPESFSLSVLHPEHGILWLNLDMRHAGAVSGKDTVRIHIEEREIVRFR

SEQ ID NO: 19797 - protein, 291 aa, Neisseria meningitidis
MNLYDLLLAPFAEFDFMRYALASVFCLSLSAAPVGVFLVMRRMSLIGDALSHAVLPGAAVGYMFAGLSLPAMGLGGVAAGMLMALLAGLVSRFTTLKEDANFAAFYLSSLAIGVVLVSKNGSSVDLLHLLFGSVLAVDIPALQLIAAVSTLTLLTLAVIYRPLVLESIDPLFLKSVGGKGGLWHVLFLVLVVMNLVSGFQALGTLMSVGLMMLPAITARLWAKHMGALILLSVLTALLCGLSGLLISYHIEIPSGPAIILCCSVLYLFSVILGKEGGILTKWLKNHRHHTT

SEQ ID NO: 19798 - protein, 92 aa, Neisseria meningitidis; identical to SEQ ID NO: 10783

SEQ ID NO: 19799 - protein, 98 aa, Neisseria meningitidis; identical to SEQ ID NO: 3727

SEQ ID NO: 19800 - protein, 187 aa, Neisseria meningitidis
MTDLETKRLETQAMLENADLLFDQGQCRAALQKVADEITRDLGGKYPLLLPVMGGAVVFTRQLLPLLRFPLDFDYVHVSRYGDKLEGGAFNWKRMPDAEQIRGRHVVVLDDILDEGHTMSAIQAKLLEMGAASCRAAVFANKLIDKPKPIRADYVGLDVPNRYVFGYGMDAAGCWRNLGEIYALDGK

SEQ ID NO: 19801 - protein, 89 aa, Neisseria meningitidis
MLKQSIEIINKLGLHARASSKFTQTASQFQSEVWVTKNGSRVNGKSIMGLMMLAAAKGTVIELETDGADEAEAMRALTDLINGYFGEGE

SEQ ID NO: 19802 - protein, 286 aa, Neisseria meningitidis
MAKVKGGLGRGLDSLLANGADNSSGDRLTTVAVKDIRPGRYQARVQIDDEALQELADSIKAQGVIQPVIVREHGLSRYELIAGERRWRAAQIAGLTEIPAVIKTISDETALAMGLIENLQRENLNPIEEAQGLKRLADEFGLTHETIAQAVGKSRSAISNSLRLLSLPEPVQEMLYQRRLEMGHARALLTLPVVEQLELAQKAVKNGWSVREVERRSQAALQNKRPEPKKTAAADIGRLNDLLTEKLGVNAEIKTANHKKGRIILHFDTPETFDHILKQLGIDYRP

SEQ ID NO: 19803 - protein, 72 aa, Neisseria meningitidis; identical to SEQ ID NO: 1579

SEQ ID NO: 19804 - protein, 188 aa, Neisseria meningitidis; identical to SEQ ID NO: 7019

SEQ ID NO: 19805 - protein, 57 aa, Neisseria meningitidis; identical to SEQ ID NO: 14761

SEQ ID NO: 19806 - protein, 93 aa, Neisseria meningitidis; identical to SEQ ID NO: 2808

SEQ ID NO: 19807 - protein, 706 aa, Neisseria meningitidis
MFDKHVKTFQYGNHTVTLETGEIARQAAAAVKVSMGDTVVLVAVTTNKEVKEGQDFFPLTVDYLERTYAAGKIPGGFFKREGKQSEKEILTSRLIDRPIRPLFPEGFYHDIQIVAMVVSVDPEIDSDIPAMLGASAALVLSGVPFAGPIGAARVGYVNGVYVLNPTKAELAKSQLDLVVAGTSKAVLMVESEAKILPEDVMLGAVVYGHDQMQVAINAINEFADEVNPELWDWKAPETNEELVAKVRGIAGETIKEAFKIRQKQARSAKLDEAWSAVKEALITEETDTLAANEIKGIFKHLEADVVRSQILDGQPRIDGRDTRTVRPLNIQTGVLPRTHGSALFTRGETQALAVATLGTSRDEQIIDALSGEYTDRFMLHYNFPPYSTGEVGRMGAPKRREIGHGRLAKRALLAVLPKPEDFSYTMRVVSEITESNGSSSMASVCGGCLSLLSAGVPLKAHVAGIAMGLILEGNKFAVLTDILGDEDHLGDMDFKVAGTTEGVTALQMDIKIQGITKEIMQIALAQAKEARLHILDQMKAAVAGPQELSAHAPRLFTMKINQDKIREVIGKGGETIRAITAETGTEINIAEDGTITIAATTQEAGDAAKKRIEQITAEVEVGKVYEGTVVKILDNNVGAIVSVMPGKDGLVHISQIAHERVRNVGDYLQVGQVVNVKALEVDDRGRVRLSIKALLDAPAREENAAE

SEQ ID NO: 19808 - protein, 294 aa, Neisseria meningitidis
MSSGNIHIHSMTGFANAAAECGSKRINLDLRAVNHRFLDIQIRMPDDLRYLESGIREKISSHIARGKVECKIQIQDAENGNQSLELNRDLVGQLAEINKDLRKHYDLAKLGVADILRFPGVLASQRENADALAKVIADLTDSALKDFTAARRREGKKLGEHLLQRLESMEEIIDALSELFPTLLETHKEKIRARLAEAVGSIDNDRLQQEFALFIQKSDIDEEFSRLRTHIAEVRRIVTEHKGSSGKRLDFLMQELNREANTLGSKSIATECTQASVELKVLIEQMREQVQNIE

SEQ ID NO: 19809 - protein, 346 aa, Neisseria meningitidis; identical to SEQ ID NO: 19638

SEQ ID NO: 19810 - protein, 219 aa, Neisseria meningitidis
MTTPKLIIFDWDGTLADTTQPIIDTMRRSFAECGFPPPEAERVRSLIGYSLPEIIRDLLEMPSETAIADITRTYSAHYLNPNNRNMTLFPDALPCLDKLKAQGYWLAVATGKGRAGLDNAISQTATGGYWLATACAGEYPSKPSPEMVFGICGELGFDPKEALVVGDTAHDLHMAANAGAAAVGVATGAHSREQLLSAPHLAVLDGLSELPGFLAQHYA

SEQ ID NO: 19811 - protein, 256 aa, Neisseria meningitidis
VSETQNEQTVQPLVEHLIELRRRLMWTVVGILVCFFGMMPFAQQLYTFIADPLMANLPKDTSMIATDVIAPFFVPVKVTLMAAFLISLPHTLYQIWAFVAPALYQNEKRLITPLVLSSVSLFFIGMAFAYFLVFPVIFKFLASVTPVGVNMATDIDKYLSFILGMFVAFGTTFEVPIVVILLTKIGVVTTEQLKRARPYVIVGAFVIAAIITPPDVISQTLLAIPLILLYEAGIWFGRFFTPRSEQDGDIQPPATT

SEQ ID NO: 19812 - protein, 160 aa, Neisseria meningitidis; identical to SEQ ID NO: 6404

SEQ ID NO: 19813 - protein, 42 aa, Neisseria meningitidis; identical to SEQ ID NO: 6907

SEQ ID NO: 19814 - protein, 128 aa, Neisseria meningitidis; identical to SEQ ID NO: 18901

SEQ ID NO: 19815 - protein, 352 aa, Neisseria meningitidis; identical to SEQ ID NO: 6670

SEQ ID NO: 19816 - protein, 263 aa, Neisseria meningitidis
  misc_feature 3, 4: 'Xaa' is any amino acid
VCXXLLFSSLLFSSLILSSLLFSSAAQAASEDGSRSPYYVQADLAYAAERITHDYPKATGANNTSTVSDYFRNIRAHSIHPRVSVGYDFGGWRIAADYASYRKWKESNSSTNAENRDSIQNYVKIETKHQGNGSFHAVSSLGLSAIYDFKLNDKFKPYIGARVAYGHVRHQVHSVESKNTIITSKPTGNTPAGGPVPTGFVPKSAYHESHSISSLGLGVIAGVGFDITPKLTLDTGYRYHNWGRLENTRFKTHEVSLGMRYRF

SEQ ID NO: 19817 - protein, 481 aa, Neisseria meningitidis
MPSEMLSPFSVPAPFFYGRVAGTTGTVIMLKKVLIANRGEIALRVLRACREMGIATVAVHSEADKDSLHVKLADESVCIGPAASAQSYLNVPAIIAAAEVSCADAVHPGYGFLAENADFAEQVEQSGFTFIGPKPDTIRLMGDKVSAKHAMIAAGVPCVPGSDGALPDDGEEILKIADKVGYPVIIKASGGGGGRGMRVVEKKEDLLQSVEMTKAEAGAAFGNPMVYMERYLQRPRHVEIQVIADEHGNAIYLAERDCSMQRRHQKVIEEAPAPFITEKERAKIGNACADACKRIGYRGAGTFEFLYEDGEFFFIEMNTRVQVEHPVTELITGVDIVQEQLRIAAGLPLQYKQKDIQVEGHAFECRINAEDPYNFIPSPGPIESCHLPGGFGIRVDSHIYQGYRIPPYYDSLIGKICVHGKTREQAMAKMRVALAELAVTGIKTNTPLHRDLFADAGFQKGGVSIHYLEHWLEDRKAKQDK

SEQ ID NO: 19818 - protein, 62 aa, Neisseria meningitidis; identical to SEQ ID NO: 5951

SEQ ID NO: 19819 - protein, 194 aa, Neisseria meningitidis; identical to SEQ ID NO: 2490

SEQ ID NO: 19820 - protein, 193 aa, Neisseria meningitidis; identical to SEQ ID NO: 1600

SEQ ID NO: 19821 - protein, 531 aa, Neisseria meningitidis
MFQEILDQVRRRRTFAIISHPDAGKTTLTEKLLLFSGAIQSAGTVKGKKTGKFATSDWMDIEKQRGISVASSVMQFDYKDHTVNLLDTPGHQDFSEDTYRVLTAVDSALMVIDAAKGVEAQTIKLLNVCRLRNTPIVTFMNKYDREVRDSLELLDEVENILQIRCAPVTWPIGMGKNFKGVYHILNDEIYLFEAGGERLPHEFDIIKGIDNPELEQRFPLEIQQLRDEIELVQAASNEFNLDEFLAGELTPVFFGSAINNFGIQEILNSLIEWAPAPKPRDATVRMVEPDEPKFSGFIFKIQANMDPKHRDRIAFLRVCSGKFERGMKMKHLRINREIAASSVVTFMSHDRELVEEAYAGDIIGIPNHGNIQIGDSFSEGEQLAFTGIPFFAPELFRSVRIKNPLKIKQLQKGLQQLGEEGAVQVFKPMSGADLILGAVGVLQFEVVTSRLANEYGVEAVFDSASIWSARWVSCEDKKKLAEFEKANAGNLAIDAGGNLAYLAPNRVNLGLTQERWPDIVFHETREHSVKL

SEQ ID NO: 19822 - protein, 615 aa, Neisseria meningitidis
MHDTRTMMIKPTALLLPALFFFPHAYAPAADLSENKAAGFALFKNKSPDTESVKLKPKFPVRIDTQDSEIKDMVEEHLPLITQQQEEVLDKEQTGFLAEEAPDNVKTMLRSKGYFSSKVSLTEKGGAYTVHITPGPRTKITNVGVTILGDILSDGNLAEYYRNALENWQQPVGSDFDQDSWENSKTSVLGAVTRKAYPLAKLGNTRAAVNPDTATADLNVVVDSGRPIAFGDFEITGTQRYPEQIVSGLARFQPGTPYDLDLLLDFQQALEQNGHYSGASVQADFDRLQGDRVPVKVSVTEVKRHKLETGIRLDSEYGLGGKIAYDYYNLFNKGYIGSVVWDMDKYETTLAAGISQPRNYRGNYWTSNVSYNRSTTQNLEKRAFSGGIWYVRDRAGIDARLGAEFLAEGRKIPGADVDLGNSHATMLTASWKRQLLNNVLHPENGHYLDGKIGTTLGTFLSSTALIRTSARAGYFFTPENKKLGTFIIRGQAGYTVARDNADVPSGLMFRSGGASSVRGYELDSIGLAGPNGSVLPERALLTGSLEYQLPFTRTLSGAVFHDMGDAAANFKRMELKHGSGLGVRWFSPLAPFSFDIAYGHSDKKIRWHISLGTRF

SEQ ID NO: 19823 - protein, 280 aa, Neisseria meningitidis
MQNHVISLASTKERRAHIADTFGARGIPFQFFDALMPSERLEQAMAELVPGLSAHPYLSEVEKACFMSHAVLWKQALDEGLPYVAVFEDDVLLGKDAEKFLAEDTWLEERFDKDSAFIVRLETMFAKVIVRPDKVLNYENRSFPLLESEHWGTAGYIISREAMRFFLERFAVLPAEWIKAVDWMMFTYFFDKEGMPVYQVNPALCTQELHYAKFLSKNSMLGSDLEKDREQGRRHRRSLKVMFDLKRALGKFGREKKKRMERQRQAELEKAYGRRVISFK

SEQ ID NO: 19824 - protein, 145 aa, Neisseria meningitidis; identical to SEQ ID NO: 7320

SEQ ID NO: 19825 - protein, 92 aa, Neisseria meningitidis
MSRNLLVRWLAVCLIPLATLAVFAANPPEDKLQHLINGIILACEATFLFKFVLFDTIKHHLKQEFDLKRQTMLLFIPIILLIVYLFHYFGAF

SEQ ID NO: 19826 - protein, 58 aa, Neisseria meningitidis; identical to SEQ ID NO: 2174

SEQ ID NO: 19827 - protein, 887 aa, Neisseria meningitidis
MSTQLHDVDPIETQEWLDALSSVLEYEGGERAQYLLENLVKYCRDKGVRMPHGTTTPYLNTVSVENEKGIPGDQNIEHRIRAFVRWNAAAIVLRAGKKDLELGGHIASFQSAATMYEVGFNHFWKAKGEGEEGDLVFFQGHVAPGIYARAFVEGRLTEDQLNNFRQEVDGHGLPSYPHPHLLPDFWQFPTVSMGLGPIMAIYQARFLKYLESRGLAKTKGRKVWCFCGDGEMDEPESQGAIALAAREGLDNLIFVINCNLQRLDGPVRGNGKIIQELEGNFAGAGWNVVKVIWGRRWDRLLAKDKDGILRQRMEECLDGDYQTYKSKDGAYVREHFFNTPELKALVADMTDEQLWALNRGGHDPQKVYNAYDRAANHADGKPTVILAKTIKGYGMGASGEGQNVAHQAKKMDKASLKQFRDRFDIPVTDEQIESGDLPYLTFAPDTEEYKYLHARRDALGGYLPQRKPTQEVLEVPELSAFDAQLKSSGEREFSTTMAFVRILSTLLKDKKIGKRVVPIVPDESRTFGMEGMFRQYGIWNPKGQQYTPQDKDQLMFYKESVDGQILQEGINEPGAMADWIAAATSYANSNFAMIPFYIYYSMFGFQRIGDLAWAAGDMHARGFLLGGTAGRTTLNGEGLQHEDGHSHIQADLIPNCVSYDPTFQYEVAVIVQDGLRRMYANNEDVFYYITLMNENYTHPDMPEGAEQDILKGMYLLKAGGKGDKKVQLMGSGTILQEVIAGAELLKADFGVEADIWSCPSFNLLHRDAVEVERFNRLHPLEAEKVPFVTSKLQGHDGPVIAATDYIRSYADRIRAYIPNDYHVLGTDGFGRSDSRANLRRFFEVDRYNVAVAALAALAEQGKVSKETVQQAIEKYGIKADSAPSWKR

SEQ ID NO: 19828 - protein, 140 aa, Neisseria meningitidis; identical to SEQ ID NO: 662

SEQ ID NO: 19829 - protein, 351 aa, Neisseria meningitidis
MKTYAPALYTAALLTACSPAADSNHPSGQNAPANTESDGKNITLLNASYDVARDFYKEYNPLFIKTYQSEHPGTSVSIQQSHGGSSKQALSVANGLQADVVTMNQSSDIDLLEKKGLVEKGWQQALPDHAAPYTSTMVFLVRKNNPKQIRDWNDLAKDGVNIVIANPKTSGNGRYAFLGAYGYGLKATNGNEQEAQKLVASILKNTPVFENGGRAATTTFTQRNIGDVLITFENEANYVSKKLTQGQFEIVYPSYTISAESPVAVVNSVVAKKGTQKTARAYLEYLWSEPAQELAASLYLRPRNPEVLARHKADFPDLDTFSPEKKFGGWDNIMKTYFADGGIFDRLTAQK

SEQ ID NO: 19830 - protein, 1306 aa, Neisseria meningitidis
LNYIIAFSNSPETEFSDGIQIKTAKHGHTMTTTTAPQRIREIPYNYTSYTDREIVIRLLGDEAWQILQDLRGQRKTGRSARMLFEVLGDIWVVVRNPYLVDDLLEHPKRRAALVREMRHRLNEIRKRRDDNRQVDVLVAAAEKAVERFDSSFDETSQKRHQILERLSKITKPHNIMFDGLARVTHVTDATDWRVEYPFVVVNPDTEAEVAPLVRALIELDLVIIPRGGGTGYTGGAIPLDAMSAVINTEKLDKHRGVEFVELAGLDGRHPIIRCGAGVVTRRVEETAHQAGLVFAVDPTSADASCVGGNVAMNAGGKKAVLWGTALDNLAYWQMVNPQGEWLRIERVRHNFGKIHDEETAIFDVHTLDSDGLNVVKTERLEIPGHKFRKVGLGKDVTDKFLSGLPGVQKEGTDGIITSVAFVLHKMPKYTRTVCMEFFGTVATATPSIVEIRDFLLAHESVRLAGLEHLDWRYVRAVGYATKAAGKGRPKMVLLADVVSDDEAAVEAAAEHICELARARDGEGFIAISPEARKTFWLDRSRTAAIAKHTNAFKINEDVVIPLERLGEYSDGIERINIELSIQNKLKLCAALEQYLSGKLPIDKMGTDLPTAELLGERGKHALAHVSAVKARWDWLLANLDTPLADYKARYGAAVHAAPEAKDNESCFIAFRDFRLRVSVKADVMKPLSEIFSGKTDTKIIEGLGKIHAKTVRGRVFVALHMHAGDGNVHTNIPVNSDDAEMLQTAYRSVERIMKIARSLNGVISGEHGIGITKLEFLSDEEMQPFWDYKNQVDPKHTFNRHKLMKGSDLRNAYTPSFELLGAESLIMEKSDLGTIADSVKDCLRCGKCKPVCSTHVPRANLLYSPRNKILGVGLLTEAFLYEEQTRRGVSVKHFEELADIGDHCTVCHRCVKPCPVNIDFGDVTVAVRNYLADSGHKRFAPAASMGMAFLNATGPKTIKTLRAAMIQTGFPAQNFAYKIGKLLPVGTKKQKAEPKATVGKAPIKEQIIHFINRPLPKNVPAKTPRSLLGIEDDKSIPIIRNPASPEDAEAVFYFPGCGSERLFSQIGLAVQAMLWHVGVQTVLPPGYMCCGYPQDAGGNKAKAEEMSTNNRVAFRRMANTLNYLDIKTVVVSCGTCYDQLEKYRFEEIFPGCRIIDIHEYLLEKGVKLNGVKGQQYLYHDPCHTPIKTMNATQMASSLMGQKVVLSDRCCGESGMFAVKRPDIATQVKFRKQEEIEKNLKELPQGEPVKMLTSCPACLQGLSRYADDNNMPTDYIVIEMAKHILGENWLDEFVKKANNGGVEKVLL

SEQ ID NO: 19831 - protein, 478 aa, Neisseria meningitidis
MPLLSVEFALFFLAFLPIYWGLAKYPSVQNLLLLAAGMGWLYHIGPVFAAIVVLYSSCVYLLGELLRSDRENTRRFWLGCGIAVSLTVLGFFKYFDFFRPLIAQYAGQGGAIDILMPLGLSYYTFQSIAYLVYCFRAPHAARFEWHELLLHLSFFPTVTSGPIIRAAAFKSADGEQAGALAQIRTHQPRSPVRPALAVSLILLGIAKKWWLAGMLAENWVSPVFENPAQFDGWGVLAGVYGYTFQLFLDFSGYSDLVIGMAMLLGFRLPKNFSAPLRAANIRAFWDKWHISLSTWIRDYIYIPLGGSKKGFLRTQFNLMAAMVLSGIWHGYGWNFLIWGALHGTALVLLNTGDRYFGRNALCRLKYLAPLSWLITFHFVCLTFVVFNTANPDDAGAVFNALFANANGWNAPQQADMLLLASFASVMLLYPYLQRAFDGAVKGLEKIPMWLWFIPVSAVLLLIIVLAPSGIPGFIYANF

SEQ ID NO: 19832 - protein, 346 aa, Neisseria meningitidis
MQPIRYRTDLTPYNTFGLRAQARAFIALEHADGLRDIVRLPEFDRDTVLWLGGGSNIVLMQDYAGLVVHMENKGIREIARSDGMVLIEAQAGEIWHDFVLHTVALGLSGLENLSLIPGTVGASPVQNIGAYGVEAKDVIHSVRCFDLDTETFVTLSNADCRFAYRESLFKQEGKGRYVIVSVVFALKTHFVPNLGYGDLAAKVAELSAGREATAKDVSDAVCAIRNSKLPNPNVLGNVGSFFKNPVVGAGKAAALLQQHPDMPHYPQPDGSVKLAAGWLIDQCRLKGFQIGGAAVHDRQALVLVNKNNASANDVRQLAQHIKFTVFARFQVELHAEPNWLPASFSL

SEQ ID NO: 19833 - protein, 231 aa, Neisseria meningitidis
MKAMILAAGRGERMRPLTDTTPKPLLDVAGKPLIGWHLCRLKQAGFTEIVINHAWLGRQIEDALGDGSAYGVNIAYSPEPAGGLETAGGIARALPLLGDAPFLVVNGDVLTDIDFTAAFQAASSLPEHISAHLWLVENPPHHPDGDFSLLPDGSVRPEVNGGNGLTFSGVGIYRPEMFDGIEAGSVAKLAPVLRNEMRQNRVSGQKHTGLWLDVGTVCRLKEAQALAGAWK

SEQ ID NO: 19834 - protein, 671 aa, Neisseria meningitidis
MMKLNPQQLEAVRYLGGPLLVLAGAGSGKTGVITQKIKHLIVNVGYLPHTVAAITFTNKAAAEMQERVAKMLPKPQTRGLTICTFHSLGMKILREEANHIGYKKNFSILDSTDSAKIIGELLGGTGKEAVFKAQHQISLWKNDLKTPEDVVQTASNAWEQQTARVYASYQETLQSYQAVDFDDLIRLPAVLLQQNSEVRNKWQRRLRYLLVDECQDTNTCQFTLMKLLTGAEGMFTAVGDDDQSIYAWRGANMENLRKMQENYPQMKVIKLEQNYRSTARILKIANKVIENNPKLFTKKLWSQLGEGDPVKVVACQNEQHEADWVVSQIVKQKLIGGDKTQYADFAVLYRGKHQARIFEEALRGARIPYRLSGGQSFFDKAEIKDVLSYVRLLANPNDDPAFLRAVTTPKRGIGDVTLGKLNTYAHEHECSLYEAAQNEEALATLNNTNRQHLQAFMDMFGSYRAKAETGEAGEFINNLLKEIDYENHLLASEESKAGEIKWRNVGDLVSWFARKGGEDGKNVIELAQTVALMTLLEGKDEEETDAVSLSTLHAAKGLEYPYVFLVGCEEGVLPHNDSIEEGNVEEERRLMYVGITRAKRQLTLTHCVKRKKQGIWQFPEPSRFIDEMPQEDLKILGRKGGEPIVSKEEGRRNLADIIGRLDSMKKGGPED

SEQ ID NO: 19835 - protein, 530 aa, Neisseria meningitidis; identical to SEQ ID NO: 6645

SEQ ID NO: 19836 - protein, 794 aa, Neisseria meningitidis
MADNYVIWFENLRMTDVERVGGKNASLGEMISQLTEKGVRVPGGFATTAEAYRAFLAHNGLSERISAALAKLDVEDVAELARVGKEIRQWILDTPFPEQLDAEIEAAWNKMVADAGGADISVAVRSSATAEDLPDASFAGQQETFLNINGLENVKEAMHHVFASLYNDRAISYRVHKGFEHDIVALSAGVQRMVRSDSGASGVMFTLDTESGYDQVVFVTSSYGLGENVVQGAVNPDEFYVFKPTLKAGKPAILRKTMGSKHIKMIFTDKAEAGKSVTNVDVPEEDRNRFSITDEEITELAHYALTIEKHYGRPMDIEWGRDGLDGKLYILQARPETVKSQEEGSRNLRRFAINGDKTVLCEGRAIGQKVGQGKVRLIKDASEMDSVEAGDVLVTDMTDPDWEPVMKRASAIVTNRGGRTCHAAIIARELGIPAVVGCGNATELLENGQEVTVSCAEGDTGFIYAGLLDVQITDVALDNMPKAPVKVMMNVGNPELAFSFANLPSEGIGLARMEFIINRQIGIHPKALLEFDKQDDELKAEITRRIAGYASPVDFYVDKIAEGVATLAASVYPRKTIVRMSDFKSNEYANLVGGNVYEPHEENPMLGFRGAARYVADNFKDCFALECKALKRVRDEMGLTNVEIMIPFVRTLGEAEAVVKALKENGLERGKNGLRLIMMCELPSNAVLAEQFLQYFDGFSIGSNDMTQLTLGLDRDSGLVSESFDERNPAVKVMLHLAISACRKQNKYVGICGQGPSDHPDFAKWLVEEGIESVSLNPDTVIETWLYLANELNK

SEQ ID NO: 19837 - protein, 356 aa, Neisseria meningitidis
MTKHIAILRGDGIGPEIVAETVRVLDKLIAQGLDAGYEYAPLGGEAYDEYGHPYPEFTQNLCRKADAVLLGAVGSPQYDNLDRPLRPERGLLAIRKDLNLFANLRPAVLYPELANASTLKPEIVAGLDILIVRELTGDIYFGEPRGIRVLENGEREGYNTMKYSESEIRRIAHVAFQSAQKRSKKVCSVGKANVLETTELWREIFEEIGKEYPDVELSHMYVDNAAMQLVRAPKQFDVIATGNIFGDILSDEASMLTGSIGMLPSASLDENGKGLYEPSHGSAPDIAGQNKANPLATILSLAMLLRYSLNDEARAQQVENAVQKVLQQGLRTSDIYEEGTKLVSCSEMGDAVLAAL

SEQ ID NO: 19838 - protein, 437 aa, Neisseria meningitidis; identical to SEQ ID NO: 1149

SEQ ID NO: 19839 - protein, 465 aa, Neisseria meningitidis
MSQGKIVQIIGAVVDVEFPRDMIPRVYDALKLDENGLTLEVQQLLGDGVVRTIAMGSSDGLKRGMTVNNTGAPITVPVGKGTLGRIVDVLGTPVDEAGPIDTDKSCAIHQAAPKFDELSSTTELLETGIKVIDLLCPFAKGGKVGLFGGAGVGKTVNMMELINNIAKAHSGLSVFAGVGERTREGNDFYHEMKDSNVLDKVAMVYGQMNEPPGNRLRVALTGLTMAEYFRDEKDENGKGRDVLFFVDNIYRYTLAGTEVSALLGRMPSAVGYQPTLAEEMGRLQERITSTQTGSITSIQAVYVPADDLTDPSPATTFAHLDATVVLSRDIASLGIYPAVDPLDSTSRQLDPMVLGQEHYDVARGVQSTLQKYKELRDIIAILGMDELSDEDKLTVMRARKIQRFLSQPFHVAEVFTGSPGKYVALRDTIAGFKAILNGEYDHLPEQAFYMVGSIEEAVEKAKTLN

SEQ ID NO: 19840 - protein, 500 aa, Neisseria meningitidis; identical to SEQ ID NO: 11856

SEQ ID NO: 19841 - protein, 257 aa, Neisseria meningitidis; identical to SEQ ID NO: 4650

SEQ ID NO: 19842 - protein, 107 aa, Neisseria meningitidis
MIIDEKSTSDVLKQYQELGFDLTKSMIIEFFIEGSQKNLQSIESQLISYRQDFQISIEQDEFGEMWTCYCSVNIVPSLENILAIETTLFDIAQKNDCNYEGFGSYGN

SEQ ID NO: 19843 - protein, 383 aa, Neisseria meningitidis; identical to SEQ ID NO: 8491

SEQ ID NO: 19844 - protein, 267 aa, Neisseria meningitidis
  misc_feature 2, 3: 'Xaa' is any amino acid
VXXAVFRRYTDLIEPLSLDEAYLDVTRNFKNIPYASEVAKEIRAAIFAETGLTASAGIAPNKFLAKIASDWRKPNGQFVLPPHKVMAFLETLPLGKIPGVGKVTLKKMQSLGMRTAGDLRRFERGELLNHFGRYGYRLYDLVRGTDERPVKAERERLQISTEITLPEDLPLEQAAGHLPHLAEDLWRQITRKNVEAQSVTLKLKTYDFRIITRTLTYSSVLPDCAALLQAAQMLMARVPPQTEDAFRLIGIGVGHLVPKNQQQDLWA

SEQ ID NO: 19845 - protein, 421 aa, Neisseria meningitidis; identical to SEQ ID NO: 3036

SEQ ID NO: 19846 - protein, 630 aa, Neisseria meningitidis
MRFSRFEPKGRLKQQIRFQTTFLSTSHHGNQTKAAHRHIHVGSTAGTTTIRSGGDTTLKGAQLIGKGIQADTRNLHIESVQDTETYQSKQQNASAQVTVGYGFSASGDYSQSKIRADHASVTEQSGIYAGEDGYQIKVGNHTDLKGGIITSSQSAEDKGKNRFQTATLTASDIQNHSQYKGESFGLGASASISGKTLGQGAQNKPQNKHLTSVADKNSASSSVGYGSDSDSQSSITKSGINTRNIHITDEAGQLARTGRTAKETEARIYTGIDTETADQHTGRLKNSFDKDAVAKEINLQREVTKEFGRNAAQAVAAVADKLGNTQSYERYQEARTLLEAELQNTDSEAEKAAIRASLGQVNAYLAENQSRYDTWKEGGIGRSILHGAAGGLTTGSLGGILAGSGTSLAAPYLDKAAENLGPAGKAAVNALGGAAIGYATGGSGGAVVGANVDWNNRQLHPSEYKLAEQYADIVASRLNISKEEALGRIIRHMQRTVDYATAKADNFRTDDAIISILGANNLPKQDQHYTNPNYNKQYIQNYVRDFNLANKYNYFGKTPTQSRDYKVGVVTDIGKAALNSGIGIFESAANLATGEIDPNSWAYVHMGRIGYTHPEYGNAWIRISSATLVY

SEQ ID NO: 19847 - protein, 133 aa, Neisseria meningitidis
MRKSRLSQYKQNKLIELFVAGVTARTAAELVGVNKNTAAYYFHRLRLLIYQNSPHLEMFDGKVEADESYFAERQNHINGIGNFNRAKRHLRKFDGIPKAHFELYLKGYERRFNNSEIKVQISILKQLVKSSLS

SEQ ID NO: 19848 - protein, 248 aa, Neisseria meningitidis
MKSSTQAVLEHTAIPKHIAVIMDGNGRWAKKRFLPRIMGHKRGLDALENMVKHCAKLGVQYLTVFAFSTENWRRPEDEVSFLMGLFLQALQKQVRRLHENNMRLKILGSRERFSRQILKGIEEAEALTANNTGLTLSIAADYGGRWDILQAANKLIAEGVSKITEDTLAKHLMLGNAPEPDLFIRTGGETRISNFLLWQMAYAELYFTDILWPDFDETALDAAVASFQKRERRFGRTSEQLPIEQQRN

SEQ ID NO: 19849 - protein, 798 aa, Neisseria meningitidis
MIKKILTTCFGLVFGFCVFGVGLVAIAILVTYPKLPSLDSLQHYQPKMPLTIYSADGEVIGMYGEQRREFTKIGDFPEVLRNAVIAAEDKRFYRHWGVDVWGVARAAVGNVVSGSVQSGASTITQQVAKNFYLSSEKTFTRKFNEVLLAYKIEQSLSKDKILELYFNQIYLGQRAYGFASAAQIYFNKNVRDLTLAEAAMLAGLPKAPSAYNPIVNPERAKLRQKYILNNMLEEKMITVQQRDQALNEELHYERFVRKIDQSALYVAEMVRQELYEKYGEDAYTQGFKVYTTVRADHQKVATEALRKALRNFDRGSSYRGAENYIDLSKSEDVEETVSQYLSGLYTVDKMVPAVVLDVTKKKNVVIQLPGGRRVTLDRRALGFAARAVNNEKMGEDRIRRGAVIRVKNNGGRWAVVQEPLLQGALVSLDAKTGAVRALVGGYDFHSKTFNRAVQAMRQPGSTFKPFVYSAALSKGMTASTVVNDAPISLPGKGPNGSVWTPKNSDGRYSGYITLRQALTASKNMVSIRILMSIGVGYAQQYIRRFGFRSSELPASLSMALGTGETTPLKVAEAYSVFANGGYRVSSHVIDKIYDRDGRLRAQMQPLVAGQNAPQAIDPRNAYIMYKIMQDVVRVGTARGAAALGRTDIAGKTGTTNDNKDAWFVGFNPDVVTAVYIGFDKPKSMGRVGYGGTIAVPVWVDYMRFALKGKQGKGMKMPEGVVSSNGEYYMKERMVTDPGLTLDNSGIAPQPSRRAKEDDGARQKADGRRRMTKSAKICRKRRCFRVILVPNSSSWILCF

SEQ ID NO: 19850 - protein, 352 aa, Neisseria meningitidis; identical to SEQ ID NO: 15871

SEQ ID NO: 19851 - protein, 636 aa, Neisseria meningitidis
MNILSVENASFAIGHVALLDKTSFQLDSGEKVGLIGRNGAGKSSFLKILAGLQKLDDGQIIVQNNLKIVYVPQESFFDKDATVFDTVAEGLGKIRDLLRRYHRVGHELENGSGEALLKELNELQLEIEAKDGWKLDAAVKQTLGELGLPENEKIGNLSGGQKKRVALAQAWVQKPDVLLLDEPTNHLDIDAIIWLENLLKAFEGSLVVITHDRRFLDNIATRIVELDRGILRSYPGSFSKYSEKKAQELAVEAEHNRLFDKFHAQEEAWIRKGIEARRTRNEGRVRRLEELRRQRAERRNVQGQVNFKLDSGEKSGKIIAELEHASFAYGDKVIMDKFSAILQRGDKIGLIGPNGIGKTTFLKLILGELQPTYGRIRIGSKQEVAYFDQFRSALNENDTVFYTLGQGNDYVEVGGKKKHVMSYLEDFLFPPARAQSPVSSLSGGERNRLLLAKLFTRPANILVLDEPTNDLDIDTQELLEDLLRDYQGTVFLVSHDRMFLDNVITQSLVFEGNGRLKEYIGGYQDYIDAKSREAKIQTESAPKTADAEPVKEKPKANRTVKLSYKEQRELDALPDEIAALEAEQAEINAQLSDPEIFKDYEKAGALQSRAEEIEMLLLEKLERWELLETKQNGNAV

SEQ ID NO: 19852 - protein, 742 aa, Neisseria meningitidis; identical to SEQ ID NO: 1054

SEQ ID NO: 19853 - protein, 92 aa, Neisseria meningitidis
  misc_feature 86, 87: 'Xaa' is any amino acid
LAEGQKSAVTEYYLNHGEWPGNNSDAGVASSTDIKGKYVQSVEVKNGVVTATMASSNVNNEIKGKKLSLWAKRQDGSVKWFCGQPXXTHLIN

SEQ ID NO: 19854 - protein, 334 aa, Neisseria meningitidis
MQRQTELKNWLQTIYPERDFDLSFAAADADFRRYFRATFSDGSSVVCMDAPPDKMSVAPYLKVQKLFDMVNVPQVLHADTDLGFVVLNDLGNTTFLTAMLQEQGETAHKALLLEAIGELVELQKASREGVLPEYDRETMLREINLFPEWFVAKELGRELTFKQRQLWQQTVDTLLPPLLAQPKVYVHRDFIVRNLMLTRGRPGVLDFQDALYGPISYDLVSLLRDAFIEWEEEFVLDLVIRYWEKARAAGLPVPEAFDEFYRWFEWMGVQRHLKVAGIFARLYYRDGKDKYRPEIPRFLNYLRRVSRRYAELAPLYALLVELVGDEELETGFTF

SEQ ID NO: 19855 - protein, 165 aa, Neisseria meningitidis
MTALTLPEDILQQEPSVLLYTLVSAYLEHTAQTGDESLSCLSDDQHTLTAFCYLDSQVEEGGFVQLIASGYGEYIFRNPLADSLRRWKIKAVPKVLDKAKALYEQHGETIETLADEGRDIPSLRKQFPDFEEWDGAYYEAAEQDLPLLAEHIRSNWETFAHIGQA

SEQ ID NO: 19856 - protein, 333 aa, Neisseria meningitidis; identical to SEQ ID NO: 17218

SEQ ID NO: 19857 - protein, 979 aa, Neisseria meningitidis
MSGFNYEKNQPHQMRAVSAVLGVFDGATPKYRAADENPELLFAAKQYADNILKVQSQNGIDGRFPDRSDDQNILDISMETGTGKTYTYTQTMFELHRWLGVFKFIVVVPTLSIKAGTRQFLQSKALAEHFEQDFGGDYEGVRLKTYVVESAKKNKGKKSNAPITIEQFAKAENKKEIHVLLINAGMVNSSSMNDTGDKALKDLFDNPVDALAAVRPFVIVDEPHKFPTRESAKTWGNIKRLKPQYILRYGATFNDEYYNLLYRLTAVDAFNDGLVKGVRVFQEEMQGGMDAAVKLVSSGGKEAKFELNEKDKKQTFKLAKGEDLAKIHPAVSDLKIDKMNKTVVVLSNGLELKTGAVINPYSYSQTVQDAMMQRAVAEHFKLERALLAERAPQPKIKPLTLFFIDDIAGYRSGNELSGSLKDKFESWIHAEAARRLKTESDPFYRDYLQKTLDDVSACHGGYFSKDNTDSDDRIEQEINEILHDKEKLLSLDNPRRFIFSKWTLREGWDNPNVFQICKLRSSGSTTSKLQEVGRGLRLPVNELMARVRDVPYKLNYFVDSSEKDFVKQLVGEINDNSFQEEISKKFTEELKQKILQKYPDIKPLGLLNKLFSDGIIDDNENFTEDGYDKLKAAYPEAFPKGLDKGKVSNAKDEGKDTIIMREGKYEELKALWELIHHKAVLQYKIKDEAEFVDLFTAYLRENAAKFPQAGIRTAVNEAYINNGLMLSRRIDSFEDEDFIRFNTMTYRELLEKLAQTAKIRMQTLHQAFYRVRNELNIGDFLNMQTIAQIKNGFNRFLLHHSFHKFELDYQLVGSKIHPTKFTDKDGKPRAVKKADLGRFEDTEHRPAAGYLFDEIFYDSDIEHENVANNQIEGVTVFTKIPRNSIKIPVAGGGTYSPDFAYIVKTQSGEILNFVIEAKGTDGAEDLRKSEERKIKHAEKLFAEISKEIKVVFKTQFDGERIAELIGQNMPAGGHSENGH

SEQ ID NO: 19858 - protein, 127 aa, Neisseria meningitidis; identical to SEQ ID NO: 2146

SEQ ID NO: 19859 - protein, 210 aa, Neisseria meningitidis
MTVWVGLTGGIGSGKSAAAQCFADLGVPRIDADAAAHSLTASDGIALPEIRRLFGDTVFDTQGLLRRDILRKEVFASPSQKALLESVMLPLIFSEIKKQQETFTDAAYGIVEIPLLTEKRQFISLIRRVLTISAPLEKRIGRVMARSGLTRGEVADIISHQASESERLLLADDVLLNDGSLKNLREKTMRLHAFYSGIFASKPTQGKHNG

SEQ ID NO: 19860 - protein, 347 aa, Neisseria meningitidis
MNKKYPKINYIGNKEKIASWICDQPPSDVDTVADVFSGGCSFAYEAKKRGYRVITNDILAINYQIALALIENNHETLNDDDVAMIFSGSPHAGFMSQRYAEKFYFHDECQQLDLYRKNIGKLDNQYKRALAFTLMRRAMIRKMPYTEDMRPGDTANPYGASKAMVERMLTDIQKADPRWSVILLRYFNPIGAHESGLIGEQPNGIPNNLLPYICQVASGRLPQLSVFGGDYPTPDGTGMRDYIHVMDLAEGHIAAMKAKGGVAGVHLFNLGSGRAYSVLEIIRAFEAASGLNIPYQIQPRRAGDLACSFADPSHTKQQTGWETKRGLKQMMEDSWRWVSRNPNGYGD

SEQ ID NO: 19861 - protein, 71 aa, Neisseria meningitidis
VFKLGVYACLGLFAGWVLLLIVQLWFSFLKAELFFKITLTMAGLFVIILAALLVFGQYFSEKKMKDDGFIN

SEQ ID NO: 19862 - protein, 96 aa, Neisseria meningitidis; identical to SEQ ID NO: 6081

SEQ ID NO: 19863 - protein, 307 aa, Neisseria meningitidis
MNTGKPQKRAVNGVLLLDKPEGLSSNTALQKARRLFHAEKAGHTGVLDPLATGLLPVCFGEATKFAQYLLDADKAYTATLKLGEASSTGDAEGEIIATARADISLAEFQTACQALTGNIRQVPPMFSALKHEGKPLYEYARKGIVIERKARDITVYAIDIAEFDAPKAVIDVRCSKGTYIRTLSEDIAKHIGTFAHLTALRRTETAGFTIAQSHTLEALANLNETERDSLLLPCDVLVSHFPQTVLNDYAVHMLHCGQRPRFEEDLPSDTPVRVYTENGRFVGLAEYQKEICRLKALRLMNTAASAA

SEQ ID NO: 19864 - protein, 144 aa, Neisseria meningitidis; identical to SEQ ID NO: 1668

SEQ ID NO: 19865 - protein, 291 aa, Neisseria meningitidis
MPTVRFTESVSKHDLDALFEWAKASYGAESCWKTLYLNRLPLGNLSPEWAERVKKDWEAGCSESSDGIFLNADGWPDMGRRLQHLARTWNKAGLLHGWRNECFDLTDGGGNILFSLERAAFRPFGLLSRAVHLNGLTESDGRWHFWIGRRSPHKAVDPDKLDNIAAGGVSSGELPSEAVCRESSEEAGLDQTLFPLIRPVSQLHSLRPVSRGVHNEILYVFDAVLPETFLPENQDGEVTCFEKMDIGSLVAAMLSENMMHDAQLVTLDAFCRYGLIDVAHPLSEWLDGIRL

SEQ ID NO: 19866 - protein, 85 aa, Neisseria meningitidis
MVLLLIVNKYWKVNDMKNEIQKIMDKYDPWHEDDFESYENIARDVSLMTDKTFIEHYLLEVYSEENGHFDQENVHAMIEEIKNAI

SEQ ID NO: 19867 - protein, 94 aa, Neisseria meningitidis; identical to SEQ ID NO: 2694

SEQ ID NO: 19868 - protein, 107 aa, Neisseria meningitidis; identical to SEQ ID NO: 1793

SEQ ID NO: 19869 - protein, 112 aa, Neisseria meningitidis; identical to SEQ ID NO: 3481

SEQ ID NO: 19870 - protein, 129 aa, Neisseria meningitidis
MNPHEKLLTTDNPILRQRAKAMRQEMSGAEAKLWQHLRAGRLNGYKFRRQQPMGNYIVDFMCVTPKLIVEADGGQHAEQAVYDHARTAYLNSLGFTVLRFWNHEILQQTNDVLTEILLVLQELEKQAAR

SEQ ID NO: 19871 - protein, 138 aa, Neisseria meningitidis; identical to SEQ ID NO: 489

SEQ ID NO: 19872 - protein, 133 aa, Neisseria meningitidis; identical to SEQ ID NO: 2156

SEQ ID NO: 19873 - protein, 423 aa, Neisseria meningitidis
MFQWLYDVLWLLAPIWIRRYLDKRSGSAPAYRAHRDERFGKPYPNPVTGAVWIHAVSVGETRAAQPLIRELRQRFPDAPLLMTQMTPTGRETAQVLFPDAQCRYLPYDKKTWVRQFLREHRPMFGILMETEIWPNLMTECRKSGVPLFLANARLSEKSLNGYLKVRRLIRPAAASLTGCLAQTEADAARLAKLGAASVQVCGNTKYDLMPSEQMKTLAGQFEKRIGGRPVAVCGSTRVYRGEDEAEKLLAAWQQYRGDALLVVVPRHPEHFQTVFETAKRFGFKVQRRSDGLPVEPDTQVWIGDSMGELYAYYLCADVAFVGGSLVDSGCQNIIEPLSCGVPTIFGFSTYNFSEACRHALASGAAVRVESADAWREAVEKTLSSEGGGMQMQAHVDGFIAQHRGAGARIAEAVREAVCGHRGR

SEQ ID NO: 19874 - protein, 685 aa, Neisseria meningitidis
MTRKILVTSALPYANGSIHLGHMVEHIQTDVWVRFQKLRGNECYYCCADDTHGTPVMLAAQKQGIAPEDMIAKVREEHLADFTGFNIGYDNYYSTHSPENKQFSQDIYRALKANGKIESRVIEQLFDPEKQMFLPDRFVKGECPKCHAQDQYGDNCEVCGTTYSPTELINPYSAVSGAKPELRESEHFFFKLGECADFLKAWTSGNNPHDGKPHLQPEALNKMKEWLGEGEETTLSDWDISRDAPYFGFEIPDAPGKYFYVWLDAPVGYMASFKNLCDRIGIDFDEYFKAGSQTEMYHFIGKDILYFHALFWPAMLHFSGHRAPTGVYAHGFLTVDGQKMSKSRGTFITAKSYLEQGLNPEWMRYYIAAKLNSKIEDIDLNLQDFISRVNSDLVGKYVNIAARASGFIAKRFEGKLKDVSDSALLAKLTAQSEAIAECYENREYARALRDIMALADIVNEYVDANKPWELAKQEGQDERLHEVCSELINAFTMLTAYLAPVLPQTATNAARFLNLDAITWTNTRVTLGKHAINKYKHLMQRVEQKQVDDLIEANKQSIAAAAAPAAEESKYEKVAEQASFDDFMKIDMRVAKVLNCEAVEGSTKLLKFDLDFGFEKRIIFSGIAASYPNPAELNGRMVIAVANFAPRKMAKFGVSEGMILSAATAEGKLKLLDVDAGAQPGDKVG

SEQ ID NO: 19875 - protein, 174 aa, Neisseria meningitidis
MEMKQMLLAVGVAAVLAGCGKDAGGYEGYWREKSDKKEGMIAVKKEKGNYFLNKINVVTGKEESMLLSEKDGELSINTGIGEIPIKLSDDGKELYVERRQYVKTDAAMKDKIIAHQKKCGQTAQAYLDARNALPSNQTYQQRQAAIEQLKRRFEAEFDELEKEIKCNGKLTLLF

SEQ ID NO: 19876 - protein, 105 aa, Neisseria meningitidis; identical to SEQ ID NO: 3792

SEQ ID NO: 19877 - protein, 430 aa, Neisseria meningitidis; identical to SEQ ID NO: 2797

SEQ ID NO: 19878 - protein, 394 aa, Neisseria meningitidis
MSLHSDILVVGAGPAGLSFAAELAGSGLKVTLIERSPLTVLQNPPYDGREIALTHFSREIMQRLGMWDKIPENEIYPLRDAKVLNGRSDYQLHFPQPTEARGEPADCLGYLISNHNIRRAAYEVVSQLDNVSILTDTVVKEVKTSDNEAQVILENGKILTARLLLAADSRFSQTRRQLGISSDMHDYSRTMFVCRMKHTLSNQHTAYECFHYGRTIALLPLEEHLTNTVITVDTDKINSVQNLSPEELAASVKEQLKGRLGDMELVSSIHHYPLVGMIAKRFYGKRSALIGDAAVGMHPVTAHGFNLGLSSADILAKLILEAEQRGQDIGAASLLEKYSSKHMLHAHPLYHGTNMMLKLFTNETAPAKLLRGLVLRAGNNFPPLKKLITKQLTG

SEQ ID NO: 19879 - protein, 326 aa, Neisseria meningitidis
MAMAENGKYLDWAREVLHTEAEGLREIAADLDENFALAADALLHCKGRVVITGMGKSGHIGRKMAATMASTGTPAFFVHPAEAAHGDLGMIVDNDVVVAISNSGESDEIAAIIPALKRKDITLVCITARPDSTMARHADIHITASVSKEACPLGLAPTTSTTAVMALGDALAVVLLRARAFTPDDFALSHPAGSLGKRLLLRVADIMHKGGGLPAVRLSTPLKEAIVSMSEKGLGMLAVTDGQGRLKGVFTDGDLRRLFQECDNFTGLSIDEVMHTHPKTISAERLATEALKVMQANHVNGLLVTDADGVLIGALNMHDLLAARIV

SEQ ID NO: 19880 - protein, 207 aa, Neisseria meningitidis; identical to SEQ ID NO: 2101

SEQ ID NO: 19881 - protein, 302 aa, Neisseria meningitidis; identical to SEQ ID NO: 1790

SEQ ID NO: 19882 - protein, 100 aa, Neisseria meningitidis; identical to SEQ ID NO: 1675

SEQ ID NO: 19883 - protein, 105 aa, Neisseria meningitidis; identical to SEQ ID NO: 1555

SEQ ID NO: 19884 - protein, 124 aa, Neisseria meningitidis; identical to SEQ ID NO: 3797

SEQ ID NO: 19885 - protein, 377 aa, Neisseria meningitidis; identical to SEQ ID NO: 2738

SEQ ID NO: 19886 - protein, 387 aa, Neisseria meningitidis; identical to SEQ ID NO: 9799

SEQ ID NO: 19887 - protein, 200 aa, Neisseria meningitidis
MMQKHKCLIDFILTVASQIAYADLPLSLEELLTDKGKFKLESSISYINTERNQSEFANPIYVQTSATKIATVMAMMITPVMAQNLDSQVFDSQNVKAIQLSQAEMKETQGEFVPIIAAAAFGGALGTWGYHGANLYNHGKLGTAQGAATAAGIGAATGVAATGLAAAAGGGLAGNLAWRPGIHALGFGANAANNAVNSRK

SEQ ID NO: 19888 - protein, 221 aa, Neisseria meningitidis; identical to SEQ ID NO: 3662

SEQ ID NO: 19889 - protein, 405 aa, Neisseria meningitidis
MQRRIITLLCAAGMAFSTQTLAANLEVRPNAPERYTVKQGDTLWGISGKYLYSPWQWSRLWDANRDQIHNPDLIYPDQVLVLRHVDGEPRLGLEQTDGIPVVKMSPDKEVSGYGIPAIDVNFYRIFMRHPQIVSRKETAAAPRLLSGPEGRLLYTKGTRVYTKGLKEPGRYLTYRINKNITDPDTGKFLGQEVAFSGIVRSLDYTDSALEQRSKQAGERLKDNEYHTRTHPLITPLRTPSIQPLVVETAISEIQQGDYLMKMPEDTDRFNMMPHEPSRPVQAKIVSVFEGTRIAGQFQTITIDKGEADGLDKGTVLSLYKRKKTMQVDLSNNFKSRDTVELISTPAEEVGLAMVYRTSEHLSSAIILENISDISVGDTAANPGRDLDNIPDQGRSRVKFGFNRSE

SEQ ID NO: 19890 - protein, 308 aa, Neisseria meningitidis; identical to SEQ ID NO: 9802

SEQ ID NO: 19891 - protein, 106 aa, Neisseria meningitidis
MGMNQQRLTQVILAPIVSEKSNVLAEKRNQMTFKVLANATKPEIKAAVELLFGVQVASVTTVTTKGKTKRFGRTLGRRSDVKKAYVSLAAGQELDLEAAAAAADKE

SEQ ID NO: 19892 - protein, 237 aa, Neisseria meningitidis; identical to SEQ ID NO: 5135

SEQ ID NO: 19893 - protein, 166 aa, Neisseria meningitidis; identical to SEQ ID NO: 987

SEQ ID NO: 19894 - protein, 394 aa, Neisseria meningitidis
MTPQVLTILGSTGSIGESTLDVVSRHPEKFRVFALAGHKQVEKLAVQCRTFRPEYAVVADAEHAARLEALLKGDGTATQVLHGAQALVDVASADEVSGVMCAIVGAVGLPSALAAAQKGKTIYLANKETLVVSGALFMETARANGAAVLPVDSEHNAIFQVLPRDYAGRLNEHGIASIILTASGGPFLTADLNTFDSITPAQAVKHPNWSMGRKISVDSATMMNKGLELIEAHWLFNCPPDKLEVVIHPQSVIHSMVRYRDGSVLAQLGNPDMRTPIAYCLGLPERIDSGVGDLDFDALSALTFQKPDFDRFPCLKLAYEAMNAGGAAPCVLNAANEAAVAAFLDGQIKFTDIAKTVAHCLSQDFSDGIGDIGGLLAQDARTRAQARAFIGTLR

SEQ ID NO: 19895 - protein, 375 aa, Neisseria meningitidis
MNTSQRNRLVSRWLNSYERYRYRRLIHAVRLGGAVLFATASARLLHLQHGEWIGMTVFVVLGMLQFQGAIYSKAVERMLGTVIGLGAGLGVLWLNQHYFHGNLLFYLTVGTASALAGWAAVGKNGYVPMLAGLTMCMLIGDNGSEWFDSGLMRAMNVLIGAAIAIAAAKLLPLKSTLMWRFMLADNLTDCSKMIAEISNGRRMTRERLEENMAKMRQINARMVKSRSHLAATSGESRISPAMMEAMQHAHRKIVNTTELLLTTAAKLQSPKLNGSEIRLLDRHFTLLQTDLQQTVALINGRHARRIRIDTAINPELEALAEHLHYQWQGFLWLSTNMRQEISALVILLQRTRRKWLNAHERQHLRQSLLETREHG

SEQ ID NO: 19896 - protein, 185 aa, Neisseria meningitidis
MINDIQKTAEGKMQRSVEVLKENLAKVRTGRAHTGLLDQVEVEYWGSMVPVSQVANVTLLDARTIGVKPFEGNMAAKVEKAIRDSNLGLNPAAVGDLIRVPMPMLTEERRKDLIKVVRGEAEEGRVSIRNVRRDANDHIKKLLKDKEISEDEARRGEEAVQKLTDKYITEADKLLTTKEEDLMAI

SEQ ID NO: 19897 - protein, 160 aa, Neisseria meningitidis; identical to SEQ ID NO: 3806

SEQ ID NO: 19898 - protein, 194 aa, Neisseria meningitidis; identical to SEQ ID NO: 15809

SEQ ID NO: 19899 - protein, 628 aa, Neisseria meningitidis
MIYPKTYDVIVVGGGHAGTEAALAAARMGAQTLLLTHNIETLGQMSCNPSIGGIGKGHLVRELDALGGAMALATDKSGIQFRRLNASKGAAVRATRAQADRILYKAAIREMLENQENLDLFQQAVEDVTLDGDRISGVITAMGVEFKARAVVLTAGTFLSGKIHIGLENYEGGRAGDPAAKSLGGRLRELNLPQGRLKTGTPPRIDGRTIDFSQLTEQPGDTPVPVMSVRGNAEMHPRQVSCWITHTNTQTHDIIRSGFDRSPMFTGKIEGVGPRYCPSIEDKINRFADKDSHQIFLEPEGLTTHEYYPNGISTSLPFDIQIALVRSMKGLENAHILRPGYAIEYDYFDPRNLKASLETKTIAGLFFAGQINGTTGYEEAAAQGLLAGANAVQYVREQDPLLLRREQAYLGVLVDDLITKGVNEPYRMFTSRAEYRLQLREDNADMRLTEDGYKIGLVGEAQWRMFNEKREAIEREIQRLKTTWYTPQKLAEDEQIRVFGQKLSREANLHDLLRRPNLDYAALMTLEGAMPSERLSAEVVEQVEIQVKYQGYIDRQNEEIDSRRDIETLKLPEDIDYSKVKGLSAEVQQKLNQHKPETVGQASRISGVTPAAVALLMVHLKRGFKDAK

SEQ ID NO: 19900 - protein, 919 aa, Neisseria meningitidis
MKRMLFNATQAEELRVAIVDGQNLLDLDIETLGKEQRKGNIYKGIITRIEPSLEACFVDYGTDRHGFLPFKEVSRSYFQDYEGGRARIQDVLKEGMEVIVQVEKDERGNKGAALTTFISLAGRYLVLMPNNPRGGGVSRRIEGEERQELKAAMAELDIPNGMSIIARTAGIGRSAEELEWDLNYLKQLWQAIEEAGKAHHDPYLLFMESSLLIRAIRDYFRPDIGEILVDNQEVYDQVAEFMSYVMPGNIGRLKLYEDHTPLFSRFQIEHQIESAFSRSVSLPSGGAIVIDHTEALVSIDVNSARATRGADIEDTAFKTNMEAAEEVARQMRLRDLGGLVVIDFIDMENPKHQRDVENVLRDALKKDRARVQMGKLSRFGLLELSRQRLKPALGESSHVACPRCAGTGVIRGIESTALHVLRIIQEEAMKDNTGEVRAQVPVDVATFLLNEKRAELFAMEERLDVNVVLIPNIHLENPHYEINRIRTDDVEEDGEPSYKRVAEPEEDESAKPFGGEKAKAARPEPAVKGVRHTSPAPTAAPEKKTSWWDSFKAWLKRIFGGSETQAAPAAETSEKRSTANRSGSRANNRRQNPRRSKREGSKVEVREVAGKTAGQEARADKAETRNNGNRRRNERGDRAAERANEAEIQSRNVQPAATVADAAPSETEMQTGKRRRNGSRSERSQTAPETAAVAETAVQTAENTPSEPHTAEDKGSKPKSERNRRERDSRDAKERRERNNQRDRRQNGKKRNIPSAAKIEQYLNIHDTADKVRSAAAHVFGETDANAPITVSIADPVAERDLPTASPAVSNGDAPVYDAAEKIRRATAAILPEGATPKAEAQEMPSETATFTAAAEQARETAQTGGLVLIETDPAALKAWAAQPEVQTGRGLRRSEQPKPSEVATVPAEEMIQVETRQG

SEQ ID NO: 19901 - protein, 658 aa, Neisseria meningitidis; identical to SEQ ID NO: 8975

SEQ ID NO: 19902 - protein, 461 aa, Neisseria meningitidis
MVSIFDIFKIGIGPSSSHTVGPMKAAAAFAAGLDAQAVRIVIDIYGSLALTGYGHGTFDALMLGLEGSLPHDIPLVGIPERLERIRTQHILRLNGQEIRFIPDRDLNILGNQVLPKHPNGLRFTAYASDGTVLNEQVYYSVGGGFVVTEEDFDRQAETEKAVPYPYTSCAELLARCRLNRLDISEVVLANEAALAGCGEAEIRRRAAAVAEVMEGCIKRGLGADGELPGGLNVRRRAPQLAAKLKVLRETEIVNTQLWPMVYAMAVNEENAAGGRVVTAPTNGAAGIIPAVLHYFRKFNPHATQERVENFLLTAGAIGILYKTNASISGADVGCQGEVGVACSMAAGAYAEVIGGTPKQVENAAEMAMEHHLGLTCDPVGGLVQIPCIERNGIAAEKALKLGTLALLEDGTDKKVSLDEVIRTMLQTGRDMKATYKETSLAGLAATLRKKAVPVSVRVVEC

SEQ ID NO: 19903 - protein, 290 aa, Neisseria meningitidis; identical to SEQ ID NO: 1540

SEQ ID NO: 19904 - protein, 283 aa, Neisseria meningitidis
MTLLGIKLKQTQQLNQRLQQSLRVLQMSGIELEREVENWLSDNPLLERKDTDEFSDAEFSHYTAPARQIGGDEGEDMLSNIAGEQDFKQYLHAQVCEHPLSDQESACVHILIDFLDEQGYLTDSIEDILDHTPLEWMLDEAMLKQALTALKKFDPAGVAAADLNESLILQIERSGECAAKPSALHIVRNALDSIDGNRSQTLARIKKRLPQTDSGTLEAALDLIASLNPFPAAGFASSTPTPYSDEALANLLAFRGMEVSRRTIAKYRESFEIPAAHKRKTAE

SEQ ID NO: 19905 - protein, 145 aa, Neisseria meningitidis
MGNFLYRGISCQQDEQNNGQLKPKGNKAEVAIRYDGKFKYDGKATHGPSVKNAVYAHQIETGLYDGCYISTTTDKEIAKKFATSSGIENGYIYVLNRDLFGQYSIFEYEVEHPENPNEKEVTIRAEDCGCIPEEVIIAKELIEIN

SEQ ID NO: 19906 - protein, 206 aa, Neisseria meningitidis; identical to SEQ ID NO: 1725

SEQ ID NO: 19907 - protein, 483 aa, Neisseria meningitidis; identical to SEQ ID NO: 5802

SEQ ID NO: 19908 - protein, 618 aa, Neisseria meningitidis
MLNKIFSWFESRIDPYPEAAPKTPEKGLWRFVWSSMAGVRKWIAALAALTAGIGIMEALVFQFMGKIVEWLGKYAPAELFAEKGWELAAMAAMMVFSVAWAFAASNVRLQTLQGVFPMRLRWNFHRLMLNQSLGFYQDEFAGRVSAKVMQTALALRDAVMTVADMVVYVSVYFITSGVILASLDSWLLLPFIGWIVGFASVMRLLIPKLGQTAAWQADARSLMTGRITDAYSNIATVKLFSHGAREAAYAKQSMEEFMVTVRAQMRLATLLHSCSFIVNTSLTLSTAALGIWLWHNGQVGVGAVATATAMALRVNGLSQYIMWESARLFENIGTVNDGMATLSKPHTILDKPRALPLNVPQGAIKFEHIDFCYEAGKPLLNGFNLTIRPGEKVGLIGRSGAGKSTIVNLLLRFYEPQSGTVSIDGQDISGVTQESLRAQIGLVTQDTSLLHRSVRDNIIYGRPDATDAEMVSAAERAEAAGFIPDLSDAKGRRGYDAHVGERGVKLSGGQRQRIAIARVMLKDAPILLLDEATSALDSEVEAAIQESLDKMMDGKTVIAIAHRLSTIAAMDRLVVLDKGRIIEEGTHAELLEKRGLYAKLWAHQSGGFLNEHVEWQHD

SEQ ID NO: 19909 - protein, 360 aa, Neisseria meningitidis
MMKIKALMIAAALLAAADVHAAPQKAKTASAKVAKVAKVAKVAKVAKVAKVAKVAKVAKVAKVAATAQKEAAPAQQQGGIRFSDGIAAVADNEVITRRRLAEAVAEAKANLPKEAQISESELSRQVLMQLVNQSLIVQAGKRRNIQASEAEIDAVVAKNSALKNLSPAQRRDFADNIIAEKVRQQAVMQNSRVSEAEIDAFLEQAQKQGITLPEGAPLRQYRAQHILIKADSENAAVGAESTIRKIYGEARSGTDFSSLARQYSQDASAGNGGDLGWFADGVMVPAFEEAVHALKPGQVGAPVRTQFGWHIIKLNEVRDAGTPQERIRNSVRQYIFQQKAEQATVNLLRDLHSGAYVDIR

SEQ ID NO: 19910 - protein, 792 aa, Neisseria meningitidis
VLALGFCFGTHCAAADAVAAEETDNPTAGGSVRSVSEPIQPTSLSLGSTCLFCSNESGSPERTEAAVRGSGEASIHEDYTRIVADKVEGQSQVQVRAEGNVVVERNRTTLNTDWADYDQSGDTVTAGDRFALQQDGTLIRGETLTYNLEQQTGEAHNVRMETEHGGRRLQSVSRTAEMLGEGHYKLTETQFNTCSAGDAGWYVKAASVEADREKGIGVAKHAAFVFGGVPIFYTPWADFPLDGNRKSGLLVPSLSAGSDGVSLSVPYYFNLAPNLDATFAPSVIGERGAVFDGQVRYLRPDYAGQSDLTWLPHDKKSGRNNRYQAKWQHRHDISDTLQAGVDFNQVSDSGYYRDFYGNKEIAGNVNLNRRVWLDYGGRAAGGSLNAGLSVLKYQTLANQSGYKDKPYALMPRLSADWRKNTGRAQIGVSAQFTRFSHDSRQDGSRLVVYPDIKWDFSNSWGYVRPKLGLHATYYSLNRFGSQEARRVSRTLPIVNIDSGATFERNTRMFGGGVLQTLELRLFYNYIPAKSQNDLPNFDSSESSFGYGQLFRENLYYGNDRINTANSLSAAVQSRILDGATGEERFRAGIGQKFYFKDDAVMLDGSVGKKPRNRSDWVAFASGSIGSRFILDSSIHYNQNDKRAENYAVGASYRPAQGKVLNARYKYGRNEKIYLKSDGSYFYDKLSQLDLSAQWPLTRNLSAVVRYNYGFEAKKPIEVLAGAEYKSSCGCWGAGVYAQRYVTGENTYKNAVFFSLQLKDLSSVGRNPADRMDVAVPGYIPAHSLSAGRNKRP

SEQ ID NO: 19911 - protein, 65 aa, Neisseria meningitidis; identical to SEQ ID NO: 3913

SEQ ID NO: 19912 - protein, 216 aa, Neisseria meningitidis; identical to SEQ ID NO: 7775

SEQ ID NO: 19913 - protein, 473 aa, Neisseria meningitidis
MTTIYNTLTRQKEPFAPIDPENVRMYVCGMTVYDYCHLGHARVMVVFDMIARWLRECGYPLTYVRNITDIDDKIIARAAENGETIGELTARFIQAMHEDADALGVLRPDIEPKATENIPQMIAMIETLIQNGKAYPAANGDVYYAVREFSAYGQLSGKSLDDLRAGERVEVDGFKRDPLDFVLWKAAKAGEPAWESPWGNGRPGWHIECSAMSENLFGDTFDIHGGGADLQFPHHENEIAQSVGATGHTCGHHHAQTHHGQSIASHVKYWLHNGFIRVDGEKMSKSLGNFFTIREVLKQYDPEVVRFFILRAHYRSPLNYSDAHLDDAKGALTRLYTTLKNTPAAEFDLSENANGYTRRFYAAMNDDFGTVEAVAVLFELAGEVNKTNDAQLAGCLKALGGIIGLLQRDPIEFLQGGAASDGLSNEEIEDLIARRKQARADKNWAESDRIRDLLNEHKIILEDNAGGTTWRRG

SEQ ID NO: 19914 - protein, 357 aa, Neisseria meningitidis
MSTFFQQTAQAMIAKHIDRFPLLKLDQVIDWQPIEQYLNRQKTRYLRDHRGRPAYPLLSMFKAVLLGQWHSLSDPELEHSLITRIDFNLFCRFDELSIPDYSTLCRYRNWLAQDDTLSELLKLINRQLTEKGLKIEKASAAVIDATIIQTAGSKQRQAIEVDEEGQISGQTTPSKDKDARWISTNSVTNNIPVPMRKAISRNCTLPPPMPMSANTCRRCWKDCPKVRPSMPTKAMTVRKTGNIWKSVSCTALCAKPAATVRCRKRKPNATGICRRPVIVDIITTRRRSRRQYKYGKARQRRTGLNLIHYMWSNRASVRCTANSAMRGQPISGCSKVRKATKRCVTCKRPTGVRPLPP

SEQ ID NO: 19915 - protein, 464 aa, Neisseria meningitidis
MTVKTRFAPSPTGYLHIGGVRTALFSWAFARHHKGEFLLRIEDTDLARSTAESVNIILDGMKWVGLDYDNADNVVYQTRRFERYKEVIAELLAKGDAYYCYCSKEELEAMREKAEKEGTATYDRRWRPEAGKTLPEIPAGVQPVVRFKTPLDGVTKWTDLVKGEISIPNEALDDLIIARADGTPTYNFCVVVDDYDMGVTHVIRGDDHVNNTPKQINILKAIGANLPEYGHLPMILNEQGKKISKRSGDTVAITDFGAMGILPEAMLNYLARLGWAHGDDEFFTMEQFIEWFDLKDVSPSPSRMDLKKLYWINGEHIKITPNEKLAELVKPRLALRDIHETEKPALEDVLAQVKDRAQDLNALADECLYFYKKQVPAEADVAKHWDDEAAARMLRFAERLEGLEDWNAEAIHDLFKPFCDEEGIKMGKLGMPLRLAVCGTAKTPSVDAVLALIGKEEVLKRIRA

SEQ ID NO: 19916 - protein, 72 aa, Neisseria meningitidis; identical to SEQ ID NO: 9949

SEQ ID NO: 19917 - protein, 441 aa, Neisseria meningitidis
MKKYLFRAALCGIAAAILAACQSKSIQTFPQPDTSVINGPGRPVGIPDPAGTTVGGGGAVYTVVPHLSLPHWAAQDFAKSLQSFRLGCANLKNRQGWQDVCAQAFQTPVHSFQAKQFFERYFTPWQVAGNGSLAGTVTGYYEPVLKGDDRRTAQARFPIYGIPDDFISVPLPAGLRSGKALVRIRQTGKNSGTIDNTGGTHTADLSQFPITARTTAIKGRFEGSRFLPYHTRNQINGGALDGKAPILGYAEDPVELFFMHIQGSGRLKTPSGKYIRIGYADKNEHPYVSIGKYMADKGYLKLGQTSMQGIKSYMRQNPQRLAEVLGQNPSYIFFRELTGSSNDGPVGALGTPLMGEYAGAVDRHYITLGAPLFVATAHPVTRKALNRLIMAQDTGSAIKGAVRVDYFWGYGDEAGELAGKQKTTGYVWQLLPNGMKPEYRP

SEQ ID NO: 19918 - protein, 456 aa, Neisseria meningitidis
MPQNTLNIVILAAGKGTRMYSKMPKVLHEIGGETMLGRVIGTAAALNPQNICVVVGHGKEQVLDTVKRDVVWVEQTEQLGTGHAVKTALPHLAAEGRTLVLYGDVPLIDVETLETLLEAAGNEVGLLTDVPADPSGLGRIIRDGSGSVTAIVEEKDADTAQKAVKETNTGILVLPNAKLENWLNSLSSNNAQGEYYLTDLIAKAVADGIKVHPVQVRASHLAAGVNNKRQLAELERIFQTGQAQELLKAGVTLHDPARFDLRGRLKHGQDVVIDVNCIFEGEVEIGDNVEIGANCVIKNAKIGANSKIAPFSHLEDCEVGENNRIGPYARLRPQARLADDVHVGNFVEIKNAAIGKGTKANHLTYIGDAEVGSKTNFGAGTIIANYDGVHKHKTVIGDEVRIGSNCVLVAPVTLGNKVTTGAGSTITRNVEDNKLALARARQTVIEGWVRPEKDKQ

SEQ ID NO: 19919 - protein, 185 aa, Neisseria meningitidis
MNIIDTAIPDVKLLEPQVFGDARGFFMETFRDGWFKENIADCSFVQENHSKSGKGVLRGLHYQTENTQGKLVRVVVGEVFDVAVDMREGSPTFGKWAGATLSAQNQCQLWIPEGFAHGFYVLSDTTELTYKCTDYYKPEAEQVLIWNDPAIGIGWPLQTAPLLSPKDLAGKTWAQAEKLRLTLSR

SEQ ID NO: 19920 - protein, 288 aa, Neisseria meningitidis
MKGIILAGGSGTRLYPITRGVSKQLLPVYDKPMIYYPLSVLMLAGIRDILVITAPEDNASFKRLLGDGSDFGISISYAVQPTPDGLAQAFIIGEEFIGNDNVCLVLGDNIFYGQSFTQTLKQAAAQMHGATVFAYQVKNPERFGVVEFNENFRAVSIEEKPQRPKSDWAVTGLYFYDNRAVEFAKQLKPSARGELEISDLNQMYLEDGSLSVQILGRGFAWLDTGTHESLHEAASFVQTVQNIQNLHIACLEEIAWRNGWLSDEKLEELARPMAKNQYGQYLLRLLKK

SEQ ID NO: 19921 - protein, 96 aa, Neisseria meningitidis; identical to SEQ ID NO: 5810

SEQ ID NO: 19922 - protein, 68 aa, Neisseria meningitidis; identical to SEQ ID NO: 5814

SEQ ID NO: 19923 - protein, 59 aa, Neisseria meningitidis; identical to SEQ ID NO: 7121

SEQ ID NO: 19924 - protein, 125 aa, Neisseria meningitidis
MCELKNFRRNITCFEGYDENSFIGKWYDDGVWDDEEYWKLENDLIEVRKKYPYPMDIPRYVVIGIGTIIDFLMVPNWKLFEIKASPWLPDSVGINERYERLKTMLRYIFTEKDIVNVRFDYYNKK

SEQ ID NO: 19925 - protein, 181 aa, Neisseria meningitidis
MIIVEHLEHYLGEIESGIKCLDRRYHLSVSVFPSQPYKGVTTFSTLGLNRYDLNYKSRFELIFTCSEEWNKENIAAFLSGVAEYLIDNRQPILRGEIIQLPRVIIEGSKMDALYVSAPFYFDDDFQVCYGEHYNIVFPLLVPLYKQEAELVEKKGWNAFEQFLLDNEVGNLSDMNRKPFVW

SEQ ID NO: 19926 - protein, 89 aa, Neisseria meningitidis
MSVKELFKVILDKNKDFPIRTIHRTPIGILPKPVALSIVQYEDDQGFYLFYLDETGQEQTDTYHDTLDSAFEQVEFEFGISKEEWMQSP

SEQ ID NO: 19927 - protein, 369 aa, Neisseria meningitidis
MSLTRLILKFYALLRLFLGKNARTAWISHPACAGHEPGANHPDSPDRILCIEQALRRAGIWQHLQTIEAEEISDTRLALVHSSKYLNRLESCLPQKGKISRLDNDTAISTGSLSAARFAAGSAVQAVDMVMNRKAWHAFCAARPPGHHAGSGKAGGFCLLNNVAAGVMHAIAEYRLKRIAVIDFDVHYGDGTAEIFKDDPRILFFNLFETDLFPFPENNDMPDGGNMVHLPLPPGTGSRTFREAVRRQWLPRLAAFKPELVLLSAGFDAHRLDESGRLNLHEADFAWLTHKIIQTASGCPGKIVSVLEGGYTLEPLAQSAAEHIRVLAGLGKSDAATAYQKTLDPTKKRFAKPKTGQVRQPTQSDRYDI

SEQ ID NO: 19928 - protein, 190 aa, Neisseria meningitidis
MMVRRLIIGISGASGFQYGVKALELLRAQDIETHLVVSKGAEMARASETAYARDEVYALADFVHPIGNIGACIASGTFKTDGMLVAPCSMQTLASVAHGFGDNLLTRAADVVLKERRRLVLMVRETPLNLAHLDNMKRVTEMGGVVFPPVPAMYRKPQTADDIVAHSVAHALSLFGIDTPDSAEWQGMAD

SEQ ID NO: 19929 - protein, 180 aa, Neisseria meningitidis; identical to SEQ ID NO: 3825

SEQ ID NO: 19930 - protein, 143 aa, Neisseria meningitidis; identical to SEQ ID NO: 362

SEQ ID NO: 19931 - protein, 273 aa, Neisseria meningitidis
LLIHYTLCRYRNRLAQDDTLSELLKLINCQLTEKGLKVEKASAAVVDATIIQTAGSKQRQAIEVDNKGQVSGQTTPSKDSDARWIKKNGLYKLGYKQHTRTDAEGYIEKLHITPANAHECKHLPPLLEGLPKGTTVYADKGYDSAENRQHLEEHQLQDGIMRKACRNRPLTEAQTKRNRYLSKTRYSGLNLNQDKATKPQTVQIVRQGEATPYWFKFNPLYVVEQSFGTLHRKFRYARAAYFGLIKVSAQSHLKAMCLNLLKAANRLSAPAAA

SEQ ID NO: 19932 - protein, 130 aa, Neisseria meningitidis; identical to SEQ ID NO: 7797

SEQ ID NO: 19933 - protein, 234 aa, Neisseria meningitidis
LSVTGIRFCYNQPMENIEEYALLSPEALLERLDTVLSIRIGGKGWESSMTANFAQTLVEIQDSLYRVVSTVQYGDDNLKRLTADKRKQYELNFKISEGSTRVESDFKETLVRFGRDMLQDMPPKIRSATLVALTTLLVGGALGYGYLEYLKQVASEGYQTERLYNAVDRLAESQERITSAILKGARGADFVQIGRRSYSREDISEANRRAERVPYGAELVSDGNFTAVLSDIGD

SEQ ID NO: 19934 - protein, 106 aa, Neisseria meningitidis
LLMCVLLHRRLSHAGDESVYFAQSPLAASEGRGARERGGQVLSHWLSPYYLSNYGCIMRLCLLLVKHYTVKMCKDLVRTYTLFFTFSSIGYQCVQRKFENFYILVV

SEQ ID NO: 19935 - protein, 399 aa, Neisseria meningitidis; identical to SEQ ID NO: 11046

SEQ ID NO: 19936 - protein, 129 aa, Neisseria meningitidis
MWKISKENCEDLGFAIVCMFYDAINLSEFKLWLDIVVRDIPIDTIPLYIFDLIDFDKSIGEIYDVIGVVNYGYISNDQKNALTGIAFLRGIDVYDPPISKEKALKALEKYPEIYQRFQHFFPFVELPLL

SEQ ID NO: 19937 - protein, 125 aa, Neisseria meningitidis
MCEFKDIIRNVPYFEGYDENSFIGKWYDDGVWDDEEYWKLENNLIEVRKKYPYPMDIPRYVVIGIGTIIDFLMVPNWKLFEIKASPWLPDSVGIHERYERFTTMLRYIFTEKDIVNVRFDYYNKK

SEQ ID NO: 19938 - protein, 132 aa, Neisseria meningitidis; identical to SEQ ID NO: 10765

SEQ ID NO: 19939 - protein, 87 aa, Neisseria meningitidis
MSKWRGFNRKGNTMKKNAPKSFEEALSRLESLTQAMQGEMPLEDALAAYQEGNELVRYCQTKLAQVEQKLQVLDADGPKELNLESDE

SEQ ID NO: 19940 - protein, 117 aa, Neisseria meningitidis; identical to SEQ ID NO: 9841

SEQ ID NO: 19941 - protein, 91 aa, Neisseria meningitidis; identical to SEQ ID NO: 1783

SEQ ID NO: 19942 - protein, 311 aa, Neisseria meningitidis
MNPKKLVIASRESLLAMWQAKHIQGRLKALYPDCEVEILGMTTRGDQILDKTLSKVGGKGLFVKELEQALYDGRADLAVHSIKDVPMDLPEGFALAAIGERANPFDAFVSNQYARLEEMPKGAVVGTSSLRREAQLRARYPHLLIKPLRGNVQTRLSKLDNGEYDAIILAAAGLQRLELDGRIRMILSESDSLPAAGQGALGIEIAAHREDLYEVLKPLNHDTTHACVTAERALARALGGSCQVPLAAYCTEENGLLTLRGLVGHPDGSVILQADAQAPAEYADALGRAVAKKLADDGARELIGAVLNTEN

SEQ ID NO: 19943 - protein, 142 aa, Neisseria meningitidis; identical to SEQ ID NO: 5523

SEQ ID NO: 19944 - protein, 71 aa, Neisseria meningitidis; identical to SEQ ID NO: 1785

SEQ ID NO: 19945 - protein, 451 aa, Neisseria meningitidis
MSDFFHSDVLSVSELNAFAKSILENHLAGLWIAGEVSNLTRAASGHYYFSLKDSRAQVRCAMFKGAAARLAKPLKEGDHIEVAGKISIYETRGEFQITVNEVRLKGLGQLYEAYERLKAQLQAEGAFAEERKKPLPVRPQCIGIVTSLAAAALRDVVTTLKRRAPEIPVIVYPTPVQGTGSEFQIAQAIKTASQRAECDVLIVCRGGGSIEDLWAFNEEPVVRAIEACTVPVVSGVGHETDFTLADFVADVRAPTPTGAAELVSPNRQESLHRLAQAQGRLKTVLEQRYFDASQKLDWLARQIRHPRQKLDEQRASIGKLAQTLSYSMKQNLRAHTARFERQTQALQHYRPDVSVCKNNIVRLQTALPAAFSQLLTHRRQSLTAQAALLEAVSPQHILERGFSVVKDTRGQVIRNADVLKQGQKLHITFADGETDVRVSKEQGQQDLFDCI

SEQ ID NO: 19946 - protein, 117 aa, Neisseria meningitidis; identical to SEQ ID NO: 15855

SEQ ID NO: 19947 - protein, 37 aa, Neisseria meningitidis; identical to SEQ ID NO: 970

SEQ ID NO: 19948 - protein, 1201 aa, Neisseria meningitidis
MFHFAFPAQTALRQAITDAYRRNEIEAVQDMLQRAQMSDEERNAASELARRLVTQVRAGRTKAGGVDALMHEFSLSSEEGIALMCLAEALLRIPDNATRDRLIADKISDGNWKSHLNNSPSLFVNAAAWGLLITGKLTATNDRQMSSALSRLISKGGAPLIRQGVNYAMRLLGKQFVTGQTIEEALQNGKEREKMGYRFSFDMLGEAAYTQADADRYYRDYVEAIHAIGKDAAGQGVYEGNGISVKLSAIHPRYSRAQHGRVMGELLPRLKELFLLGKKYDIGINIDAEEANRLELSLDLMEALVSDPDLAGYKGIGFVVQAYQKRCPFVIDYLIDLARRNNQKLMIRLVKGAYWDSEIKWAQVDGLNGYPTYTRKVHTDISYLACARKLLSAQDAVFPQFATHNAYTLGAIYQMGKGKDFEHQCLHGMGETLYDQVVGPQNLGRRVRVYAPVGTHETLLAYLVRRLLENGANSSFVNQIVDENISIDTLIRSPFDTIAEQGIHLHNALPLPRDLYGKCRLNSQGVDLSNENVLQQLQEQMNKAAAQDFHAASIVNGKARDVGEAQPIKNPADHDDIVGTVSFADAALAQEAVGAAVAAFPEWSATPAAERAACLRRFADLLEQHTPALMMLAVREAGKTLNNAIAEVREAVDFCRYYANEAEHTLPKDAEAVGAIVAISPWNFPLAIFTGEVVSALAAGNTVIAKPAEQTSLIAGYAVSLMHEAGIPTSALQLVLGAGDVGAALTNDARIGGVIFTGSTEVARLINKALAKRGDNPVLIAETGGQNAMIVDSTALAEQVCADVLNSAFDSAGQRCSALRILCVQEDVADRMLDMIKGAMDELVVGKPIQLTTDVGPVIDAEAQQNLLNHINKMKGVAKSYHEVKTAADVDSEKSTFVRPILFELNNLNELQREVFGPVLHVVRYRADELDNVIDQINSKGYALTHGVHSRIEGTVRHIRSRIEAGNVYVNRNIVGAVVGVQPFGGHGLSGTGPKAGGSFYLQKLTRAGEWVAPTLSQIGQADEAALKRLEALVHKLPFNAEEKKAAAAALGHARIRTLRRAETVLTGPTGERNSISWHAPKRVWIHGGSTVQAFAALTELAASGVQAVVEPDSPLASYTADLEGLLLVNGKPETVGISHVAALSPLDSARKQELAAHDGALIRVLPSENGLDILQVFEEISCSVNTTAAGGNASLMAVAD

SEQ ID NO: 19949 - protein, 137 aa, Neisseria meningitidis; identical to SEQ ID NO: 1900

SEQ ID NO: 19950 - protein, 729 aa, Neisseria meningitidis
VIDVTDFNDEDKLGKGKEMIDRLSRLVGIFKKLNLSSNQAEDDDLLGDAYEYLMRHFATESGKSKGQFYTPAEVSRIMAKIIGISADCRPAPAFMTRPAARVRCCSKPPPKPAAKSAFTVRKKMWQPRPLPVIFCTTTKPPKSTPGTPCPIRLSVMKTTGLRPSILPLPIRLIPPEKNGDYAFLLHLLKSLKPSGKGAIILPHGVLFRGNAEARIRTELLNLDLIKGIIGLPANLFYGTGIPACIIVIDKEHAQTAQFAEEGTNQVISGGSVFMIDASRGFIKDGNKNRLREQDIHKIIDTFTNLVTAVWCIAKSQHKITTLICLAISTAEKSKTCKISPPIYLYGGIPAHDMDALEAYWQVLGRMKNELFAEHDGHFTTIQRNRLQIFPTLNSLKSCGIGVEFRANLVQPQISTIKSKAAKSKPIYWRTPITPPSKPDTWQSLPRGTLKTTLPPSNRAGLSGNGAKACWTRSNPAALKNTISTKSRTTGRKPCKTMFISSPKMAGRRLKTWPKSPKKAMKPRTPSSLRKPKPTKKAKPKPSASAKNTAAKSSPPSWLPAATFQTASPSWKKNKASWNAAKNWKTTKNTAAKRVRTTYWMQKANFPPNFKPHWKKAAKKANGLFYKPPKHRRKKPRKTQSKPKSKPTLPYSNNSADFPKPKSSSLPFKTNGLPIYKVESKIAWKTVFSSLSAATRWKTATAARWPSLPEKWKSGKAKSMPTLKIWVLEA

SEQ ID NO: 19951 - protein, 122 aa, Neisseria meningitidis; identical to SEQ ID NO: 2373

SEQ ID NO: 19952 - protein, 273 aa, Neisseria meningitidis
VNRTAFCCLSLTAALILTACSSGGGGVAADIGAGLADALTAPLDHKDKSLQSLTLDQSVRKNEKLKLAAQGAEKTYGNGDSLNTGKLKNDKVSRFDFIRQIEVDGQLITLESGEFQIYKQDHSAVVALQIEKINNPDKIDSLINQRSFLVSGLGGEHTAFNQLPSGKAEYHGKAFSFDDAGGKLTYTIDFAAKQGHGKIEHLKTPEQNVELASAELKADEKSHAVILGDTRYGGEEKGTYHLALFGDRAQEIAGSATVKIREKVHEIGIAGKQ

SEQ ID NO: 19953 - protein, 413 aa, Neisseria meningitidis
MQKWQTELYSTPLWLLQTLLIVSAASAVILFLTRKTRFGREFAYILRLCLTPKSAVKVLLLITEMITLVLTEMRLNVLSTFMSKGLYDSMQDLNASAFWMFAAMNAGVVLIRAFNNVVNDFLNQGLAIKWSERLNEVLTARWLADKNYYRLQMRRHAPDNIDQRIQQDAQDFIASTIEFVRGMVNSVVTSLEFAVVLWGLAGILTVFGFDIPRGIVWFVFIFVILATFIAMWIGNPLIRYNYENEKLNGDYRYSLIRVRDHAESVAFYSGEKHEHDQLSDRFKAIIRNRWRIARQSVCLSGFNDMFTNGIKLFPIILQAPRLFAGQIKIGDIQQTVQAFARLQNALSFFRMFYNKFTAYRARLERLYGFLLSTEEQHSARQPEISEVSDGIALECKAAAAFARIGGSFCTAEA

SEQ ID NO: 19954 - protein, 463 aa, Neisseria meningitidis
MFPDFSQTLSKDRHFLRSAFKNPNKYGGLSKVEEKYRKSHEIFLKRLAALPKPEFDNTLPVHEKLDEIKKTVAEHQVTIICGETGSGKTTQLPKICLELGRGAAGLIGHTQPRRLAARSVAERIAEELKSEIGSAVGYKVRFTDHTSRDACVKLMTDGILLAETQTDRYLAAYDTIIIDEAHERSLNIDFLLGYLKQLLPRRPDLKVIITSATIDAERFSQHFNGAPVLEVSGRTYPVEILYRPLIGKDEDDAEIELTDAIVDAADELARYGEGDILVFLPGEREIREAAEALRKSTLRRNDEILPLFARLSHAEQHKIFHPSGAKRRIVLATNVAETSLTVPGIKYVIDTGLARVKRYSARAKVEQLHIEKISQAAARQRSGRCGRVSAGVCIRLFSEENFNNRPEFTDPEIARSNLAAVILRMASLKLGDVAAFPFLEMPDSRYINDGFQVLLELGAVEAA

SEQ ID NO: 19955 - protein, 371 aa, Neisseria meningitidis
MGLKKACLTVLCLIVFCFGIFYTFDRVNQGERNAVSLLKDKLFNEEGEPVNLIFCYTILQMKVAERIMAQHPGERFYVVLMSENRNEKYDYYFNQIKDKAERAYFFHLPYGLNKSFNFIPTMAELKVKAMLLPKVKRIYLASLEKVSIAAFLSTYPDAEIKTFDDGTINLIQSSSYLGDEFSVNGTIKRNFARMMIGDWSIAKTRNASDEHYTIFKGLKNIMDDGRRKMTYLPLFDASELKAGDETGGTVRILLGSPDKEMKEISEKAAKNFNIQYVAPHPRQTYGLSGVTTLNSPYVIEDYILREIKKNPHTRYEIYTFFSGAALTMKDFPNVHVYALKPASLPEDYWLKPVYALFTQSGIPILTFDDKD

SEQ ID NO: 19956 - protein, 442 aa, Neisseria meningitidis
MNTTSQFTSNFWNIYIAVIVLLSFIALAWLLLSQNVVKRPKKGEEVQTTGHEWDGIAEYDNPLPRWWFWLCVLTWLFGIGYLVMYPGVGDYKGLLKWTSHNQYEKEVKKADEQYGKLYAKFADMPIEKVAKDPQAKQIAQNLFNTYCIQCHGSDAKGSKGFPNLTDSDWLWGGDPDKIHETIEKGRVATMPAWGPALGEEGVKDVAHYVMSLSKPEGQYDEERAARGQALFSGPPANCFTCHGDKGQGIQGLGPNLTDDVWLWGGTQKSIIETITNGRSSQMPAWGHFLDKDKLHIMTAYVWGLSDKDGKALVKKAEPAPTPAPAAEPAASAPAEAAQAASEAKPAAAEPKAEEKAAPAAKADGKVYETVCAACHGNAVPGIPHVGIKADWADRIKKGKDTLHKHAIEGFNTMPAKGGRGDLSDDEVKAAVDYMVNQSGGKF

SEQ ID NO: 19957 - protein, 330 aa, Neisseria meningitidis
MHTPLTYIDLFSGAGGLSLGFEQAGFQQLLSVEMESDYCQTYRTNFPHHQLLQKDLTTLTEQDLINCLNGQAVDLIIGGPPCQGFSMAGKIGRTFTDDPRNHLFKEFVRIVKIVQPYFFVMENVARLYTHNSGKTRIEIIQAFQNIGYSVECKILSAADFGVPQIRSRVIFIGRRDKGKISFPEPLQISHQTVGSAIGHFPKLAAGESNPHVANHEAMNHSAQMLEKMAFVKNGGNRNDIPEPLRPKTGDIRKYIRYNSNKPAVCITGDMRKVFHYEQNRALTVRELAALQSVPDNFIFVAAKLPSSSRLVTPYRLYWQKLLLKVFKVKM

SEQ ID NO: 19958 - protein, 356 aa, Neisseria meningitidis
MKIVLTTSMAGLGGTETATVRLGRLLKRRGHDIILASSDGPFVGEAQASGIRWQPVDFYRGGLAGYLKSTFAYARMLRREQPDIIDCQMARVVPACALAAKIVSPKTKIIYHSHGLDAATYPKIAKLFDKLGVYIIGNCKHEREKLIRHGFPAGRIAYAYNAPPPPEFHFRKTEKECAVLGTLSRLDTVRAVHLMLDILKKMVDRGMPVRLNIAGIGEEMDNLKTQAKHLGIEDKVTFLGGIRDLTAYFKDVDILVNTPHCIGDHGAGVGNNILEAGLYDTPVVTYDMAGISEMVVNGETGYCIPFGDEEAFIAAVDTLVRQPELRGQMGKALHKHVETLCSDDEIYRTTMAAYEM

SEQ ID NO: 19959 - protein, 258 aa, Neisseria meningitidis
MNRPKQPFFRPEVTVARQTSLTGKVILTRPLSFSLWTTFASISALLIILFLIFGNYTRKTTVEGQILPASGVIRVYAPDTGTITTKFVEDGEKVKAGDKLFALSTSRFGAGGSVQQQLKTEAVLKKTLAEQELGRLKLIHENETRSLKATVERLENQKLHILQQIDGQKRRIRLAEAVAKTALGRQELSGLGMVSSDLAKSSEPVYLVKIKPDKSTITAYGEEKPLQIGMTLEADILHEKRRLYEWVLELIYSMSGKL

SEQ ID NO: 19960 - protein, 292 aa, Neisseria meningitidis; identical to SEQ ID NO: 13830

SEQ ID NO: 19961 - protein, 300 aa, Neisseria meningitidis
MNPAMIERLKAVENQAEAMERGARSAYLKQQAQELGISLATLYRKLEAVSVKPTRKRRSDAGKTELKPEEAKLISAVLVEAMRRNGKRLMSVRQAVEMLRANGKIEAARIDGETGEVIPSLRTAFRPLARHRPHRPVMAHPRRRHEDQTPLYRPTVGLGGRNTPRAAHTDRRQHPPFPRHPPTAQTRPPPDHISIKFAHNAIRRLGYDGSTPGKSKHTMHGFRHLFTNISLTAGKDTLTTDLALGHISRAALQRAGFSSLHHYLTADSYRLQERRELAEWYSRRHRQAYEAAAQNTCNKT

SEQ ID NO: 19962 - protein, 227 aa, Neisseria meningitidis
MFALLEAFFVEYGYAAVFFVLVICGFGVPIPEDLTLVTGGVISGMGYTNPHIMFAVGMLGVLVGDGIMFAAGRIWGQKILRFKPIARIMTPKRYEQVQEKFDKYGNWVLFVARFLPGLRTAVFVTAGISRKVSYLRFIIMDGLAALISVPIWIYLGEYGAHNIDWLMAKMHSLQSGIFVILGIGATVVAWIWWKKRQRIQFYRSKLKEKRAQRKAAKAAKKAAQSKQ

SEQ ID NO: 19963 - protein, 469 aa, Neisseria meningitidis
MNFPKTAASLLLLLASLAAHALDTGRIPQNEIAVYVQELDSGKVIIDHRSDVPVNPASTMKLVTAFAAFKTFGSNYRWATEFKSNGTVNDGTLDGNLYWAGSGDPVFNQENLLAVQRQLREQGIRNITGHLMLDHSLWGEVGSPDDFEADSGSPFMTPPNPTMLSAGMVMVRAERNAADSTDILTDPPLSHIFAQNNLKITASQAACPSIKKLMRASFSDNTLKLRGNIPESCLGKPVGVRMFALDELIRQSFTNHWLLGGGRISDGIGIADTPEGAQTLAVAHAKPMKEILTDMNKRSDNLIARSVFLKLGGNGKLPAVSEQAASAVRRELAVSGIDVADLVLENGSGLSRKERVTARMMAQMLETAYFSPFAQDFIDTLPIAGTDGTLRNRFKQSGGLLRLKTGTLNNVRALAGYWLGDKPMAVVVIINSGRAVSLLPDLDNFVANNIISGGDGWLDAKLMCKERRA

SEQ ID NO: 19964 - protein, 399 aa, Neisseria meningitidis
MWTGFFSKSGTGIAEERHQNRRACTDVPLLAERNSKHPDRPYGFAKYRQSGLDIYAWHGIYFFPRFPFIDIDCIRWVCAGLKAFKHYIRENGLPDLIHAHCMNYAGILAFKISQKYGIPYVVTKHSSTITRGLIRPHQWQPMKNAAAHAAARLAISRHFAHVLQHKYGCEWQYLPNILGGIFNRPFEQREKNNKPHFVFCTVSHLRRLKGHDVLLTAFARALAQCPQLRLNIGGSGQEEQRLKQQAADLGITHAVTFLGALQPEAVLDLMRNSDAFVLASRTETFGVVYIEALSQGLPVIATRCGGAESIVSDGNGYLVPVDDDDALADALIKMYEHHSDFEPARLRENCLNEFGENAVIGRLIGIFRQAIAEYGKKIPVKYSGLTKIRTRRRSRRQYK

SEQ ID NO: 19965 - protein, 524 aa, Neisseria meningitidis
MKKSLFVLFLYSSLLTASEIAYRFVFGIETLPAAKMAETFALTFVIAALYLFARYKTSRLLIALFFAFSIIANNVHYAVYQSWMTGINYWLMLKEVTEVGSAGASMLDKLWLPALWGVAEVVLFCSLAKFRHKTHFSADILFAFLMLMIFVRSFDTKQEHGISPKPTYSRIKANYFSFGYFVGRVLPYQLFDLSKIPVFKQPAPSRIGQGSIQNIVLIMGESESAAHLKLFGYGRETSPFLTRLSQADFKPIVKQSYSAGFMTAVSLPSFFNVIPHANGLEQISGGDTNMFRLAKEQGYETYFYSAQAENQMAILNLIGKKWIDHLIQPTQLGYGNGDNMPDEKLLPLFDKINLQQGRHFIVLHQRGSHAPYGALLQPQDKVFGEADIVDKYDNTIHKTDQMIQTVFEQLQKQPDGNWLFAYTSDHGQYVRQDIYNQGTVQPDSYLVPLVLYSPDKAVQQAANQAFAPCEIAFHQQLSTFLIHTLGYDMPVSGCREGSVTGNLITGDAGSLNIRDGKAEYVYPQ

SEQ ID NO: 19966 - protein, 725 aa, Neisseria meningitidis
MKTDIQTELTQALLPHEKVWANEEKTILAKNILLDLVEKTDPTIIGLLLNNDELKRHFFVEVNGVLVFKLQDLRFFLDKHSVNNSYTKYANRIGLTDGNRFLKDNSDIVLDFPFKDCVLNGGQSTEEGEEIYFKRSNSQPASQPASQPASQPASQPELYTKLTRKRQEIFFNQTLAFDEIDRLFDAKAFSKFSRYTADGKQAVGEIKRHSDGTPAENLIIKGNNLIALHSLAKQFKGKVKLIYIDPPYYFVKKKQQDSFGYNTNFKLSTWLTFMKNRLSIAKELLTDDGIIVISIDDDGNAYLKILLDEIFGFENFIGNLPTIMNLKGNNDEYAFAGTHEYTLVFAKNKDKSTFYEFPIDEDNFLEKWEEDEIGFYKKGAPMRATGTEDKREDRPEMFYPFLVKNNTVSTITDEEFSQIYNKDLEVFNDDFIQKLKEKYENLGYNFILPIADKQWGRWRWGYSIKNKARLQTDIIVSQSKNGISLYKKQRPELDDLPTKKPKTIFYKPEYSSGNGTEQMKNLFGEKAFKNPKPEELIQDFITITTNESDIVLDYHLGSGTTAAVAHKMNRQYIGIEQMDYIETLAVERLKKVIDGEQGGISKAVNWQGGGEFVYAELAPFNETAKQQILACEDSDGIKTLFEGLCERYFLKYNVSVNEFSQIIQEPEFQSLPLDEQKQMVLEMLDLNQMYVSLSEMDDEQFADCLNDDDKAVSRAFYQAEKKNGE

SEQ ID NO: 19967 - protein, 327 aa, Neisseria meningitidis; identical to SEQ ID NO: 294

SEQ ID NO: 19968 - protein, 162 aa, Neisseria meningitidis; identical to SEQ ID NO: 7842

SEQ ID NO: 19969 - protein, 508 aa, Neisseria meningitidis
MDYPPLKGAALAWVTLSLGLAVFMEVLDTTIANVAVPVIAGNLGAATTQGTWVITSFAVANAVSVPLTGFLAKRIGEVKLFTAAAVGFVITSWLCGIAPNLQSLVVFRILQGFIAGPLIPLSQSLLMASYPPAKRTLALALWAMTVVVAPVLGPILGGWISGNWHWGWIFFINIPIGIISAWITWKHLKCRETETVKMPTDYVGLTLMVVGIGALQMMLDRGKELDWFASGEIITLGVVALVCLSYFIVWELGEKYPIVDLSLFKDRNFTVGIIATSLGFMVYMGTLTLLPLVLQTNLGYTSTWAGLAAAPVGILPVFLSPLIGRFGNKIDMRLLVTASFLTFAFTFYWRTDFYADMDIGNVIWPQFWQGAGVAMFFLPLTTITLSHMKGGQIAAAGSLSNFLRVLMGGVGVSVVSTLWERREALHHTRFAEHITPYSATLHETAAHLSQHGVSDIQTLGIINNTITQQGFIIGSNEIFMAGSLLFIIMIPVIWLAKPPFHNGGGGGH

SEQ ID NO: 19970 - protein, 547 aa, Neisseria meningitidis
MNAFTRAWYALERHYQDTRHVLLRDRFACEPDRFERMHERLDGMLFDYSKNRLGEDTLQLLCRLAETADLEGKMRALRTGAKVNGSEGRAALHTALRLPDGADAVYADGRDVLPEIRRELNRALEFAHSLDDGSYQGTTGKRITDFVHIGIGGSDLGPAMCVQALEPFRRHITVHFAANADPACLDAVLCRLNPETTVFCVASKSFKTPETLLNAQAVKAWYRGAGFSESETACHFCAVSADTAAAAAFGIAAERVFAMYDWVGGRYSVWSPVGLPVMVAVGGARFRELLAGAHAMDSHFFHTPPRRNIPVLMALIAVWYNNFQHADGQTAVPYSHNLRLLPAWLNQLDMESLGKSRASDGSPAVCKTGGIVFGGEGVNCQHAYFQLLHQGTRLIPCDFIVPMTAQGVEEGRSRFTVANAFAQAEALMKGKTLDEARAELADLPEAERERLAPHKEFPGNRPSNSILLDRLTPYNLGMLMAAYEHKTFVQGVIWDINPFDQWGVEYGKQLAKTIIGELEGGTSVHDASTEGLMAFYRECRLKGGGAA

SEQ ID NO: 19971 - protein, 389 aa, Neisseria meningitidis
MDNELWIILLPIILLPVFFAMGWFAARVDMKTVLKQAKSIPSGFYKSLDALVDRNSGRAARELAEVIDQQPQSYDLNLTLGKLYRQRGENDKAINIHRTMLDSPDTVGEKRARVLFELAQNYQSAGLVDRAEQIFLGLQDGKMAREARQHLLNIYQQDRDWEKAVETARLLSHDDQTYQFEIAQFYCELAQAALFKSNFDVARFNVGKALEANKKCTRANMILGDIEHRQGNFPAAVEAYAAIEQQNHAYLSMVGEKLYEAYAAQGKPEEGLNRLTGYMQTFPELDLINVVYEKSLLLKCEKEAAQTAVELVRRKPDLNGVYRLLGLKLSDLDPAWKADADMMRSVIGRQLQRSVMYRCRNCHFKSQVFFWHCPACNKWQTFTPNKIEV

SEQ ID NO: 19972 - protein, 507 aa, Neisseria meningitidis
MVISNPRELEKLKDRIPNLINIIRVAIVFPLMIMHILGLETGSRANLHASWTAWAFYVWLAIACWLIFFSIIHPHWQWQSLKMPRFSAVADITMIGVLTYLFGGIDSGFGILILPFVVCSCLLSYGRYPLLYSSYAAILLIFNAIADGDIGKYPLISDARTASVTFILVAASYLSAIFTSLSVRYIDSAGRLARDNHLAYRRIKGLSQTVLNRVQEAVVVINVEHQTILFNKKAKDLLPMLEIGQHTALFDPITVLWDKASSRTFERNIDTPGLNAGIRAVPVNKGPDKLLILYIRPQSEIQAEALSVKLAALGQLTANLAHEIRNPMSAIRHANDLLRENMEAGAADPFNAKLCKIIDGNVCRIDKMLEDISSPTSATKPNAKPSAYRFGKNSNKSSCSAIPMPPAASAICRAITLPISILPTCGKLCGTSPTTRGGTAANVTARLPSSPVLHKKTPSASCLPTTAAAFRPKCRNTCSNPFTPQQKTEPAWDCMSPANWHTPISAI

SEQ ID NO: 19973 - protein, 239 aa, Neisseria meningitidis
MDTFLDRLKFLWPHGAKPSDIYNKIEMSASGFNRVWKEGAIPTADYLVKIQEVTGCDLNWLLTGKGLPYLDKARPENAGAFSVSRNSDGITDTMGNPVDLSEFVFVPRYNVAAAAGYGAPVFGEEPLFCLAFRKYWIDNYVTKQPEKLSVITVKGDSMEGVLNHGDSILINHAETDPRDGLYVLRIGNDLFVKRVQRIPGKLLVTSENPRYAPFEIDLSNAQDDIAIIGRVEWYGRSID

SEQ ID NO: 19974 - protein, 702 aa, Neisseria meningitidis
MKISFHLALLPTLIIASFPVAAADTQDNGEHYTATLPTVSVVGQSDTSVLKGYINYDEAAVTRNGQLIKETPQTIDTLNIQKNKNYGTNDLSSILEGNAGIDAAYDMRGESIFLRGFQADASDIYRDGVRESGQVRRSTANIERVEILKGPSSVLYGRTNGGGVINMVSKYANFKQSRNIGAVYGSWANRSLNMDINEVLNKNVAIRLTGEVGRANSFRSGIDSKNVMVSPSITVKLDNGLKCGQYTYDNVERTPDRSPTKSVYDRFGLPYRMGFAHRNDFVKDKLQVWRSDLEYAFNDKWRAQWQLAHRTAAQDFDHFYAGSENGSLIKRNYAWQQTDNKTLSSNFTLNGDYTIGRFENHLTVGLDYSREHRNPTLGYNRPFTASINPYDRASWPASGRLQPVFTQNRHKADSYGIFVQNIFSATPDLKFVLGGRYDKYTFNSENKLTGNSRQYSGHSFSPNIGAVWNINPVHTLYASYNKGFAPYGGRGGYLSIDTSSSAVFNADPEYTRQYETGVKSSWLDNRLDTTLSAYQIERFNIRYRPDAENNPYTWAVGGKHRSRGVELSAIGQIIPKKLYLRGSLGVMQAKVVEDKKNPDRVGIHLNNTSNVTGNLFFRYTPTENLYGEIGVTGTGKRYGYNSRNKEVTTLPGFARVDAMLGWNHKNVNVTFAAANLFNQKYWRSDSMPGNPRGYTARVNYRF

SEQ ID NO: 19975 - protein, 209 aa, Neisseria meningitidis; identical to SEQ ID NO: 7848

SEQ ID NO: 19976 - protein, 380 aa, Neisseria meningitidis; identical to SEQ ID NO: 314

SEQ ID NO: 19977 - protein, 453 aa, Neisseria meningitidis
MSSPSNTNRQTSSRLTYILTVAGATVGFGATWRFPYLVGENGGGAYVFLFCIAMLVIGIPMILVENVIGRRKGVNALDAFGGPMNGKPIAKIWKLVGWMGLLGAFGIMAYYMALGGWVISYIVNIIGGNLNISSPIDGVVTKGFFAEHIDSPWEIAFYTLLFVAVNQWILVKGVIGGIEKAAKLMPLLFLFLIAMVVRNVTLPGAMEGVAFYLKPDFSKITAELFVFVLGQVFFALSLGFGVMITLSSYLDKNENLVQTAVITAITNTIIAILAGFMIFPSLFSFGVAPDSGPTLVFQSLPIVFSHMWAGSVFAVIFFSLLLIAALTTSLTIYEVLITTIQEKTKIRRTAAITIVLAAIFIFGNIPSILSYGPWKDVSVFGKNIFDAFDYISGNILFMLTALGSALFAGFVMKDEAKDELLYKGNHTTVNIWFAYVKYLVPLVILLIFVSNLF

SEQ ID NO: 19978 - protein, 168 aa, Neisseria meningitidis
MGSKFFFLLLRFAGSVLPPSHMRGIVGRRVRGFLARRVSPHIGRGVNIERGAYVFPDTVLGDGSGIGANCEICRGPVVGKNVMMEPECLFYSNNHKFDRKKRFEGYTEIRPITLEDDVWPGRRVIVMAGVTVGRGSVVGAGAVVTKDIPPYSLAAGNPAVVKKNLPEG

SEQ ID NO: 19979 - protein, 621 aa, Neisseria meningitidis
MSQALPYRPDIDTLRAAAVLSVIVFHIEKNWLPGGFLGVDIFFVISGFLMTAILLREMWGGRFSLKAFYIRRIKRILPAFFAVLAATLIGGFFLFTKDDFFLLWKSALTALGFASNLYFARGKDYFAPAQEEKPLLHIWSLSVEEQFYFVFPILLLLVVRKSLRVQAGFLAALCALSLATSFIPSAFDKYYLPHLRACEMLVGSLTAVWMRCRQPAVGRRCAAAGALFAVCILSTCLFSYSEQTAYFPGPAALIPCLAVAALIYFNHYEHPLKKFFQWKITVAAGLISYSLYLWHWPILAFMRYIGPDNLPPYSPAAAIVLTLAFSLISYHCIEKPFKKWQGSFAQSVLWIYALPMLILGAGSFFAMRLPFMAQYDRLGLTRSNTSCHNNTGKQCLWGDTEKQPELLILGDSHADHYKTFFDAVGKKEKWSATMVSADACAYVEGYASRVFQNWAACRAVYRYAEEHLPRYSKVVLAMRWGSQMPENSRSLAYDAGFFQKFDRMLHKLSSEKQAVYLMADNLASSYNVQRAYILSSRIPGYRQTLRPDDESTLKANARIRELAAKYPNVYIIDAAAYIPADFQIGGLPVYSDTDHINPYGGTELAKRFSEKQRFLNTRHNH

SEQ ID NO: 19980 - protein, 416 aa, Neisseria meningitidis
MFVPLAMLAGMFSYYETFHETEALQDDLLRQAALYVAPDSKPETLPEGDGDTRILVQMPQQEDPVVSLPAHLADGLHTLQADGDDDYYRVYIRTTERGRIAVMQESEYREDLAADAARQSVLPLLAALPLMILLTVWITHKAMRPVRKLSQSLEQRRINDLSALSVDNIPSEIRGFVTAINLLLKRADEDIRHRQRFVADAAHELRTPMTALSLQAERLNNMSLPPDAARQSAVLQQSIRRNKHLLEQLLALARSQSDETPLAKTTFGLQSRFRQVLQELMPLALEKRQDIGVAVGGDVEIFADETEIYTLVKTFVDNAIRYTPSEGRIDLGFTDEGKYLAVWVEDNGNGIPESERVRVLDPFYRILGTEQQGTGLGLSIADTLAKKYGGYLELTDSRRFGHGLLIRALLDKETLK

SEQ ID NO: 19981 - protein, 324 aa, Neisseria meningitidis
MQENPTVWLFDLDNTLHNADAGIFTLINRAMTRYMARRLKLSESAASDLRQEYWHRYGATLAGLQIHHPEIDIAEFLRESHPIDAILTKLHGMADTEHTLCRLNGRKAVFSNGPSFYVRAVVGALGLENRFDALFGTDDFGLLYKPNPQAYLNVCRLLDVPPECCIMVDDSADNLHQAKALGMKTVWFGAKSHALSFIDACARDMAQLARYAETLSEHRQTHYNTLILKIRKKTMRKTFLILMTTAALLSGCAWETYQDGNGKTAVRQKYPAGTPVYYQDGSYSKNMNYNQYRPERHAVLPNQTGNNADEEHRQHWQKPKFQNR

SEQ ID NO: 19982 - protein, 372 aa, Neisseria meningitidis; identical to SEQ ID NO: 3260

SEQ ID NO: 19983 - protein, 292 aa, Neisseria meningitidis
MCIEMKFIFFVLYVLQFLPFALLHKLADLTGLLAYLLVKPRRRIGEINLAKCFPEWDGKKRETVLKQHFKHMAKLMLEYGLYWYAPAKRLKSLVRYRNKHYLDDALAGEKVIILYPHFTAFEMAVYALNQDVPLISMYSHQKNKILDEQILKGRNRYHNVFLIGRTEGLRALVKQFRKGSAPFLYLPDQDFGRNDSVFVDFFGIQTATITGLSRIAALANAKVIPAIPVREEDNTVTLHFYPAWESFPSEDAQADAQRMNRFIEERVREHPEQYFWLHKRFKTRPEGSPDFY

SEQ ID NO: 19984 - protein, 346 aa, Neisseria meningitidis; identical to SEQ ID NO: 9873

SEQ ID NO: 19985 - protein, 346 aa, Neisseria meningitidis; identical to SEQ ID NO: 9873

SEQ ID NO: 19986 - protein, 361 aa, Neisseria meningitidis
MTVPHIPRGPVMADIAAFRLTGEERQRLLDPAIGGIILFRRNFQNIEQLKTLTAEIKALRTPELIIAVDHEGGRVQRFIEGFTRLPAMSTLGEIWDKDGASAAETAAGQVGRVLATELSACGIDLSFTPVLDLDWGNCPVIGNRSFHHNPEAVAHLALALQKGLAKGGMKSCGKHFPGHGFVEGDSHLVLPEDRRSLSELEAADLAPFHIMSREGMAAVMPAHVVYPQVDTKPAGFSEIWLKQILRRDIGFKGVIFSDDLTMEGACGAGGIKERARISFEAGCDIVLVCNRPDLVDELREDFRIPDNPALAQRWQYMANTLGSAAAQAVMQTADFQEAQAFVAGLASPQDTAGGVKVGEAF

SEQ ID NO: 19987 - protein, 209 aa, Neisseria meningitidis; identical to SEQ ID NO: 1847

SEQ ID NO: 19988 - protein, 141 aa, Neisseria meningitidis; identical to SEQ ID NO: 7863

SEQ ID NO: 19989 - protein, 505 aa, Neisseria meningitidis
MLYFRYGFLVVWCAAGVSAAYGADAPAILDDKALLQVQRSVSDKWAESDWKVENDAPRVVDGDFLLAHPKMLEHSLRDALNGNQADLIASLADLYAKLPDYDAVLYGRAQALLAKLAGRPAEAVARYRKLHGENAADERILLDLAAAEFDDFRLKSAERHFAEAAKLDLPAPVLENVGRFRKKTEGLTGWRFSGGISPAVNRNANNAAPQYCRQNGGRQICSVSRAERAAGLNYEIEAEKLTALADNHYLLFRSNIGGTSYYFSKKSAYDDGFGRAYLGWQYKNARQTAGILPFYQVQLSGSDGFDAKTKRVNNRRLSPYMLAHGVGVQLSHTYRPNPGWQFSVALEHYRQRYREQDRAEYNNGRQDGFYVSSAKRLGESATVFGGWQFVRFVPKRETVGGAVNNAAYRRNGVYAGWAQEWRQLGGLNSRVSASYARRNYKGVAAFSTEAQRNREWNVSLALSHDKLSYKGIVPALNYRFGRTESNVPYAKRRNSEVFVSADWRF

SEQ ID NO: 19990 - protein, 97 aa, Neisseria meningitidis
LHKQVQHITTKLFYFKITDISFFIDFKFHIFNILGILFQRKRNRLIKTIPAIHSDKTARNIRFPVSTTIRYRTPRCRFRLHIRQNFIRKENVENKKN

SEQ ID NO: 19991 - protein, 124 aa, Neisseria meningitidis; identical to SEQ ID NO: 1868

SEQ ID NO: 19992 - protein, 78 aa, Neisseria meningitidis; identical to SEQ ID NO: 3902

SEQ ID NO: 19993 - protein, 74 aa, Neisseria meningitidis; identical to SEQ ID NO: 1871

SEQ ID NO: 19994 - protein, 352 aa, Neisseria meningitidis
MSGYTGGLVVSGGISLIDRLDIMENVNRIVAEGIAAVEAAQDFNALEQIKARYLGKTGELTGLLKTLGQMSPEERKTIGAHINECKNRFQTAFNAKRDALNEAKLQARLAAEALDITLPGRAQEGGSLHPVTLTLQRVVELFHGMGFEVADGPEIEDDFHNFQALNIPANHPARAMQDTFYVENGDVLRTHTSPIQIRYMLDKKEPPIRIIAPGRVYRVDSDATHSPMFHQAEGLWVEEGVTFADLKAVFTDFIRRFFERDDLQVRFRPSFFPFTEPSAEIDIMGENGKWLEVGGCGMVHPNVLKNVNIDSEKYTGFAFGIGLDRFAMLRYNVNDLRLFFDNDLNFLKQFVK

SEQ ID NO: 19995 - protein, 66 aa, Neisseria meningitidis; identical to SEQ ID NO: 3905

SEQ ID NO: 19996 - protein, 64 aa, Neisseria meningitidis
LRQAFQTAFLKCVYRWCSKRSSESAASAKLKRGINEVKICLNLKGSLHPNPLSPWERARTRLAN

SEQ ID NO: 19997 - protein, 154 aa, Neisseria meningitidis
MLHIPPTEPDRYVSSIVALNVHSSNGTGDWHSAAALNDDAYPQDFYIYGKDQTRSTLHLLGNVGVIDGTNRFNEMGYYPENIPVWLADHPRACVDYLYTAVLQTGSIGRVILDDWFPSDEDKQSVYDLLNQIEPHLNTQEWENLQLWKRKNPIM

SEQ ID NO: 19998 - protein, 86 aa, Neisseria meningitidis
LERKNNIIELSIENLELIYGGGLGERILEGGANGAQIGGSIGAGIGLGVGIVSGGIPAGPAIILGGTVGAAVGAVTGMGVAAYEYY

SEQ ID NO: 19999 - protein, 80 aa, Neisseria meningitidis; identical to SEQ ID NO: 1154

SEQ ID NO: 20000 - protein, 78 aa, Neisseria meningitidis; identical to SEQ ID NO: 3909

SEQ ID NO: 20001 - protein, 103 aa, Neisseria meningitidis
MFNQTQTVTYPATFLGVKKFKGEIDGSNIDTCSVLVATPLPAQSGNAVGFTAAQMKFGDSKNFSRLENLKYPCEVMVMVEMTSTGKGMVPSLIDFQVAEKPKG

SEQ ID NO: 20002 - protein, 69 aa, Neisseria meningitidis
MDMTLKHKAEALLGEPLLDEPVRPESWECCGSDCGEACIQTIYWADKARYDAQRRKLKEAGWAEDENAV

SEQ ID NO: 20003 - protein, 68 aa, Neisseria meningitidis; identical to SEQ ID NO: 3911

SEQ ID NO: 20004 - protein, 64 aa, Neisseria meningitidis; identical to SEQ ID NO: 631

SEQ ID NO: 20005 - protein, 147 aa, Neisseria meningitidis
MKWLLNMIMRPIKFIMVNTLLFIVICSSFFDLLVQLCTILFHSQKIYFITLFLLFIFNFVTKSIYMAIIYPILYFFTIKKYYPYSRKVIILLLLALSIYFSFMDFYFFSIYSDNLSYETEPLHLYIPIIINFFSLLVSNFILSFINK

SEQ ID NO: 20006 - protein, 43 aa, Neisseria meningitidis; identical to SEQ ID NO: 15919

SEQ ID NO: 20007 - protein, 270 aa, Neisseria meningitidis; identical to SEQ ID NO: 1882

SEQ ID NO: 20008 - protein, 130 aa, Neisseria meningitidis; identical to SEQ ID NO: 18694

SEQ ID NO: 20009 - protein, 65 aa, Neisseria meningitidis; identical to SEQ ID NO: 9839

SEQ ID NO: 20010 - protein, 64 aa, Neisseria meningitidis
LAKRRKWRTFRYMELHDRQEMPSERIFRSILRLVGVSSETVKQKFAGVELSYAGKAAGESLYCL

SEQ ID NO: 20011 - protein, 40 aa, Neisseria meningitidis; identical to SEQ ID NO: 1884

SEQ ID NO: 20012 - protein, 89 aa, Neisseria meningitidis; identical to SEQ ID NO: 3886

SEQ ID NO: 20013 - protein, 100 aa, Neisseria meningitidis
LSAVFIAPYLTAFHEQEKTFEYAELTVTAPNRSGRAIKLDADGQHYRLSCYGFDGLCAEGNIGRTIRAEQVRAVLSETVGKGFLNGVLLEYRNSGSVYKQ

SEQ ID NO: 20014 - protein, 99 aa, Neisseria meningitidis; identical to SEQ ID NO: 3915

SEQ ID NO: 20015 - protein, 73 aa, Neisseria meningitidis; identical to SEQ ID NO: 3916

SEQ ID NO: 20016 - protein, 72 aa, Neisseria meningitidis; identical to SEQ ID NO: 7897

SEQ ID NO: 20017 - protein, 92 aa, Neisseria meningitidis
MTAMPSEPPFRRHFTHQNRKTAPKIIITKHNGKPDTKPNTAAKMPSEAVGATILIWGITFLNHPFDSQINSAFACQKQNQYFAVRIGTFIVD

SEQ ID NO: 20018 - protein, 67 aa, Neisseria meningitidis
MPSEACLVFRRHFLRLKQRIGNPALPIHGNLHLKTICIPNHTPIPVSVICTLSVLGNHRFFAYNSRI

SEQ ID NO: 20019 - protein, 268 aa, Neisseria meningitidis; identical to SEQ ID NO: 3556

SEQ ID NO: 20020 - protein, 59 aa, Neisseria meningitidis; identical to SEQ ID NO: 5877

SEQ ID NO: 20021 - protein, 61 aa, Neisseria meningitidis; identical to SEQ ID NO: 5879

SEQ ID NO: 20022 - protein, 219 aa, Neisseria meningitidis
MGRHFGRRRFLTVAAVAAAGAAVSFLPNPFAADDEKRNKDEKHNENVFFWKGVALGSGAELRLFGVDDRQAADLVNKVLAEVARLEKMFSLYREDSLISRLNRDGYLTSPSADFLELLSLCRDIHALTEGAFDPTVQVLWKLYADYFSAHPDAETPPPENSVKEALKRVGFGKVSFDDREIRFTEKGMGLSLNGIAQGYSGLTKTSTALPRLSSKRTIL

SEQ ID NO: 20023 - protein, 74 aa, Neisseria meningitidis
MNQKYILSANNNSLIEEIHNTVQRIGYCIVRGLNLNHLDDSRRNKKLFDFLSQLGMLTNHKGDGFKSIFWDIKY

SEQ ID NO: 20024 - protein, 692 aa, Neisseria meningitidis
MGKANAFTAPITVVNYDEQALNNTEARTLVDAVAKKDASVWQFGGESNTLTGLYFRGYQLDARQFSVNGLAGMYGTQGTASVQVGSAQLIKGASTAVNGMNPEGAVSGSVNIETKKAADEGNRKIGLGRFSNNRAQGTFDLGQRFGENKAFGVRANGKLRHGDTPRHGYSEDNKEFAVNADYRGETLRVAFDSIYAKRKTNGGRARMQDIQNAGGRLFGAPDGKTNLLPSWNWQNTAGQTNMLTFEWDAFDNAQITGGIGYNKARYYGTLISPTVCLNATSTCTDMQNTNASGKVTARNYDYNTGTARLTDQYFRTLSMNLSARGEFETGPVTHNWSTAFDRVIRQRKTINGSGNGNSKIEVKANENIANQLASFTADYPNSWENSANLDANIKVNSLALSDTLGFVDNKYRLTLGERFQTVEYTDKKSQSGDAKRFSPMLMAAWVPQPDLVVYGNYMEDLEPADIKTDDSGETTMAKPRVSRQFEVGVRKNWGDFVTTLNAFQIKRPGYWRGNTKKGTDFAAYKAAGGADGDEQGMERSRGIEFNAYANLLNKTLRPTFGLMYLQSTVKDYPNSRDMLVNGVQVANPRVIAKAGLEWDTPFAKGLTLNSNVSYFGKSYQDTQKQYAFPSYTLVDVGARYKTKLGKNTLTVSSSVENLFNKNYWQVQRGQYDRSFAVVGLPRTYWLKAELDF

SEQ ID NO: 20025 - protein, 410 aa, Neisseria meningitidis
MPSAHYPEMSEKLMAVLMAMLVTLMPFSIDAYLPAIPEMAQSLNADVHRIEQSLSLFMFGTAFGQVVGGSVSDIKGRKPVALTGLAVYCLAVAAIVFASSAEQLLNLRVVQAFGAGMTVVIVGAMVRDYYSGRKAAQMFALIGIILMVVPLVAPMVGALLQGLGGWQAIFVFLAAYSLVLLGLVQYFLPKPAVGGKIGRDVFGLVAGRFKRVLKTRAAMGYLFFQAFSFGSMFAFLTESSFVYQQLYRVTPHQYAWAFALNIITMMFFNRVTAWRLKTGVHPQSILLWGIVVQFAANLSQLAAVLFFGLPPFWLLVACVMFSVGTQGLVGANTQACFMSYFKEEGGSANAVLGVFQSLIGAGVGMAATFLHDGSATVMAATMTASTSCGIALLWLCSHRAWKENGQSEYL

SEQ ID NO: 20026 - protein, 133 aa, Neisseria meningitidis; identical to SEQ ID NO: 9910

SEQ ID NO: 20027 - protein, 99 aa, Neisseria meningitidis; identical to SEQ ID NO: 3688

SEQ ID NO: 20028 - protein, 96 aa, Neisseria meningitidis
LPSDKEARAGCLSLPANNGIIRALLPPFTGINIRLFAALGLLSLSGAAAQASVYHCNSNGKSVYTSAPAGSCADADLPKISSHQGGGYRLKIKKLS

SEQ ID NO: 20029 - protein, 68 aa, Neisseria meningitidis; identical to SEQ ID NO: 531

SEQ ID NO: 20030 - protein, 54 aa, Neisseria meningitidis; identical to SEQ ID NO: 1909

SEQ ID NO: 20031 - protein, 375 aa, Neisseria meningitidis
MKIVFITTVASSIYGFRAPVIKKLIGKNHQVYAFVSEFSDNELDIIREMGVTPVTYRSNRSGLNPFSDIKSTFLIFKELKKISPDLVFPYFAKPVIFGTFAAKLAGVPRIVGMLEGLGFAFTPQPEGIPLKTKIIKGILIALYRIALPMLESLIVLNPDDKDELTDKYGIKIKNIHILGGIGLDSRQYPYSEADIPDEKEPVKFLFIGRFLKEKGIDDFIRAAEQVKDKYPDTVFTALGAIDKSRGGGHLERLAARDIIRFPGFVNNVSEVIKEHHIFVLPSYYREGVPRSTQEAMAVGRAVITTDVPGYRETVADKVNGFLIEPWNPRILAEKMIYFIENREAVRLMGNASYAIAKDKFDAEKVDLKLLDILKA

SEQ ID NO: 20032 - protein, 333 aa, Neisseria meningitidis
MRPFFVGATVLAILGALVFFISPGAVVLHRQIFLELMLPAAYGGFLTAALLDWTGFSGNLKPVATLMAALLLAASAILPFSPQTASFFVAAYWLVLLLFCARLIWLDRNTDNFALLMLLAAFTVFQTAYAATGDLNLLRAQVHLNMAAVMFVSVRVSVLLGAEALKKCRLKDPVFIPNVVYKNIAITFLLLHAAAELWLPAQTAGFTALAVGFILLAKLRELHHHELLRKHYVRTYYLLQLFAAAGYLWTGAAKLQNLPASAPLHLITLGGMMGGVMMVWLTAGLWHSGFTKLDYPKLCRIAVPILFAAAVFVLYLLTFVPIFRANAFTDDPE

SEQ ID NO: 20033 - protein, 336 aa, Neisseria meningitidis
MIFSIIVPIYNVEKYLRCCVDSVLAENFADYEMILVDDGSPDGCGKICDEYAGKYPHIKVIHQENGGLSDARNAGIRAAKGDYLIFLDSDDYWADTNRSKNAGGILFDLQQLADKKVDLILHPSSFNYRDIPKGADFSDNDFVRHFETLVEGRYYIANAWTKIVRREIIIKNNLFFPKGYIHEDFPYSLQLARFIKTFAFYDNPFYQYRVLGGSISHNIKYKNFSDVLTHLDRGVDFLVENKNSPIYGGLQKFVFDNIGYLRSILVRLYFSKNIILIYRKYFSFKEKCRKIFGAKTIRPVFIGKTAFIIGLPILRLLVPPMLYPAIKAVYQKFFSE

SEQ ID NO: 20034 - protein, 218 aa, Neisseria meningitidis; identical to SEQ ID NO: 3932

SEQ ID NO: 20035 - protein, 371 aa, Neisseria meningitidis
MDLSIVVPIYNVESYLEACLSSIESILSNENVELILVNDGSKDGSEDICYKYIDKTTNNKQQTTNNKQQTTNNKQQTTNNKQQTTNNKQQTTNNKQQTTNNKQHRYRTPNIKYIYQDNQGLSEARNTGIKNSNGKYIAFIDSDDFINCQVLLDFLGKDDSDMPDVVFLNAVKYDGSVSYFGEDYQPEKILNQSKVEVLKGLCRFRKFPGSAWNKIIKRELIIREKLFFERGIYSEDIEWSMRLFNAATTFSYLDGCYYYYRQGRKDSITGTVSEKSIKSLLYILEKNAEMEFNRDISSYLYSFLSYEYLVLLFIMTSKNIECDADIKRRAYHLRFMLLKSNKLIYKLIFPIITLFGVDITGRILKAIRGNI

SEQ ID NO: 20036 - protein, 243 aa, Neisseria meningitidis
VSREINAGGHHFLYGGISGGGVHYWDNKDFSEQCLRLSLGYKNRSVTRSFGIVPFIGQNLLGGSRYNFVGGFNADFSRRLSERWRLTLNVGNMWKRYQEDRTAARYDSHMPLAGATLMYSAPKDWLLYGGADWSHNMTKEAEQASVRKGLRVGAVKTFDGGLGLRANLRYTRRMFDAPGTIVYRFPRKDHEYQANLSLWHDKISWKGFTPQLNFRYLKIDSNMKSFYTRKNTQIFMSVEKDFK

SEQ ID NO: 20037 - protein, 1066 aa, Neisseria meningitidis
MRTTPTFPTKTFKPAAMALAVATTLSACLGGGGGTSAPDFNAGGTGIGSNSRATTAKSAAVSYAGIKNEMCKDRSMLCAGRDDVAVTDRDAKIKPPPNLHTGDFTNPNDAYKNLINLKPAIEAGYTGRGVEVGIVDTGESVGSISFPELYGRKEHGYNENYKNYTAYMRKEAPEDGGGKDIEASFDDEAVIETEAKPTDIRHVKEIGHIDVVSHIIGGRSVDGRPAGGIAPDATLHIMNTHDGTKNEIMSAAIRNAWVKLGERGVRIVNNSFGTTSRAGTADHFQIANSEEQYRQALLAYSGGDKTDEGIRLMQQSDYGNLSYHIRNKNMLFIFSASNDAQAQPNTLTLLPFYEKDAQKGIITVAGVDRSGEKFNGSNHCGITAMWCLSAPYEASVRFTRTNPIQIAGTSFSAPIVTGTAALLLQKYPWMSNDNLRTTLLTTAQDIGAVGVDSKFGWGLLDAGKAMNGPASFPFGDFTADTKGTSDIAYSFRNDISGTGGLIKKGGSQLQLHGNNTYTGKTIIEGGSLVLYGNNKSDMRVETKGALIYNGAASGGSLNSDGIVYLADTDRSGANETVHIKGDLQLGGEGTLYTRLGKLLKVDGTAMTGGKLYMSARGKGAGYLNRTGQRVPFLSAAKIGRDYSFFTNIETDGGLLASLDSVEKTAGSEGDTLSYYVRRGNAARTASAAAHSAPAGLKHAVEQGGSNLENLMVELDASESSATPETVETAAADRTDMPGIRPYGATFRAAAAVQHANAADGVRIFNSLAATVYADSTAAHADMQGRRLKAVSDGLDHNATGLRVIAQTQQDGGTWEQGGVEGKMRGSTQTVGIAAKTGENTTAAATLGMGHSTWSENSANAKTDSISLFAGIRHDAGDIGYLKGLFSYGRYKNSISRSTGADEHAEGSVNGTLMQLGALGGVNVPFAATGDLTVEGGLRYDLLKQDAFAEKGSALGWSGNSLTEGTLVGLAGLKLSQPLSDKAVLFATAGVERDLNGRDYTVTGGFTGATAATGKTGARNMPHTRLVAGLGADVEFGNGWNGLARYSYAGSKQYGNHSGRVGVGYRF

SEQ ID NO: 20038 - protein, 387 aa, Neisseria meningitidis
MDIQSKAKKLIEMIQTAPVEWKPLGEVASIGKGKQLNKSLLREKDKYPVINGGINPSGYWHEYNNEAGTIVISQGGASAGFVNWMDIPFFAGAHAYTIKANEDKLLQRFAYFFKNEANYIHAMSIRSSIPALAKSELQNLLIPIPPLETQQKIVKILDKFTELEAELALRKRQYRYYRDFLLDFDNQIGGVADGYQCRLKDVVWKTLGEIAEYSKNRICSDKLNEHNYVGVDNLLQNREGKKLSGYVPSEGKMTEYIANDILIGNIRPYLKKIWQADCTGGTNGDVLVIRVTDEKVNPKYLYQVLADDKFFAFNMKHAKGAKMPRGSKAAIMQYKIPIPPLPEQEKIVAILDKFDTLTHSVSEGLPYEIALRRKQYEYYREQLLAFR

SEQ ID NO: 20039 - protein, 387 aa, Neisseria meningitidis
MNITIVAPYCSLPSEPYFNRFWYLAERLSQSHDVLLITSRFRHYDKSFRRHEDAEAASQGRLKVMLLEESGYGKNVSLERVASHYRFVKNFEQWLKNCRPGEQDIVYSAYPLIATNLLLGKHKARLGYKLIVDVQDVWPESFSSVVPFLKKVPHKLLPFASRANRAYRCADALVAVSQTYLDRAKEANPNVPGEAVYIGTDFAAIAPPRFRSKTVRLFYLGTLSYSYDVETVCKGVRKLLDDGENVELHVMGGGPDLEKLKQYENRAIKFYGYLPYSEMMSIAKACDIAVNAIHSHAMQSVTNKLSDYMALQKPILNSQTNAEVLDLMNLLPHENYRSGDVDGFVQAAKNILKRKNDSVQSDEIVRRFRRDVAYQKIVNLIERLAHE

SEQ ID NO: 20040 - protein, 118 aa, Neisseria meningitidis; identical to SEQ ID NO: 9922

SEQ ID NO: 20041 - protein, 64 aa, Neisseria meningitidis; identical to SEQ ID NO: 11919

SEQ ID NO: 20042 - protein, 1361 aa, Neisseria meningitidis
  misc_feature 1356, 1357: 'Xaa' is any amino acid
MNKGLHRIIFSKKHSTMVAVAETANSQGKGKQAGSSVSVSLKTSGDLCGKLKTTLKTLVCSLVSLSMVLPAHAQITTDKSAPKNQQVVILKTNTGAPLVNIQTPNGRGLSHNRYTQFDVDNKGAVLNNDRNNNPFVVKGSAQLILNEVRGTASKLNGIVTVGGQKADVIIANPNGITVNGGGFKNVGRGILTTGAPQIGKDGALTGFDVRQGTLTVGAAGWNDKGEADYTGVLARAVALQGKLQGKNLAVSTGPQKVDYASGEISAGTAAGTKPTIALDTAALGGMYADSITLIANEKGVGVKNAGTLEAAKQLIVTSSGRIENSGRIATTADGTEASPTYLSIETTEKGAAGTFISNDGRIESKGLLVIDTGEDIGLRNGAVVQNNGNRPAATVLNAGRNLVIESKANVNNAKGSTNLSTGGRTVIKEASIQTGTTVYSSSKGNAELGNNTRITGADVTVLSNGTISSSAVIDAKDTAHIEAGKPLSLEASTVTSDIRLNGGSIKGGKQLALLADDNITAKTTNLNTPGNLYVHTGKDLNLNVDKDLSAASIHLKSDNAAHITGTSKTLTASKDMGVEAGSLNVTNTNLRTNSGNLHIQAAKGNIQLRNTKLNAAKALETTALQGNIVSDGLHAVSADGHVSLLANGNADFTGHNTLTAKADVNAGSVGKGRLKADNTNITSSSGDITLVAGNGIQLGDGKQRNSINGKHISIKNNGGNADLKNLNVHAKSGALNIHSDRALSIENTKLESTHNTHLNAQHERVTLNQVDAYAHRHLSITGSQIWQNDKLPSANKLVANGVLALNARYSQIADNTTLRAGAINLTAGTALVKRGNINWSTVSTKTLEDNAELKPLAGRLNIEAGSGTLTIEPANRISAHTDLSIKTGGKLLLSVKGGNAGAPSAQVSSLEAKGNIRLVTGETDLRGSKITAGKNLVVATTKGKLNIEAVNNSFSNYFPTQKAAELNQKSKELEQQIAQLKKSSPKSKLIPTLQEERDRLAFYIQAINKEVKGKKPKGKEYLQAKLSAQNIDLISAQGIEISGSDITASKKLNLYAAGVLPKAADSEAAAILIDGITDQYEIGKPTYKSHYDKAALNKPSRLTGRTGVSIHAAAALDDARIIIGASEIKAPSGSIDIKAHSDIVLEAGQNDAYTFLKTKGKSGKIIRKTKFTSTRDHLIMPAPVELTANGITLQAGGNIEANTTRFNAPAGKVTLVAGEELQLLAEEGIHKHELDVQKSRRFIGIKVGKSNYSKNELNETKLPVRVVAQTAATRSGWDTVLEGTEFKTTLAGADIQAGVGEKARVDAKIILKGIVNRIQSEEKLETNSTVWQKQAGRGSTIETLKLPSFESPTPPXXHTLN

SEQ ID NO: 20043 - protein, 203 aa, Neisseria meningitidis; identical to SEQ ID NO: 11924

SEQ ID NO: 20044 - protein, 755 aa, Neisseria meningitidis
MKLEASKHKQKFKKSFIVSLFFSILYTSPLLAVDYVYDKTKLTDDEITRLEKLRDRNSEYWKDDLFRLDLPNGSVKYWEDKPMLRLLRNDIEGAAKGDFLYPILTFSRKTYNETINPDEKISFFDSPYTPGYTAAFVQGFGVKERNGDTEEQAKQYIDKVRTGLKRNVNIVAIPLDNYEPDKTYTDTFIFQYNYYYNSIFNTHRSLKHSNINSEILAVGNVADLYYKHYIRSLPPALSNFTIYDLSFPKLTVTENSHVIGQVIHLYELKLENSLWEPRWNSDVSYLNLFNSHIRFNTKNESLVVGESRIRPTPDNALETEKYFKSKFSNIGYYSYPHAICRNNSGDCDLGYSSIHFAYDLSEREADKPVLTLKSKVRGKTAIVFEEKALNNLKNLTYRQLIKTETDVEPDAFFLLEEYKKGRYRLFLRQCPNGFCIGVEKLAIPTHLVASYAQQAQAANTLFALRLNDKNSDIFDRTLPRKSLWLRVIDGHSNQWVQGKTTPVEGNRKGVQLGGEVFTWQNESNQLSIGLMGGQAEQRSTFRNPDTDNLTTGNVKGFGAGVYATWHQLQDKQTGAYADSWVQYQRFRHRINTEDGTERFTSKGITASIEAGYNALLAEHFTKKGNSLRVYLQPQAQLTYLGVNGKFSDSENAHVNLLGSRQLQSRVGVQAKAQFSLYKNIAIEPFAAVNALYHNKPFGVEMDGERRVINNKTAIESQLGVAVKIKSHLTLQATFNRQTSKHHQAKQGALNLQWTF

SEQ ID NO: 20045 - protein, 708 aa, Neisseria meningitidis
MTLKASKQASKQASKQASKQASKQASKQASKQASKQASKQASGRVNLLTLSVLSLFCTPYVGSDAYDPVKEAEIKNKFILEAAEDRNSHVWRGPCSISFDCFGMFRAQLGSNTRSTKIGDDADFSFSDKPANGVSHYFSSGKTDPNSSEALYDEINITGKNYNSGILAVDNMPVVKKYVTENYGADLKQAVKDQLKDLYKTRPEDWGKNKKIVEEAIIKQYGIPRNKINKFRKVIDPIIEEAVLTPHSNTTPTNLDNIFNKKLHVKIENKSHVAGQVLELTKMTLKDSLWEPRRHSDIHTLETSDNARIRLNTKDEKLTVHKDYAGGADFLFGYDVRESDEPALTFEDKVSGQSGVVLERRPENLKTLDGRKLIAAKTADSGSFAFKQNYRQGLYELLLKQCEGGFCLGVQRLAIPEAEAVLYAQQAYAANTLFGLRAADRGDDVYAADPSRQNIRGGAAADGRRKGVQIGGEVFVRQNEGSRLAIGVMGGRVGQHASVNSKGGAAGSDLHGYGGGVYAAWHQLRDKQTGAYLDGWLQYQRFKHRINDENRAERYKTKGWTASVEGGYNTLVAEGVVGKGNNVRFYLQPQAQFTYLGVNGGFTDSEGTGVGLLGSGQWQSRAGIRAKNRFALRNGVNLQPFAAFNVLHRSKSFGVEMDGEKQTLAGRTALEGRFGIEAGWKGHMSARIGYGKRTDGDKEAALSLKWLF

SEQ ID NO: 20046 - protein, 687 aa, Neisseria meningitidis
MLPTQPNPTQPNPTQPNPTQPNPSPDLSDTAGANTEAIYTSDGITANSTQLEQLKKLFPACFDADGNFLIDRLQAEIAPQTDIGREFYEMNWLGKSYARLLRNLPPETLISEDKTHNAKPENAGSQNLLIRGDNLEVLKHLKNAYANSVKMIYIDPPYNTGSDGFVYQDDRKFTPAELALLANIDEDEAARILDFTDKGSNSHSAWLTFMYPRLYIARELLKDDGVIFISIDDNEAAQLKLLCDEVFGEGNFVAQLPWRKRTAKSDVPFGISQDYEWIFVFAKSCQFIAATKGKERRYYETDDFPDRPWRTHDLTKQTTAAERPNSFFTMVDPKTGKKYPANPNATWRVTKDTFQDYYNKGKIVFPDDYDFLNISNPVMRYFKDDDMKKAGEDFGKVAVSSRLPENVGTLADAVAEYLAIFSRTLPENIGMTKEGTKEITDLFGSKIFTFPKPSQLIKFLVSISSKSNDLILDFFAGSGTTAHAVMQLNAEGQNGNRRYICVQLPEKTAEKSEARKAGYPTIFDITKARIEKAAAKIRVEHPDYTGDSGFKIFQTADNFRQHPDKDFSPEQPDLPLNDELSEEQLQTLLTTWTLYDGAALTTPVEPVRLGDYTAYLCEKRLYLLNKGFTSVDLLAFIRKLDDDAAFNPNRVIVFGSNMASAMQHELDQAVRGYANKKEIELNVIIRV

SEQ ID NO: 20047 - protein, 107 aa, Neisseria meningitidis
  misc_feature 101, 102: 'Xaa' is any amino acid
MLSQSQWLDAVKGRLRVRSDYALSKRWAVTPSEVSQYRRNRLRFPFAVVLDIADVMDIDPIEIIAGLEYRRCREKDMERVKGAYFKAHCAHFVYPNNPGFXXTHLIN

SEQ ID NO: 20048 - protein, 76 aa, Neisseria meningitidis; identical to SEQ ID NO: 3372

SEQ ID NO: 20049 - protein, 56 aa, Neisseria meningitidis; identical to SEQ ID NO: 8938

SEQ ID NO: 20050 - protein, 119 aa, Neisseria meningitidis; identical to SEQ ID NO: 3183

SEQ ID NO: 20051 - protein, 508 aa, Neisseria meningitidis; identical to SEQ ID NO: 3491

SEQ ID NO: 20052 - protein, 150 aa, Neisseria meningitidis; identical to SEQ ID NO: 5989

SEQ ID NO: 20053 - protein, 324 aa, Neisseria meningitidis
MIAKHIDRFPLLKLDQVIDWQPIEQYLNRQKTRYLRDHRGRPAYPLLSMFKAVLLGQWNSLSDPELEHSLITRIDFNLFCRFDELSIPDYSTLCRYRNWLAQDDTLSELLKLINRQLTEKGLKIEKASAAVVDATIIQTAGSKQRQAIEVDNKGQVSGQTTPSKDSDARWIKKNGLYKLGYKQHTRTDAEGYIEKLHITPANAHECKHLPPLLEGIAEGTTVYADKGYDSAENRQHLKEHQLLDGIMRKACRNRPLTETQTKRNRYLSKIRYVVEQSFGTLHRKFRYARAAYFGLIKVSAQSHLKAMCLNLLKAANRLSAPAAA

SEQ ID NO: 20054 - protein, 591 aa, Neisseria meningitidis; identical to SEQ ID NO: 3751

SEQ ID NO: 20055 - protein, 367 aa, Neisseria meningitidis; identical to SEQ ID NO: 8577

SEQ ID NO: 20056 - protein, 244 aa, Neisseria meningitidis; identical to SEQ ID NO: 7982

SEQ ID NO: 20057 - protein, 207 aa, Neisseria meningitidis; identical to SEQ ID NO: 4832

SEQ ID NO: 20058 - protein, 275 aa, Neisseria meningitidis; identical to SEQ ID NO: 67

SEQ ID NO: 20059 - protein, 197 aa, Neisseria meningitidis; identical to SEQ ID NO: 9107

SEQ ID NO: 20060 - protein, 659 aa, Neisseria meningitidis; identical to SEQ ID NO: 11551

SEQ ID NO: 20061 - protein, 175 aa, Neisseria meningitidis; identical to SEQ ID NO: 5147

SEQ ID NO: 20062 - protein, 217 aa, Neisseria meningitidis; identical to SEQ ID NO: 9583

SEQ ID NO: 20063 - protein, 414 aa, Neisseria meningitidis; identical to SEQ ID NO: 8814

SEQ ID NO: 20064 - protein, 259 aa, Neisseria meningitidis; identical to SEQ ID NO: 3243

SEQ ID NO: 20065 - protein, 280 aa, Neisseria meningitidis; identical to SEQ ID NO: 3261

SEQ ID NO: 20066 - protein, 249 aa, Neisseria meningitidis; identical to SEQ ID NO: 2006

SEQ ID NO: 20067 - protein, 264 aa, Neisseria meningitidis; identical to SEQ ID NO: 9604

SEQ ID NO: 20068 - protein, 65 aa, Neisseria meningitidis; identical to SEQ ID NO: 127

SEQ ID NO: 20069 - protein, 210 aa, Neisseria meningitidis; identical to SEQ ID NO: 3262

SEQ ID NO: 20070 - protein, 233 aa, Neisseria meningitidis
LNPTYNLSHLNKIPHPTRRTEMSKLTPREILTAGAVVPVMAIDDLSTAVDLSHALVEGGIPTLEITLRTPVGLDAIRLIAKEVPNAIVGAGTVTNPEQLKAVEDAGAVFAISPGLHESLAKAGHNSGIPLIPGVATPGEIQLALEHGIDTLKLFPAEVVGGKAMLKALYGPYADVRFCPTGGISLATAPDYLALPNVLCVGGSWLTPKEAVKNKDWDTITRLAKEAAALKPKA

SEQ ID NO: 20071 - protein, 75 aa, Neisseria meningitidis; identical to SEQ ID NO: 8833

SEQ ID NO: 20072 - protein, 37 aa, Neisseria meningitidis; identical to SEQ ID NO: 6771

SEQ ID NO: 20073 - protein, 103 aa, Neisseria meningitidis; identical to SEQ ID NO: 2880

SEQ ID NO: 20074 - protein, 335 aa, Neisseria meningitidis
MSTFFQQTAQAMIAKHINRFPLLKLDQVIDWQPIEQYLNRQKTRYLRDHRGRPAYPLLSMFKAVLLGQWHSLSDPELEHSLITRIDFNLFCRFDELSIPDYSTLCRYRNWLAQDNTLSELLELINRQLTEKNLKIEKASAAVIDATIIQTAGSKQRQAIEVDEEGKVSGQTTPSKDKDARRTKKNGLYRLSYKQHTRTDEEGYIEKLHITPANTHECNHLSPLLEGIAEDTTVYADKGYDSKENRQHLKEHRLLDGIMRKAQRNRPLTEAQTKRNRYLSKTRYVVEQSFGTLHRKFRYARAAYFGLIKVSAQSHLKAMCLNLLKAANRLSVPVAA

SEQ ID NO: 20075 - protein, 410 aa, Neisseria meningitidis; identical to SEQ ID NO: 9274

SEQ ID NO: 20076 - protein, 469 aa, Neisseria meningitidis; identical to SEQ ID NO: 8726

SEQ ID NO: 20077 - protein, 161 aa, Neisseria meningitidis; identical to SEQ ID NO: 9515

SEQ ID NO: 20078 - protein, 887 aa, Neisseria meningitidis; identical to SEQ ID NO: 8051

SEQ ID NO: 20079 - protein, 334 aa, Neisseria meningitidis; identical to SEQ ID NO: 1997

SEQ ID NO: 20080 - protein, 600 aa, Neisseria meningitidis
LECREGLSFGNLLSEIIKRIFYYKCLKICPSVSDGGAVMLQSENSKNLISCSIKALPIMISTNGITMQFGAKPLFENVSVKFGEGNRYGLIGANGSGKSTFMKILGGDLEQTAGEVAIENGVRLGKLRQDQFAYEDMRVLDVVMMGHTEMWAAMTERDAIYANPEATEDDYMKAAELEAKFAEYDGYTAEARAAELLSGVGISEDLHNAKMAEVAPGFKLRVLLAQALFSKPDVLLLDEPTNNLDINTIRWLEGVLNQYDSTMIIISHDRHFLNEVCTHMADLDYNTITIYPGNYDDYMLASAQSRERALKDNAKAKEKLQELQEFVARFSANKSKARQATSRLKQADKIKSEMVEVKPSTRQNPYIRFEADEKAKLHRQAVEVEKLAKRFETQLFKNLNFILEAGQRLAIIGPNGAGKSTLLKLLAGAYNPEYSDGLLPDEGSIKWAEKASVGYYPQDHENDFDVDMDLSEWMRQWGQDGDDEQVIRGTLGRLLFGSNDVVKKVKVLSGGEKGRMLYGKLLLLKPNVLVMDEPTNHMDMESIESLNMALEKYNGTLIFVSHDRQFVSSLATQIIELDGKGGYEHYLGDYESYLEKKGVA

SEQ ID NO: 20081 - protein, 179 aa, Neisseria meningitidis; identical to SEQ ID NO: 8483

SEQ ID NO: 20082 - protein, 192 aa, Neisseria meningitidis; identical to SEQ ID NO: 5124

SEQ ID NO: 20083 - protein, 229 aa, Neisseria meningitidis; identical to SEQ ID NO: 8956

SEQ ID NO: 20084 - protein, 193 aa, Neisseria meningitidis
MKHTVSASVILLLTACAQLPQNNENLWQPSEHISSFAAEGRLAVKAEGKGSYANFDWTYQPLVETININTPLGSTLGQLCQDRDGALAVDGKGNVYQAESAEELSRQLVGFKLPIQYLHIWADGRRVAGAPYRILPDGILEQYGWTVGRTADSGGQVRTLQLNNGNLNIRLVFTEIGIPSETETPERCAARTR

SEQ ID NO: 20085 - protein, 65 aa, Neisseria meningitidis; identical to SEQ ID NO: 926

SEQ ID NO: 20086 - protein, 60 aa, Neisseria meningitidis; identical to SEQ ID NO: 2489

SEQ ID NO: 20087 - protein, 153 aa, Neisseria meningitidis; identical to SEQ ID NO: 9695

SEQ ID NO: 20088 - protein, 332 aa, Neisseria meningitidis; identical to SEQ ID NO: 9814

SEQ ID NO: 20089 - protein, 238 aa, Neisseria meningitidis; identical to SEQ ID NO: 3066

SEQ ID NO: 20090 - protein, 269 aa, Neisseria meningitidis; identical to SEQ ID NO: 3459

SEQ ID NO: 20091 - protein, 521 aa, Neisseria meningitidis; identical to SEQ ID NO: 1978

SEQ ID NO: 20092 - protein, 477 aa, Neisseria meningitidis; identical to SEQ ID NO: 3214

SEQ ID NO: 20093 - protein, 335 aa, Neisseria meningitidis
MSTFFQQTAQAMIAKHIDRFPLLKLDQVIDWQPIEQYLNRQKTRYLRDHRGRPAYPLLSMFKAVLLGQWHSLSDPELEHSLITRIDFNLFCRFDELSIPDYSTLCRYRNRLAQDDTLSELLELINRQLTEKGLKVEKASAAVVDATIIQTADSKQRQAIEVDEEGQINGQTTPSKDSDARWIKKNGLYKLGYKQHTRTDAEGYIEKLHITPANAHECKHLPPLLEGLPKGTTVYADKGYDSAENRQHLEERQLLDGIMRKACRNRPLTETQTKHNRYLSKIRYVVEQSFGTLHRKFRYARAAYFGLIKVSAQSHLKAMCLNLLKAANRLSAPAAA

SEQ ID NO: 20094 - protein, 787 aa, Neisseria meningitidis; identical to SEQ ID NO: 8280

SEQ ID NO: 20095 - protein, 736 aa, Neisseria meningitidis
MKADIQTELTQALLSHEKVWANEEKTILAKNILLDLVEKTDPAIIGLLLGNDELKRHFFVEVNGVLVFKLQDFRFFLDKHSVNNSYTKYANRIGLTDGNRFLKDSSDIVLDFPFKDCVLNGGQSSEEGEEIYFKHSNSQPASQPASQPASQPASQPASQPASQLYTKLTRKRQEIFFNQTLAFDEIDRLFDAKAFSKFSRHTADGKQAVGEIKRHSDGTPAENLIIKGNNLIALHSLATQFKGKVKLIYIDPPYYFVKKKQQDSFGYNTNFKLSTWLTFMKNRLSIAKELLTDDGIIVISIDDDGNAYLKILLDEIFGFENFIGNLPTIMNLKGNNDEYAFAGTHEYTLVFAKNKDKSTFYEFPIDEDNFLEKWEEDEIGFYKKGAPMRATGTEDKREDRPEMFYPFLVKNNTVSTITDEEFSQIYNKDLEVFNDDFIQKLKEKYENLGYNFILPIADKQWGRWRWGYSIKNKARLQTDIIVSQSKNGISLYKKQRPELDDLPTKKPKTIFYKPEYSSGNGTEQMKNLFGEKAFKNPKPEELIQDFITITTNESDIVLDYHLGSGTTAAVAHKMNRQYIGIEQMDYIETLAVERLKKVIDGEQGGISKAVNWQGGGEFVYAELAPFNETAKQQILACEDSDGIKTLFEGLCERYFLKYNVSVNEFSQIIQEPEFQSLALDEQKQMVLEMLDLNQMYVSLSEMDDEQFAGCLNDDDKALSREFYQSAKNQAEKKDGE

SEQ ID NO: 20096 - protein, 98 aa, Neisseria meningitidis; identical to SEQ ID NO: 9533

SEQ ID NO: 20097 - protein, 163 aa, Neisseria meningitidis; identical to SEQ ID NO: 6300

SEQ ID NO: 20098 - protein, 418 aa, Neisseria meningitidis; identical to SEQ ID NO: 1968

SEQ ID NO: 20099 - protein, 444 aa, Neisseria meningitidis; identical to SEQ ID NO: 13260

SEQ ID NO: 20100 - protein, 752 aa, Neisseria meningitidis; identical to SEQ ID NO: 2486

SEQ ID NO: 20101 - protein, 281 aa, Neisseria meningitidis
MNIADGRQAFPAPAKLNLDLRITGRREDGYHNIESIFCLIDLQDTVYLKPRDDGKIILHNPVDGMPQEADLSYRAASLLQKYARNPAGVEIWLDKKIPTGAGLGGGSSDAATVLLVLNRWWQCSRTTQQLIDLGATLGADVPFFIFGKNAFASGIGEKLIGMDIPKQWYVIVKPPVHVSTAKIFTHEGLTRNSASSIMPTFQNLQPFRNDMQAVVFKEYPEVWKAYSELSRYGFALMTGSGACVFTACQDRDSAYNIYRQVSGLYEAYLAEGLSKHPLLSV

SEQ ID NO: 20102 - protein, 203 aa, Neisseria meningitidis; identical to SEQ ID NO: 9288

SEQ ID NO: 20103 - protein, 262 aa, Neisseria meningitidis; identical to SEQ ID NO: 6514

SEQ ID NO: 20104 - protein, 102 aa, Neisseria meningitidis; identical to SEQ ID NO: 427

SEQ ID NO: 20105 - protein, 222 aa, Neisseria meningitidis; identical to SEQ ID NO: 7986

SEQ ID NO: 20106 - protein, 258 aa, Neisseria meningitidis; identical to SEQ ID NO: 3585

SEQ ID NO: 20107 - protein, 354 aa, Neisseria meningitidis; identical to SEQ ID NO: 3291

SEQ ID NO: 20108 - protein, 238 aa, Neisseria meningitidis
  misc_feature 232, 233: 'Xaa' is any amino acid
MCCSLSFAEPARIDDRIIKFRPSKSKFFESTGYRKINNEFSKFTEAANVEHIPTGAKARINAKITASVSRAAVLSGVGKLVRQGAKFSTRAVPYVGTALLAHDVYETFKEDIQARGYQYDTETDKFVKGYEYSNCLWYEDERRINRTYGCYGVDSSIMRLMSDYSRFPEVKELMESQMERLARPYWEKLRNRPDMYYFKNYNFKRCYFGLNGGDCLVAKGDDGRTFISFSLXXTHLIN

SEQ ID NO: 20109 - protein, 248 aa, Neisseria meningitidis; identical to SEQ ID NO: 8507

SEQ ID NO: 20110 - protein, 228 aa, Neisseria meningitidis; identical to SEQ ID NO: 9120

SEQ ID NO: 20111 - protein, 187 aa, Neisseria meningitidis; identical to SEQ ID NO: 3115

SEQ ID NO: 20112 - protein, 364 aa, Neisseria meningitidis; identical to SEQ ID NO: 1930

SEQ ID NO: 20113 - protein, 214 aa, Neisseria meningitidis; identical to SEQ ID NO: 1408

SEQ ID NO: 20114 - protein, 876 aa, Neisseria meningitidis; identical to SEQ ID NO: 2451

SEQ ID NO: 20115 - protein, 415 aa, Neisseria meningitidis; identical to SEQ ID NO: 2944

SEQ ID NO: 20116 - protein, 791 aa, Neisseria meningitidis; identical to SEQ ID NO: 8886

SEQ ID NO: 20117 - protein, 433 aa, Neisseria meningitidis
MAIYQSGVIFDQVDTANPDCWTLDEYVKRGGYTALRKILSENISQTDVIDEVKTSGLRGRGGAGFPTGLKWSFMPRSFPGEKYVVCNTDEGEPGTFKDRDIIMFNPHALIEGMIIAGYAMGAKAGYNYIHGEIFEGYQRFEAALEQARAAGFLGKNILGSDFEFELFAHHGYGAYICGEETALLESLEGKKGQPRFKPPFPASFGLYGKPTTINNTETFSSVSFIIRDGGQAFADKGIPNAGGTKLFCISGHVERPGNYEVPLGTPFAEVLKMAGGMRGGKKLKAVIPGGSSAPVLPADIMMQTNMDYDSISKAGSMLGSGAIIVMDEDVCMVKALERLSYFYYDESCGQCTPCRESTGWLYRIVHRIVEGKGKMEDLDLLDSVGNQMAGRTICALADAAVFPVRSFTKHFRDEFVHYIEHGGPMKEHKWGGW

SEQ ID NO: 20118 - protein, 518 aa, Neisseria meningitidis; identical to SEQ ID NO: 9387

SEQ ID NO: 20119 - protein, 83 aa, Neisseria meningitidis; identical to SEQ ID NO: 925

SEQ ID NO: 20120 - protein, 340 aa, Neisseria meningitidis; identical to SEQ ID NO: 2046

SEQ ID NO: 20121 - protein, 213 aa, Neisseria meningitidis; identical to SEQ ID NO: 8512

SEQ ID NO: 20122 - protein, 173 aa, Neisseria meningitidis; identical to SEQ ID NO: 9042

SEQ ID NO: 20123 - protein, 299 aa, Neisseria meningitidis; identical to SEQ ID NO: 3610

SEQ ID NO: 20124 - protein, 248 aa, Neisseria meningitidis; identical to SEQ ID NO: 4029

SEQ ID NO: 20125 - protein, 447 aa, Neisseria meningitidis
MEDKQGMTKAVAGVMTDASSDGRKPATASNLPPLSNRGGTETETAGRVQEVFECYEKYITDGKGNLLGVPLRRGVSDSAFIDQISFSFHEKTFFDKYGVRVSLLEDEDFIRAASMLAEEVFGFCIYKESKGSGGRFYERCWLMGSEDVLYGRVHFGGQNNTILFELTGTGCGVAKEGWESRLFAFLTNAIRPKITRVDIAKDFFNGEYSPNQAREDRNKGMFTCHHVKPKGECLGSDWEEDDEAKMTKGKTYGIGSRESSKYVRVYEKGKQLGDKTSTWTRFEIEFKAKDIVIPFEVLQNPGEYFGGAYPICERFAQKATRIHAVKEDKVISADRYLEWVKKQFGRAANGLKFIFPELDKAKLFELIEPSHHKLPKSLAPEAYDCAFLKAQAIHEQPAFKPYKDPYYMYEYYENLEKQLEQQKHVNNEESYNNFIYDKFARLPISWA

SEQ ID NO: 20126 - protein, 378 aa, Neisseria meningitidis; identical to SEQ ID NO: 7324

SEQ ID NO: 20127 - protein, 291 aa, Neisseria meningitidis; identical to SEQ ID NO: 8637

SEQ ID NO: 20128 - protein, 337 aa, Neisseria meningitidis
MIFSIIVPIYNVEKYLRCCVDSVLAENFADYEMILVDDGSPDGCGKICDEYAGKYPHIKVIHQENGGLSDARNAGIRAAKGDYLIFLDSDDYWADTNRSKNARGGILFDLQQLADKKVDLILHPSSFNYRDIPKGADFSDNDFVRHFETLVEGRYYIANAWTKIVRREIIIKNNLFFPKGYIHEDFPYSLQLARFIKTFAFYDNPFYQYRVLGGSISHNIKYKNFSDVLTHLDRGVDFLVENKNSPIYGGLQKFVFDNIGYLRSILVRLYFSKNIILIYRKYFSFKEKCRKIFGAKAIRPVFIGKTAFIIGLPILRLLVPPMLYPAIKAVYQKFFSE

SEQ ID NO: 20129 - protein, 166 aa, Neisseria meningitidis; identical to SEQ ID NO: 9657

SEQ ID NO: 20130 - protein, 144 aa, Neisseria meningitidis; identical to SEQ ID NO: 2747

SEQ ID NO: 20131 - protein, 648 aa, Neisseria meningitidis; identical to SEQ ID NO: 10960

SEQ ID NO: 20132 - protein, 109 aa, Neisseria meningitidis; identical to SEQ ID NO: 4604

SEQ ID NO: 20133 - protein, 630 aa, Neisseria meningitidis; identical to SEQ ID NO: 2275

SEQ ID NO: 20134 - protein, 124 aa, Neisseria meningitidis; identical to SEQ ID NO: 2472

SEQ ID NO: 20135 - protein, 103 aa, Neisseria meningitidis
MFNQTQTVTYPATFLGAKKFKGEIDGSNIDTCSVLVATSLPAQSGNAVGFTAAQMKFGDSSNFARLENLKYPCGVMVTVEMTSTGKGMVPSLIDFQVAEKPKG

SEQ ID NO: 20136 - protein, 249 aa, Neisseria meningitidis; identical to SEQ ID NO: 131

SEQ ID NO: 20137 - protein, 56 aa, Neisseria meningitidis; identical to SEQ ID NO: 326

SEQ ID NO: 20138 - protein, 321 aa, Neisseria meningitidis; identical to SEQ ID NO: 2168

SEQ ID NO: 20139 - protein, 43 aa, Neisseria meningitidis; identical to SEQ ID NO: 3165

SEQ ID NO: 20140 - protein, 355 aa, Neisseria meningitidis
MRKILVTGGAGFIGSAVVRHIIRNTQDSVVNLDKLTYAGNLESLTDIADNPRYAFEQVDICDRAELDRVFAQHRPDAVMHLAAESHVDRSIGSAGEFIQTNIVGTFNLLEAARAYWQQMPSEQHEAFRFHHISTDEVYGDLGGTDDLFTETTPYAPSSPYSASKASSDHLVRAWQRTYGLPTIVTNCSNNYGPYHFPEKLIPLMILNALDGKPLPVYGDGMQIRDWLFVEDHARALYQVVTEGVVGETYNIGGHNEKANIEVVKTICALLEELVPEKPAGVARYEDLITFVQDRPGHDVRYAVDAAKIRRDLGWLPLETFESGLRKTVQWYLDNKTWWQNVLNGSYRLERLGTGK

SEQ ID NO: 20141 - protein, 75 aa, Neisseria meningitidis; identical to SEQ ID NO: 1870

SEQ ID NO: 20142 - protein, 203 aa, Neisseria meningitidis; identical to SEQ ID NO: 9855

SEQ ID NO: 20143 - protein, 400 aa, Neisseria meningitidis; identical to SEQ ID NO: 8056

SEQ ID NO: 20144 - protein, 71 aa, Neisseria meningitidis; identical to SEQ ID NO: 2068

SEQ ID NO: 20145 - protein, 250 aa, Neisseria meningitidis; identical to SEQ ID NO: 8038

SEQ ID NO: 20146 - protein, 78 aa, Neisseria meningitidis; identical to SEQ ID NO: 1246

SEQ ID NO: 20147 - protein, 595 aa, Neisseria meningitidis; identical to SEQ ID NO: 8320

SEQ ID NO: 20148 - protein, 365 aa, Neisseria meningitidis; identical to SEQ ID NO: 11

SEQ ID NO: 20149 - protein, 531 aa, Neisseria meningitidis; identical to SEQ ID NO: 8669

SEQ ID NO: 20150 - protein, 244 aa, Neisseria meningitidis
VNEKTDQKAVSAQQAKEQTSFNNPEPMTGFEHTVTFDFQGTKMVIPYGYLARYTQDNATKWLSDTPGQDAYSINLIEISVYYKKTDQGWVLEPYNQQNKAHFIQFLRDGLDSVDDIVIRKDACSLSTTMGERLLTYGVKKMPSAYPEYEAYEDKRHIPENPYFHEFYYIKKGENPAIITHRNNRINQTEEDSYSTSVGSCINGFTVQYYPFIREKQQLTQQELVGYHQQVEQLVQSFVNNSNKK

SEQ ID NO: 20151 - protein, 207 aa, Neisseria meningitidis; identical to SEQ ID NO: 10083

SEQ ID NO: 20152 - protein, 769 aa, Neisseria meningitidis; identical to SEQ ID NO: 8897

SEQ ID NO: 20153 - protein, 291 aa, Neisseria meningitidis; identical to SEQ ID NO: 2244

SEQ ID NO: 20154 - protein, 468 aa, Neisseria meningitidis
MKLFQRIFATFCAVIVCAIFVASFSFWLVQNTLAENQFNQRRTIETTLMGSIISAFRARGDAGAREILTEWKDSPVSSGVYVIQGDEKKDILNRYIDSYTIERARLFAAGHPHSNLVHIEYDRFGEEYLFFTKDWDKLQARRLPSPLLIPGLPLAPIWHELIILSFIIVVGLLMAYILAGNIAKPIRILGNGMDRVANGELETRISQQVDDRDDELSHLAIQFDKMVKKLEKLVAKERHLLHHVSHEMRSPLARMQAIVGLIQAQPQKQEQYLKRLEGELTRMDTLAGELLTLSRLETSNMALEKESLKLLPFLGNLVEDNQSIAQKNGQTVTLSADGKIPENTTILANESYLYRAFDNVIRNAVNYSPEGSTILINIGQDHKHWIIDVTDNGPGVDEMQLPHIFTAFYRADSSANKPGTGLGLALTQHIIEQHCGKIIAENIKPNGLRMRFILPKKKTGSKTEKSAN

SEQ ID NO: 20155 - protein, 520 aa, Neisseria meningitidis
LFEVMKKPLISVAAALLGVALGTPYYLGVKAEESLTQQQKILQETGFLTVESHQYERGWFTSMETTVIRLKPELLNNARKYLPDNLKTVLEQPVTLVNHITHGPFAGGFGTQAHIETEFKYAPETEKVLERFFGKQAPVSLANTVYFNGSGKMEVSVPAFDYEELSGIRLHWEGLTGKTVYQKGFKSYRNSYDAPLFKIKLADKGDAAFEKAHFDSETSDGINPLALGSSNLTLEKFSLEWKEGVDYNVKLNELVNLVTDLQIGAFINPNGSIAPSKIEVGKLAFSTKTGESGSFINSEGQFRFDTLVYGNEKYGPLDIHIAAEHLDASALTVLKRKFAQISAKKMTEEQIRNDLIAAVKGEASGLFTNNPVLDIKTFRFTQPSGKIDVGGKIMFKDMKKEDLNQLGLMLKKTEADIRMSIPQKMLEDLAVSQAGNIFSVNAEDEAEGRASLDDINETLRLMVDSTVQSMAREKYLTLNGDQIDTAISLKNNQLKLNGKTLQNEPEPDFDEAGMVSEPQQ

SEQ ID NO: 20156 - protein, 210 aa, Neisseria meningitidis; identical to SEQ ID NO: 5679

SEQ ID NO: 20157 - protein, 861 aa, Neisseria meningitidis; identical to SEQ ID NO: 8200

SEQ ID NO: 20158 - protein, 119 aa, Neisseria meningitidis; identical to SEQ ID NO: 9294

SEQ ID NO: 20159 - protein, 60 aa, Neisseria meningitidis; identical to SEQ ID NO: 3237

SEQ ID NO: 20160 - protein, 98 aa, Neisseria meningitidis; identical to SEQ ID NO: 9060

SEQ ID NO: 20161 - protein, 281 aa, Neisseria meningitidis; identical to SEQ ID NO: 3753

SEQ ID NO: 20162 - protein, 1454 aa, Neisseria meningitidis; identical to SEQ ID NO: 8488

SEQ ID NO: 20163 - protein, 221 aa, Neisseria meningitidis; identical to SEQ ID NO: 6360

SEQ ID NO: 20164 - protein, 234 aa, Neisseria meningitidis; identical to SEQ ID NO: 2554

SEQ ID NO: 20165 - protein, 46 aa, Neisseria meningitidis; identical to SEQ ID NO: 13095

SEQ ID NO: 20166 - protein, 153 aa, Neisseria meningitidis
MTEVIAYLIEHFQDFDTCPPPEDLGMLLEEAGFDTMEIGNTLMMMEVLLNSSEFSTEPADSGALRVYSKEETDNLPQEVMGLMQYLIEEKAVSCEQREIIIHALMHIPGDEITVDTAKVLTLLLLWANKSELPVLVGDELMSALLLDNKPTMN

SEQ ID NO: 20167 - protein, 339 aa, Neisseria meningitidis
MKKILVTGGTGFIGSHTVVSLLKSGHQVVILDNLCNSSINILPRLKTITGQEIPFYQGDIRDREILRRIFAENRIDSVIHFAGLKAVGESVAEPMKYYDNNVSGSLVLAEEMARAGVFSIVFSSSATVYGDPGKVPYTEDMPLGDTTSPYGTSKSMVERILTDIQKADPRWSMILLRYFNPIGAHESGLIGEQPNGIPNNLLPYICQVAAGKLPQLAVFGDDYPTPDGTGMRDYIHVMDLAEGHVAAMQAKSNVAGTHLLNLGSGRASSVLEIIRAFEAASGLTIPYEVKPRRAGDLACFYADPSYTKAQIGWQTQRDLAQMMEDSWRWVSNNPNGYDD

SEQ ID NO: 20168 - protein, 183 aa, Neisseria meningitidis; identical to SEQ ID NO: 1173

SEQ ID NO: 20169 - protein, 296 aa, Neisseria meningitidis; identical to SEQ ID NO: 64

SEQ ID NO: 20170 - protein, 84 aa, Neisseria meningitidis; identical to SEQ ID NO: 3897

SEQ ID NO: 20171 - protein, 545 aa, Neisseria meningitidis; identical to SEQ ID NO: 3410

SEQ ID NO: 20172 - protein, 209 aa, Neisseria meningitidis; identical to SEQ ID NO: 4591

SEQ ID NO: 20173 - protein, 299 aa, Neisseria meningitidis; identical to SEQ ID NO: 8260

SEQ ID NO: 20174 - protein, 96 aa, Neisseria meningitidis; identical to SEQ ID NO: 3692

SEQ ID NO: 20175 - protein, 859 aa, Neisseria meningitidis; identical to SEQ ID NO: 9145

SEQ ID NO: 20176 - protein, 99 aa, Neisseria meningitidis
MKKMFVLFCMLFSCAFSLAAVNINAASQQELEALPGIGPAKAKAIAEYRAQNGAFKSVDDLTKVKGIGPAVLAKLKDQASVGAPAPKAPAKPALPAAKK

SEQ ID NO: 20177 - protein, 367 aa, Neisseria meningitidis; identical to SEQ ID NO: 8815

SEQ ID NO: 20178 - protein, 332 aa, Neisseria meningitidis; identical to SEQ ID NO: 8882

SEQ ID NO: 20179 - protein, 351 aa, Neisseria meningitidis; identical to SEQ ID NO: 5145

SEQ ID NO: 20180 - protein, 69 aa, Neisseria meningitidis; identical to SEQ ID NO: 8208

SEQ ID NO: 20181 - protein, 248 aa, Neisseria meningitidis; identical to SEQ ID NO: 9621

SEQ ID NO: 20182 - protein, 225 aa, Neisseria meningitidis; identical to SEQ ID NO: 11744

SEQ ID NO: 20183 - protein, 213 aa, Neisseria meningitidis; identical to SEQ ID NO: 2765

SEQ ID NO: 20184 - protein, 290 aa, Neisseria meningitidis; identical to SEQ ID NO: 8335

SEQ ID NO: 20185 - protein, 290 aa, Neisseria meningitidis; identical to SEQ ID NO: 8768

SEQ ID NO: 20186 - protein, 109 aa, Neisseria meningitidis; identical to SEQ ID NO: 11160

SEQ ID NO: 20187 - protein, 288 aa, Neisseria meningitidis; identical to SEQ ID NO: 8706

SEQ ID NO: 20188 - protein, 313 aa, Neisseria meningitidis; identical to SEQ ID NO: 9189

SEQ ID NO: 20189 - protein, 110 aa, Neisseria meningitidis; identical to SEQ ID NO: 8460

SEQ ID NO: 20190 - protein, 104 aa, Neisseria meningitidis; identical to SEQ ID NO: 1772

SEQ ID NO: 20191 - protein, 206 aa, Neisseria meningitidis; identical to SEQ ID NO: 8548

SEQ ID NO: 20192 - protein, 433 aa, Neisseria meningitidis; identical to SEQ ID NO: 2404

SEQ ID NO: 20193 - protein, 283 aa, Neisseria meningitidis; identical to SEQ ID NO: 9103

SEQ ID NO: 20194 - protein, 152 aa, Neisseria meningitidis; identical to SEQ ID NO: 3595

SEQ ID NO: 20195 - protein, 165 aa, Neisseria meningitidis; identical to SEQ ID NO: 8999

SEQ ID NO: 20196 - protein, 317 aa, Neisseria meningitidis; identical to SEQ ID NO: 18507

SEQ ID NO: 20197 - protein, 100 aa, Neisseria meningitidis; identical to SEQ ID NO: 15025

SEQ ID NO: 20198 - protein, 58 aa, Neisseria meningitidis; identical to SEQ ID NO: 903

SEQ ID NO: 20199 - protein, 701 aa, Neisseria meningitidis; identical to SEQ ID NO: 1407

SEQ ID NO: 20200 - protein, 178 aa, Neisseria meningitidis; identical to SEQ ID NO: 1654

SEQ ID NO: 20201 - protein, 158 aa, Neisseria meningitidis; identical to SEQ ID NO: 9043

SEQ ID NO: 20202 - protein, 1071 aa, Neisseria meningitidis; identical to SEQ ID NO: 373

SEQ ID NO: 20203 - protein, 370 aa, Neisseria meningitidis
MSTFFQQTAQAMIAKHIDRFPLLKLDQVIDWQPIEQYLNRQKNRYLRDHRGRPAYPLLSMFKAVLLGQWHSLSDPELEHSLITRIDFNLFCRFDELSIPDYSTLCRYRNWLAQDDTLSELLELINCQLTEKGLKIEKASAAVIDATIIQTAGSEQRQAIEVDEEGQVSGQTTLSKDKNARWTKKNSLYKLGYKQHTRTDAEGYIEKLYITPTNAHECTHLSPLLEGLPKGTTVYADKGYDSKENRQHLKEHRLQNGIMRKACRNRPLTETQTKRNRYLSKTRYSGLNLNQDKATKPQTVQIVRQGEATPYWFKFNPLYVVEQSFGTLHRKFRYARAAYFGLIKVSAQSHLKAMCLNLLKAANRLSAPAAA

SEQ ID NO: 20204 - protein, 161 aa, Neisseria meningitidis; identical to SEQ ID NO: 5306

SEQ ID NO: 20205 - protein, 149 aa, Neisseria meningitidis; identical to SEQ ID NO: 3816

SEQ ID NO: 20206 - protein, 349 aa, Neisseria meningitidis; identical to SEQ ID NO: 328

SEQ ID NO: 20207 - protein, 808 aa, Neisseria meningitidis
MSIPFKPVLAAAAIAQAFPAFAADPAPQSAQTLNEITVTGTHKTQKLGEEKIRRKTLDKLLVNDEHDLVRYDPGISVVEGGRAGSNGFTIRGVDKDRVAINVDGLAQAESRSSEAFQELFGAYGNFNANRNTSEPENFSEVTITKGADSLKSGSGALGGAVNYQTKSASDYVSEDKPYHLGIKGGSVGKNSQKFSSITAAGRLFGLDALLVYTRRFGKETKNRSTEGDVKIENKGYVFSPTQSFSKYQTYVATGVARSQPDPQEWVNKSTLFKLGYNFNDRNRIGWIFEDSRTDRFTNELSNLWTGTIYSPATGDYRHRQDVSYRRRSGVEYKNELEHGPWDSLKLRYDKQRIDMNTWTWDIPKNYDLRGINSEVYHSFRHIRQNTAQWTADFEKQLDFSKAVWAAQYGLGGGRGDNANSDYSYFVKLYDPKIFTSNQAKITMLIESRSKYKFAYWNNAFHLGGNDRFRLNAGIRYDKNSSSAKDDPKYTTAIRGQIPHLGSERAHAGFSYGTGFDWRFTKHLHLLAKYSTGFRAPTSDETWLLFPHPDFYLKANPNLKAETAKNFELGLAGSGKAGNFKFSGFQTRYRNFIELTYMGVSSDKPNSPNYAPISDGTALVSSPVWQNQNRSSAWVKGLEFNGTWNLDSIGLPQGTHAGVNVSYIKGKAKQTNGQETPINALSPWSAVYNLGYDAPSKRWGINAYATRTAAKKPSDTVHSNDDLNNPWPYAKHSKAYTLFDLSAYLNIGKQVTLRAAAYNITNKQYYTWESLRSIREFGTVNRVDNKTHAGIQRFTSPGRSYNFTIEAKF

SEQ ID NO: 20208 - protein, 768 aa, Neisseria meningitidis; identical to SEQ ID NO: 1700

SEQ ID NO: 20209 - protein, 41 aa, Neisseria meningitidis; identical to SEQ ID NO: 9208

SEQ ID NO: 20210 - protein, 505 aa, Neisseria meningitidis; identical to SEQ ID NO: 9268

SEQ ID NO: 20211 - protein, 122 aa, Neisseria meningitidis; identical to SEQ ID NO: 218

SEQ ID NO: 20212 - protein, 107 aa, Neisseria meningitidis; identical to SEQ ID NO: 178

SEQ ID NO: 20213 - protein, 948 aa, Neisseria meningitidis; identical to SEQ ID NO: 2444

SEQ ID NO: 20214 - protein, 157 aa, Neisseria meningitidis; identical to SEQ ID NO: 9212

SEQ ID NO: 20215 - protein, 446 aa, Neisseria meningitidis; identical to SEQ ID NO: 8085

SEQ ID NO: 20216 - protein, 144 aa, Neisseria meningitidis; identical to SEQ ID NO: 4260

SEQ ID NO: 20217 - protein, 171 aa, Neisseria meningitidis; identical to SEQ ID NO: 10580

SEQ ID NO: 20218 - protein, 404 aa, Neisseria meningitidis; identical to SEQ ID NO: 756

SEQ ID NO: 20219 - protein, 169 aa, Neisseria meningitidis; identical to SEQ ID NO: 8109

SEQ ID NO: 20220 - protein, 172 aa, Neisseria meningitidis; identical to SEQ ID NO: 8750

SEQ ID NO: 20221 - protein, 589 aa, Neisseria meningitidis; identical to SEQ ID NO: 6024

SEQ ID NO: 20222 - protein, 64 aa, Neisseria meningitidis; identical to SEQ ID NO: 2003

SEQ ID NO: 20223 - protein, 39 aa, Neisseria meningitidis; identical to SEQ ID NO: 8648

SEQ ID NO: 20224 - protein, 81 aa, Neisseria meningitidis; identical to SEQ ID NO: 7714

SEQ ID NO: 20225 - protein, 125 aa, Neisseria meningitidis; identical to SEQ ID NO: 3172

SEQ ID NO: 20226 - protein, 504 aa, Neisseria meningitidis; identical to SEQ ID NO: 9282

SEQ ID NO: 20227 - protein, 366 aa, Neisseria meningitidis; identical to SEQ ID NO: 8931

SEQ ID NO: 20228 - protein, 140 aa, Neisseria meningitidis; identical to SEQ ID NO: 3245

SEQ ID NO: 20229 - protein, 56 aa, Neisseria meningitidis; identical to SEQ ID NO: 3693

SEQ ID NO: 20230 - protein, 201 aa, Neisseria meningitidis; identical to SEQ ID NO: 2357

SEQ ID NO: 20231 - protein, 615 aa, Neisseria meningitidis; identical to SEQ ID NO: 5697

SEQ ID NO: 20232 - protein, 597 aa, Neisseria meningitidis
MQLDIDRLVAYFGGVNALAEALKQHDPENAATTAAIYKWRTRGSLPLAQLQKLTALAESQGRPLDLNAFLQKNESLERTEMTQANRVIIFDTTLRDGEQSPGAAMTKEEKIRVARQLEKLGVDIIEAGFAAASPGDFEAVNAIAKTITKSTVCSLSRAIERDIRQAGEAVAPAPKKRIHTFIATSPIHMEYKLKMKPKQVIEAAVKAVKIAREYTDDVEFSCEDALRSEIDFLAEICGAVIEAGATTINIPDTVGYSIPYKTEEFFRELIVKTPNGGKVVWSAHCHNDLGLAVANSLAALKGGARQVECTVNGLGERAGNASVEEIVMALKVRHDLFGLETGIDTTQIVPSSKLVSTITGYPVQPNKAIVGANAFLHESGIHQDGVLKHRETYEIMSAESVGWATNRLSLGKLSGRNAFKTKLADLGIELESEEALNAAFARFKELADKKREIFDEDLHALVSDEMGSMNAESYKFISQKISTETGEEPRADIVFSIKGEEKRASATGSGPVDAIFKAIESVAQSGATLQIYSVNAVTQGTESQGETSVRLARGNRVVNGQGADTDVLVATAKAYLSALSKLEFSAAKPKAQGSGTI

SEQ ID NO: 20233 - protein, 63 aa, Neisseria meningitidis; identical to SEQ ID NO: 5865

SEQ ID NO: 20234 - protein, 342 aa, Neisseria meningitidis; identical to SEQ ID NO: 8555

SEQ ID NO: 20235 - protein, 284 aa, Neisseria meningitidis; identical to SEQ ID NO: 1957

SEQ ID NO: 20236 - protein, 332 aa, Neisseria meningitidis; identical to SEQ ID NO: 9339

SEQ ID NO: 20237 - protein, 268 aa, Neisseria meningitidis; identical to SEQ ID NO: 9528

SEQ ID NO: 20238 - protein, 90 aa, Neisseria meningitidis; identical to SEQ ID NO: 311

SEQ ID NO: 20239 - protein, 60 aa, Neisseria meningitidis; identical to SEQ ID NO: 2288

SEQ ID NO: 20240 - protein, 962 aa, Neisseria meningitidis; identical to SEQ ID NO: 9314

SEQ ID NO: 20241 - protein, 557 aa, Neisseria meningitidis; identical to SEQ ID NO: 8746

SEQ ID NO: 20242 - protein, 123 aa, Neisseria meningitidis; identical to SEQ ID NO: 9198

SEQ ID NO: 20243 - protein, 590 aa, Neisseria meningitidis; identical to SEQ ID NO: 10811

SEQ ID NO: 20244 - protein, 250 aa, Neisseria meningitidis
MITLPSLNNLPSKWDEIRHCLETRVFECGVMPHPNLTECEAGQFDRDFWDNTGCAPEEYVRIRRAIRLLEVRYPDSLNELVCAAIATPLGEMLAVFGNKGLCLLEFVGQKHLEQEIAAVQKALRGRFVFREDERTQLLRQELDLYFKGRLKTFATPLEQIGTEFQKQAWDALLAIPYGETRSYKEQAQRLGNPKAVRAVAAANGQNKVSILIPCHRVIGSDGKLTGYAGGLNRKQFLLALERGEVQTALF

SEQ ID NO: 20245 - protein, 735 aa, Neisseria meningitidis; identical to SEQ ID NO: 8656

SEQ ID NO: 20246 - protein, 191 aa, Neisseria meningitidis; identical to SEQ ID NO: 119

SEQ ID NO: 20247 - protein, 153 aa, Neisseria meningitidis
  misc_feature 148, 149: 'Xaa' is any amino acid
MCKPNYGGIVLLPLLLASCIGGNFGVQPVVESTPTAYPVTFKSKDVPTSPPAKPSIETTPVNQPAVGAAMRLPRRNIATFDKNGNEIPDSKQAEEYLPLKEEDILFLDGTPQEQADKLKKKINERYPDVKVITSTNEDAKYNYRFVRXXHTLN

SEQ ID NO: 20248 - protein, 186 aa, Neisseria meningitidis; identical to SEQ ID NO: 1480

SEQ ID NO: 20249 - protein, 41 aa, Neisseria meningitidis; identical to SEQ ID NO: 2201

SEQ ID NO: 20250 - protein, 475 aa, Neisseria meningitidis; identical to SEQ ID NO: 3427

SEQ ID NO: 20251 - protein, 136 aa, Neisseria meningitidis; identical to SEQ ID NO: 3682

SEQ ID NO: 20252 - protein, 395 aa, Neisseria meningitidis; identical to SEQ ID NO: 13319

SEQ ID NO: 20253 - protein, 304 aa, Neisseria meningitidis; identical to SEQ ID NO: 3139

SEQ ID NO: 20254 - protein, 174 aa, Neisseria meningitidis; identical to SEQ ID NO: 9477

SEQ ID NO: 20255 - protein, 247 aa, Neisseria meningitidis; identical to SEQ ID NO: 9788

SEQ ID NO: 20256 - protein, 151 aa, Neisseria meningitidis; identical to SEQ ID NO: 9430

SEQ ID NO: 20257 - protein, 451 aa, Neisseria meningitidis; identical to SEQ ID NO: 2532

SEQ ID NO: 20258 - protein, 356 aa, Neisseria meningitidis; identical to SEQ ID NO: 2047

SEQ ID NO: 20259 - protein, 287 aa, Neisseria meningitidis; identical to SEQ ID NO: 3310

SEQ ID NO: 20260 - protein, 58 aa, Neisseria meningitidis; identical to SEQ ID NO: 2174

SEQ ID NO: 20261 - protein, 204 aa, Neisseria meningitidis
MTQCRLKGQAFRRHTTPQHAAQHRARRVPPRPKPDKQTEKEKGNTMKHILPLIAASALCISTASAHPASEPQTQNETAMTTHTLTSKYSFDETVSRLETAIKSKGMDIFAVIDHQEAAHRNGLTMQPAKVIVFGTPKAGTPLMVKDPAFALQLPLRVLVTETDGKVRAAYTDTRALIAGSRIGFDEVANTLANAEKLIQKTVGE

SEQ ID NO: 20262 - protein, 105 aa, Neisseria meningitidis; identical to SEQ ID NO: 9830

SEQ ID NO: 20263 - protein, 720 aa, Neisseria meningitidis; identical to SEQ ID NO: 8900

SEQ ID NO: 20264 - protein, 244 aa, Neisseria meningitidis; identical to SEQ ID NO: 8785

SEQ ID NO: 20265 - protein, 241 aa, Neisseria meningitidis; identical to SEQ ID NO: 2918

SEQ ID NO: 20266 - protein, 395 aa, Neisseria meningitidis; identical to SEQ ID NO: 9319

SEQ ID NO: 20267 - protein, 144 aa, Neisseria meningitidis; identical to SEQ ID NO: 3606

SEQ ID NO: 20268 - protein, 211 aa, Neisseria meningitidis; identical to SEQ ID NO: 8340

SEQ ID NO: 20269 - protein, 179 aa, Neisseria meningitidis; identical to SEQ ID NO: 8483

SEQ ID NO: 20270 - protein, 103 aa, Neisseria meningitidis; identical to SEQ ID NO: 3104

SEQ ID NO: 20271 - protein, 102 aa, Neisseria meningitidis; identical to SEQ ID NO: 254

SEQ ID NO: 20272 - protein, 295 aa, Neisseria meningitidis; identical to SEQ ID NO: 11098

SEQ ID NO: 20273 - protein, 255 aa, Neisseria meningitidis; identical to SEQ ID NO: 3233

SEQ ID NO: 20274 - protein, 553 aa, Neisseria meningitidis; identical to SEQ ID NO: 8891

SEQ ID NO: 20275 - protein, 238 aa, Neisseria meningitidis; identical to SEQ ID NO: 945

SEQ ID NO: 20276 - protein, 335 aa, Neisseria meningitidis; identical to SEQ ID NO: 9067

SEQ ID NO: 20277 - protein, 742 aa, Neisseria meningitidis; identical to SEQ ID NO: 1054

SEQ ID NO: 20278 - protein, 144 aa, Neisseria meningitidis; identical to SEQ ID NO: 3841

SEQ ID NO: 20279 - protein, 154 aa, Neisseria meningitidis; identical to SEQ ID NO: 9555

SEQ ID NO: 20280 - protein, 239 aa, Neisseria meningitidis; identical to SEQ ID NO: 11311

SEQ ID NO: 20281 - protein, 346 aa, Neisseria meningitidis
MNTPIPFSERLIRWQKQHGRHHLPWQVKNPYCVWLSEIMLQQTQVATVLDYYPRFLEKFPTVQTLAAAPQDEVLSLWAGLGYYSRARNLHKAAQQVVRQFGGTFPSERKDLETLCGVGRSTAAAISAFSFNRRETILDGNVKRVLCRVFARDGNPQDKKFENSLWTLAESLLPSENADMPAYTQGLMDLGATVCKRTKPLCHQCPMADICEAKKQNRTAELPRKKTAAEVPTLPLYWLIVRNRDGAILLEKRPAKGIWGGLYCVPCFESLNGLSDFAAKFSLTMADMDEQTALTHRLTHRLLMITPFEGQMPSESPSDGIWIKPAHLKDYGLPKPLEIYLNGNRLE

SEQ ID NO: 20282 - protein, 367 aa, Neisseria meningitidis; identical to SEQ ID NO: 1944

SEQ ID NO: 20283 - protein, 51 aa, Neisseria meningitidis; identical to SEQ ID NO: 1536

SEQ ID NO: 20284 - protein, 868 aa, Neisseria meningitidis; identical to SEQ ID NO: 8866

SEQ ID NO: 20285 - protein, 374 aa, Neisseria meningitidis; identical to SEQ ID NO: 8348

SEQ ID NO: 20286 - protein, 122 aa, Neisseria meningitidis
MRHYEIVFIVHPDQSEQVPAMVERYKTMIAEANGKIHRLEDWGRRQLAYPINKIHKAHYVLMNIETTPEVVEELETAFRFNDAVLRHLTIKTKHAVTEASPMLGGEKAKNLLIGASEEAVAQ

SEQ ID NO: 20287 - protein, 377 aa, Neisseria meningitidis; identical to SEQ ID NO: 2738

SEQ ID NO: 20288 - protein, 171 aa, Neisseria meningitidis; identical to SEQ ID NO: 3235

SEQ ID NO: 20289 - protein, 305 aa, Neisseria meningitidis; identical to SEQ ID NO: 1198

SEQ ID NO: 20290 - protein, 300 aa, Neisseria meningitidis; identical to SEQ ID NO: 2507

SEQ ID NO: 20291 - protein, 187 aa, Neisseria meningitidis; identical to SEQ ID NO: 784

SEQ ID NO: 20292 - protein, 1069 aa, Neisseria meningitidis; identical to SEQ ID NO: 10677

SEQ ID NO: 20293 - protein, 144 aa, Neisseria meningitidis; identical to SEQ ID NO: 528

SEQ ID NO: 20294 - protein, 447 aa, Neisseria meningitidis
MEDKQGMKKAVAGVMTDASSDGRKPATASNLPPLSNRGGTETETAGRVQEVFECYEKYITDGKGNLLGVPLRRGVSDSAFIDQISFSFHEKTFFDKYGVRVSLLEDEDFIRAASMLAEEVFGFCIYKESKGSGGRFYERCWLMGSEDVLYGRVHFGGQNNTILFELTGTGCGVAKEGWESRLFAFLTNAIRPKITRVDIAKDFFNGEYSPNQAREDRNKGMFTCHHVKPKGECLGSDWEEDDEAKMTKGKTYGIGSRESSKYVRVYEKGKQLGDKTSTWTRFEIEFKAKDIVIPFEVLQNPGEYFGGAYPICERFAQKATRIHAVKEDKVISADRYLEWVKKQFGRAANGLKFIFPELDKAKLFELIEPSHHKLPKSLAPEAYDCAFLKAQAIHEQPAFKPYKDPYYMYEYYENLEKQLEQQKHVNNEESYNNFIYDKFARLPISWA

SEQ ID NO: 20295 - protein, 218 aa, Neisseria meningitidis; identical to SEQ ID NO: 8933

SEQ ID NO: 20296 - protein, 79 aa, Neisseria meningitidis; identical to SEQ ID NO: 1083

SEQ ID NO: 20297 - protein, 377 aa, Neisseria meningitidis; identical to SEQ ID NO: 8331

SEQ ID NO: 20298 - protein, 709 aa, Neisseria meningitidis; identical to SEQ ID NO: 9021

SEQ ID NO: 20299 - protein, 240 aa, Neisseria meningitidis; identical to SEQ ID NO: 8693

SEQ ID NO: 20300 - protein, 88 aa, Neisseria meningitidis; identical to SEQ ID NO: 255

SEQ ID NO: 20301 - protein, 130 aa, Neisseria meningitidis; identical to SEQ ID NO: 1661

SEQ ID NO: 20302 - protein, 240 aa, Neisseria meningitidis; identical to SEQ ID NO: 2593

SEQ ID NO: 20303 - protein, 279 aa, Neisseria meningitidis; identical to SEQ ID NO: 9175

SEQ ID NO: 20304 - protein, 228 aa, Neisseria meningitidis; identical to SEQ ID NO: 7245

SEQ ID NO: 20305 - protein, 194 aa, Neisseria meningitidis; identical to SEQ ID NO: 9341

SEQ ID NO: 20306 - protein, 69 aa, Neisseria meningitidis; identical to SEQ ID NO: 7188

SEQ ID NO: 20307 - protein, 129 aa, Neisseria meningitidis; identical to SEQ ID NO: 8759

SEQ ID NO: 20308 - protein, 470 aa, Neisseria meningitidis; identical to SEQ ID NO: 8949

SEQ ID NO: 20309 - protein, 107 aa, Neisseria meningitidis; identical to SEQ ID NO: 1970

SEQ ID NO: 20310 - protein, 90 aa, Neisseria meningitidis; identical to SEQ ID NO: 9290

SEQ ID NO: 20311 - protein, 146 aa, Neisseria meningitidis; identical to SEQ ID NO: 5620

SEQ ID NO: 20312 - protein, 39 aa, Neisseria meningitidis; identical to SEQ ID NO: 2850

SEQ ID NO: 20313 - protein, 185 aa, Neisseria meningitidis; identical to SEQ ID NO: 5793

SEQ ID NO: 20314 - protein, 637 aa, Neisseria meningitidis; identical to SEQ ID NO: 8022

SEQ ID NO: 20315 - protein, 816 aa, Neisseria meningitidis; identical to SEQ ID NO: 9691

SEQ ID NO: 20316 - protein, 215 aa, Neisseria meningitidis; identical to SEQ ID NO: 8650

SEQ ID NO: 20317 - protein, 120 aa, Neisseria meningitidis; identical to SEQ ID NO: 9052

SEQ ID NO: 20318 - protein, 263 aa, Neisseria meningitidis
MNVYFLGGGNMAAAVAGGLVKQGGYRIYIANRGAEKRERLEKELGVETSATLPELHSDDVLILAVKPQDMEAACKNICTNGALVLSVAAGLSVDTLSRYLGGSRRIVRVMPNTPGKIGLGVSGMYAEAEVSETDCKIADRIMKSVGLTVWLEDEVQMHSITGISGSGPAYVFYLLDALQNAAIRQGFDMAEARALSLATFKGAVALAEQTGEDFEKLQKNVTSKGGTTHEAVEAFRRHRVAEAISEGVCACVRRSQEMERQYQ

SEQ ID NO: 20319 - protein, 122 aa, Neisseria meningitidis; identical to SEQ ID NO: 9390

SEQ ID NO: 20320 - protein, 321 aa, Neisseria meningitidis; identical to SEQ ID NO: 4435

SEQ ID NO: 20321 - protein, 503 aa, Neisseria meningitidis; identical to SEQ ID NO: 8681

SEQ ID NO: 20322 - protein, 319 aa, Neisseria meningitidis
MSKKTKQELENNKLSKRLRHAVGDAINDFNMIEPDDKIMVCLSGGKDSYALLDILRQLQASAPIDFELVAVNLDQKQPGFPEEVLPTYLESIGVPYKIVEEDTYSTVKRVLDEGKTTCSLCSRLRRGILYRTAKELGCTKIALGHHRDDILATMFLNMFYGGKLKAMPPKLVSDNGAHIVIRPLAYVKEKDLIKYAELKQFPIIPCNLCGSQPNLQRQVIGDMLRDWDKRFPGRIESMFSALQNVVPSHLADTELFDFAGLERGQTLKHGGDLAFDSEKMPERFSDGSEEDESEIKIAPQKAERKVINILANKPKTCGA

SEQ ID NO: 20323 - protein, 404 aa, Neisseria meningitidis
MSEVEYFSHFISDGKGKLLEIPQRRGKQDGVFVDWISFTFHEDTLLKVSGCPLFSDAEYMYVLSRKLEEILGFGITRKCKSRGNKFYESMYRLGSDDVDYGEVHFGGQRNTVLVELKGTGCSVASPGWELRLKQFLDDSIRTRITRIDLALDFFDGEYTPDQALLDHDNGFFDNSNQRPKSETIGTAWRNEDGSGKTFYVGRKKNSRFVRVYEKGRQLGDKESKWVRFEIQFNYGDIEIPLDILINQGSYFCGAFPICRKFKNMPVPERFDQRKKTLNLTFEHKLHYAKNAVGKLVNFMIEMGFDNSEIVESLKADSGFPKGLEPEKYALEMLRDGLKHGFIHEQPDIDLEIELDELGVIAFKNSDKFDREKRLFSPDYDAEKERKYQDYLDEVYHQNVNYDYF

SEQ ID NO: 20324 - protein, 67 aa, Neisseria meningitidis; identical to SEQ ID NO: 86

SEQ ID NO: 20325 - protein, 453 aa, Neisseria meningitidis; identical to SEQ ID NO: 9644

SEQ ID NO: 20326 - protein, 117 aa, Neisseria meningitidis; identical to SEQ ID NO: 9330

SEQ ID NO: 20327 - protein, 242 aa, Neisseria meningitidis; identical to SEQ ID NO: 8064

SEQ ID NO: 20328 - protein, 176 aa, Neisseria meningitidis; identical to SEQ ID NO: 2300

SEQ ID NO: 20329 - protein, 405 aa, Neisseria meningitidis
MMKIKALMIAAALLAAADVHAAPQKAKTASAKAAKAAKAAKAAKAAKAAKVAKVAKVAKVAKVAKVAKVAKVAKVAKVAKVAKVAKVAKVAKVAKVAKVAKVAKVAKVAATAQKEAAPAQQQGGIRFSDGIAAVADNEVITRRRLAEAVSEAKANLPKDAQISESELSRQVLMQLVNQSLIVQAGKRRNIQASEAEIDAVVAKNPALKNLSPAQRRDFADNIIAEKVRQQAVMQNSRVSEAEIDAFLEQAQKQGITLPEGAPLRQYRAQHILIKADSENAAVGAESTIRKIYGEARSGTDFSSLARQYSQDASAGNGGDLGWFADGVMVPAFEEAVHALKPGQVGAPVRTQFGWHIIKLNEVRDAGTPQERIRNSVRQYIFQQKAEQATVNLLRDLHSGAYVDIR

SEQ ID NO: 20330 - protein, 316 aa, Neisseria meningitidis; identical to SEQ ID NO: 6852

SEQ ID NO: 20331 - protein, 151 aa, Neisseria meningitidis; identical to SEQ ID NO: 11451

SEQ ID NO: 20332 - protein, 213 aa, Neisseria meningitidis; identical to SEQ ID NO: 2602

SEQ ID NO: 20333 - protein, 280 aa, Neisseria meningitidis; identical to SEQ ID NO: 986

SEQ ID NO: 20334 - protein, 729 aa, Neisseria meningitidis; identical to SEQ ID NO: 10833

SEQ ID NO: 20335 - protein, 407 aa, Neisseria meningitidis; identical to SEQ ID NO: 8906

SEQ ID NO: 20336 - protein, 461 aa, Neisseria meningitidis; identical to SEQ ID NO: 4603

SEQ ID NO: 20337 - protein, 52 aa, Neisseria meningitidis
MIGAVSFESAHRDECPRAVPIPVCRLFRIGCRREMTDGYRNGGRRKWEEMTD

SEQ ID NO: 20338 - protein, 99 aa, Neisseria meningitidis; identical to SEQ ID NO: 3406

SEQ ID NO: 20339 - protein, 495 aa, Neisseria meningitidis; identical to SEQ ID NO: 2837

SEQ ID NO: 20340 - protein, 188 aa, Neisseria meningitidis; identical to SEQ ID NO: 9541

SEQ ID NO: 20341 - protein, 145 aa, Neisseria meningitidis; identical to SEQ ID NO: 3684

SEQ ID NO: 20342 - protein, 636 aa, Neisseria meningitidis; identical to SEQ ID NO: 8985

SEQ ID NO: 20343 - protein, 114 aa, Neisseria meningitidis
  misc_feature 3, 4: 'Xaa' is any amino acid
VCXXTGRGEGSGKGSGGVKGEHGEGAGSSKGNPLRANGSIPRPAYPTLSMENDEQGTVVLSVLVSPGGHVESVKIVKSSGFSRLDNAARKAAQNGHFQANAWTEFKVPVKFELN

SEQ ID NO: 20344 - protein, 264 aa, Neisseria meningitidis; identical to SEQ ID NO: 9463

SEQ ID NO: 20345 - protein, 867 aa, Neisseria meningitidis; identical to SEQ ID NO: 8589

SEQ ID NO: 20346 - protein, 124 aa, Neisseria meningitidis; identical to SEQ ID NO: 8954

SEQ ID NO: 20347 - protein, 148 aa, Neisseria meningitidis; identical to SEQ ID NO: 8195

SEQ ID NO: 20348 - protein, 112 aa, Neisseria meningitidis; identical to SEQ ID NO: 10404

SEQ ID NO: 20349 - protein, 344 aa, Neisseria meningitidis; identical to SEQ ID NO: 8641

SEQ ID NO: 20350 - protein, 238 aa, Neisseria meningitidis; identical to SEQ ID NO: 8951

SEQ ID NO: 20351 - protein, 248 aa, Neisseria meningitidis; identical to SEQ ID NO: 3755

SEQ ID NO: 20352 - protein, 213 aa, Neisseria meningitidis; identical to SEQ ID NO: 9820

SEQ ID NO: 20353 - protein, 227 aa, Neisseria meningitidis; identical to SEQ ID NO: 2422

SEQ ID NO: 20354 - protein, 111 aa, Neisseria meningitidis; identical to SEQ ID NO: 13731

SEQ ID NO: 20355 - protein, 159 aa, Neisseria meningitidis
MKHFPSKVLTTAILATFCSGALAATNDDDVKKAATVAIAAAYNNGQEINGFKAGETIYDIDEDGTITKKDATAADVEADDFKGLGLKKVVTNLTKTVNENKQNVDAKVKAAESEIEKLTTKLADTDAALDATTNALNKLGENITTFAEETRACPQFNLA

SEQ ID NO: 20356 - protein, 305 aa, Neisseria meningitidis; identical to SEQ ID NO: 8510

SEQ ID NO: 20357 - protein, 445 aa, Neisseria meningitidis; identical to SEQ ID NO: 8263

SEQ ID NO: 20358 - protein, 659 aa, Neisseria meningitidis; identical to SEQ ID NO: 9619

SEQ ID NO: 20359 - protein, 335 aa, Neisseria meningitidis; identical to SEQ ID NO: 9914

SEQ ID NO: 20360 - protein, 354 aa, Neisseria meningitidis; identical to SEQ ID NO: 3286

SEQ ID NO: 20361 - protein, 369 aa, Neisseria meningitidis; identical to SEQ ID NO: 8556

SEQ ID NO: 20362 - protein, 101 aa, Neisseria meningitidis; identical to SEQ ID NO: 9840

SEQ ID NO: 20363 - protein, 366 aa, Neisseria meningitidis; identical to SEQ ID NO: 1553

SEQ ID NO: 20364 - protein, 387 aa, Neisseria meningitidis
LPYLLEQDMSQNASVGIVTPQKIPFEMPLVLENGKTLPRFDLMIETYGELNAEKNNAVLICHALSGNHHVAGRHSAEDKYTGWWDNMVGPGKPIDTERFFVVGLNNLGGCDGSSGPLSINPETGREYGADFPVVTVKDWVKSQAALADYLGIGQWAAVVGGSLGGMQALQWAISYPERVRHALVIASAPKLSTQNIAFNDVARQAILTDPDFNEGHYRSHNTVPARGLRIARMMGHITYLAEDGLGKKFGRDLRSNGYQYGYGVEFEVESYLRYQGDKFVGRFDANTYLLMTKALDYFDPAADFGNSLTRAVQDVQAKFFVASFSTDWRFAPERSHELVKALIAAQKSVQYIEVKSAHGHDAFLMEDEAYMRAVAAYMNNVYKECQQ

SEQ ID NO: 20365 - protein, 294 aa, Neisseria meningitidis; identical to SEQ ID NO: 8165

SEQ ID NO: 20366 - protein, 230 aa, Neisseria meningitidis; identical to SEQ ID NO: 1058

SEQ ID NO: 20367 - protein, 146 aa, Neisseria meningitidis; identical to SEQ ID NO: 2365

SEQ ID NO: 20368 - protein, 147 aa, Neisseria meningitidis; identical to SEQ ID NO: 2466

SEQ ID NO: 20369 - protein, 407 aa, Neisseria meningitidis; identical to SEQ ID NO: 3034

SEQ ID NO: 20370 - protein, 241 aa, Neisseria meningitidis; identical to SEQ ID NO: 7122

SEQ ID NO: 20371 - protein, 159 aa, Neisseria meningitidis; identical to SEQ ID NO: 929

SEQ ID NO: 20372 - protein, 258 aa, Neisseria meningitidis; identical to SEQ ID NO: 8194

SEQ ID NO: 20373 - protein, 69 aa, Neisseria meningitidis; identical to SEQ ID NO: 8100

SEQ ID NO: 20374 - protein, 419 aa, Neisseria meningitidis; identical to SEQ ID NO: 1950

SEQ ID NO: 20375 - protein, 111 aa, Neisseria meningitidis; identical to SEQ ID NO: 8680

SEQ ID NO: 20376 - protein, 447 aa, Neisseria meningitidis; identical to SEQ ID NO: 2854

SEQ ID NO: 20377 - protein, 795 aa, Neisseria meningitidis; identical to SEQ ID NO: 9332

SEQ ID NO: 20378 - protein, 74 aa, Neisseria meningitidis; identical to SEQ ID NO: 1871

SEQ ID NO: 20379 - protein, 168 aa, Neisseria meningitidis; identical to SEQ ID NO: 19722

SEQ ID NO: 20380 - protein, 219 aa, Neisseria meningitidis; identical to SEQ ID NO: 8224

SEQ ID NO: 20381 - protein, 173 aa, Neisseria meningitidis; identical to SEQ ID NO: 3735

SEQ ID NO: 20382 - protein, 259 aa, Neisseria meningitidis; identical to SEQ ID NO: 2935

SEQ ID NO: 20383 - protein, 57 aa, Neisseria meningitidis; identical to SEQ ID NO: 2401

SEQ ID NO: 20384 - protein, 68 aa, Neisseria meningitidis; identical to SEQ ID NO: 3441

SEQ ID NO: 20385 - protein, 291 aa, Neisseria meningitidis; identical to SEQ ID NO: 8376

SEQ ID NO: 20386 - protein, 52 aa, Neisseria meningitidis; identical to SEQ ID NO: 8509

SEQ ID NO: 20387 - protein, 109 aa, Neisseria meningitidis; identical to SEQ ID NO: 8228

SEQ ID NO: 20388 - protein, 417 aa, Neisseria meningitidis; identical to SEQ ID NO: 2411

SEQ ID NO: 20389 - protein, 162 aa, Neisseria meningitidis; identical to SEQ ID NO: 9363

SEQ ID NO: 20390 - protein, 458 aa, Neisseria meningitidis; identical to SEQ ID NO: 9229

SEQ ID NO: 20391 - protein, 140 aa, Neisseria meningitidis; identical to SEQ ID NO: 8657

SEQ ID NO: 20392 - protein, 151 aa, Neisseria meningitidis; identical to SEQ ID NO: 9467

SEQ ID NO: 20393 - protein, 265 aa, Neisseria meningitidis; identical to SEQ ID NO: 2138

SEQ ID NO: 20394 - protein, 916 aa, Neisseria meningitidis; identical to SEQ ID NO: 3146

SEQ ID NO: 20395 - protein, 270 aa, Neisseria meningitidis
VPSETVSDGTDKPPPLNPAVLACIIRHSIRNSQQVSNMSLKTVAVIGAMEQEIELLREMMENVKAVSFGKFTAYEGELAGKRMVLALSGIGKVNAAVATAWIIREFAADCVINTGSAGGLGKGLKVGDVVIGTETAHHDVDVTAFGYVWGQVPQLPAVFVSDDLLVGKAKRAARTFEGAAVEQGLIVSGDRFVHSSEGVAEIRKHFPEVKAVEMEAAAIAQTCHQLETPFVIIRAVSDSADEKADISFDEFLKTAAASSAKMVAEIVKSL

SEQ ID NO: 20396 - protein, 371 aa, Neisseria meningitidis; identical to SEQ ID NO: 8722

SEQ ID NO: 20397 - protein, 154 aa, Neisseria meningitidis; identical to SEQ ID NO: 1733

SEQ ID NO: 20398 - protein, 489 aa, Neisseria meningitidis; identical to SEQ ID NO: 4824

SEQ ID NO: 20399 - protein, 556 aa, Neisseria meningitidis; identical to SEQ ID NO: 8472

SEQ ID NO: 20400 - protein, 186 aa, Neisseria meningitidis; identical to SEQ ID NO: 2093

SEQ ID NO: 20401 - protein, 285 aa, Neisseria meningitidis; identical to SEQ ID NO: 2591

SEQ ID NO: 20402 - protein, 188 aa, Neisseria meningitidis; identical to SEQ ID NO: 6079

SEQ ID NO: 20403 - protein, 603 aa, Neisseria meningitidis; identical to SEQ ID NO: 8911

SEQ ID NO: 20404 - protein, 433 aa, Neisseria meningitidis; identical to SEQ ID NO: 8760

SEQ ID NO: 20405 - protein, 141 aa, Neisseria meningitidis; identical to SEQ ID NO: 3723

SEQ ID NO: 20406 - protein, 304 aa, Neisseria meningitidis; identical to SEQ ID NO: 8772

SEQ ID NO: 20407 - protein, 92 aa, Neisseria meningitidis; identical to SEQ ID NO: 510

SEQ ID NO: 20408 - protein, 257 aa, Neisseria meningitidis; identical to SEQ ID NO: 8168

SEQ ID NO: 20409 - protein, 185 aa, Neisseria meningitidis; identical to SEQ ID NO: 5086

SEQ ID NO: 20410 - protein, 223 aa, Neisseria meningitidis; identical to SEQ ID NO: 2385

SEQ ID NO: 20411 - protein, 76 aa, Neisseria meningitidis
MNKPFITQAQLALYKYQPSSKYFGQSMALIASKEFEEFVRNVKEYDVIECFSYFLNKRVTHNIWKIYFSDESRACP

SEQ ID NO: 20412 - protein, 321 aa, Neisseria meningitidis; identical to SEQ ID NO: 6649

SEQ ID NO: 20413 - protein, 89 aa, Neisseria meningitidis; identical to SEQ ID NO: 494

SEQ ID NO: 20414 - protein, 287 aa, Neisseria meningitidis; identical to SEQ ID NO: 1804

SEQ ID NO: 20415 - protein, 376 aa, Neisseria meningitidis; identical to SEQ ID NO: 2865

SEQ ID NO: 20416 - protein, 370 aa, Neisseria meningitidis; identical to SEQ ID NO: 3173

SEQ ID NO: 20417 - protein, 1306 aa, Neisseria meningitidis; identical to SEQ ID NO: 10725

SEQ ID NO: 20418 - protein, 245 aa, Neisseria meningitidis; identical to SEQ ID NO: 4857

SEQ ID NO: 20419 - protein, 164 aa, Neisseria meningitidis; identical to SEQ ID NO: 9552

SEQ ID NO: 20420 - protein, 446 aa, Neisseria meningitidis; identical to SEQ ID NO: 9266

SEQ ID NO: 20421 - protein, 640 aa, Neisseria meningitidis; identical to SEQ ID NO: 9576

SEQ ID NO: 20422 - protein, 317 aa, Neisseria meningitidis; identical to SEQ ID NO: 9636

SEQ ID NO: 20423 - protein, 367 aa, Neisseria meningitidis; identical to SEQ ID NO: 11549

SEQ ID NO: 20424 - protein, 261 aa, Neisseria meningitidis
MFPGRRRSVCLDNRPLKQVESAPTGNTSFRRQNPYPKPSGIPLMNRQKVIAIDGPGASGKGTVAARVAAALGYDYLDTGALYRLTALYAQKQGVGWHDEENVSELAKKLPAVFSGSRILLGGEDVSDGIRTEAIGMGASAVAQLPKVRAALLQRQRDFLTEKGLVADGRDTGSVVFPQAELKIFLTAESKIRAERRAKQIGIPCEGLAFERILSDIEARDEADRNRKVAPLKQQPDALLLDTSRLTIEETVKKVLDWYREV

SEQ ID NO: 20425 - protein, 705 aa, Neisseria meningitidis
MRRFLPIAAICAVVLLYGLTAATGSTSSLADYFWWIVAFSAMLLLVLSAVLARYVILLLKDRRDGVFGSQIAKRLSGMFTLVAVLPGVFLFGVSAQFINGTINSWFGNDTHEALERSLNLSKSALNLAADNALGNAIPVQIDLISTASLSGNMGRVLEHYANGFTQLSLYNAASGKIEKSINPHKLDQPFPGKARWEKIQQAGSVRDLESIGGVLYAQGWLLVGTYNGRDYALFFRQPIPKGVAEDAVLIEKARAKYAELSYSKKGLQTFFLATLLIASLLSIFLALVMALYFARRFVEPVLSLAEGAKAVAQGDFSQTRPVLRNDEFGRLTKLFNHMTEQLSIAKEADERNRRREEAARHYLECVLEGLTTGVVVFDEQGCLKTFNKAAEQILGMPLIPLWGSSRHGWHGVSAQQSLLAEVFAAIGAAAGTDKPVHVKYAAPDDAKILLGKATVLPEDNGNGVVMVIDDITVLIHAQKEAAWGEVAKRLAHEIRNPLTPIQLSAERLAWKLGGKLDEQDAQILTRSTDTIVKQVAALKEMVEAFRNYARSPSLKLENQDLNALIGDVLALYEAGPCRFAAELAGEPLMVAADTTAMRQVLHNIFKNAAEAAEEADVPEVRVKSEAGQDGRIVLTVCDNGKGFGREMLHNAFEPYVTDKPAGTGLGLPVVKKIIEEHGGRISLSNQDAGGACVRIILPKTVKTYA

SEQ ID NO: 20426 - protein, 415 aa, Neisseria meningitidis; identical to SEQ ID NO: 8108

SEQ ID NO: 20427 - protein, 244 aa, Neisseria meningitidis; identical to SEQ ID NO: 8201

SEQ ID NO: 20428 - protein, 264 aa, Neisseria meningitidis; identical to SEQ ID NO: 9300

SEQ ID NO: 20429 - protein, 396 aa, Neisseria meningitidis
LKHRLKPCADNPPAPNRLPPPDRDSMIYQRNLIKELSFTAVGIFVVLLAVLVSTQAINLLGRAADGRVAIDAVLALVGFWVIGMTPLLLVLTAFISTLTVLTRYWRDSEMSVWLSCGLALKQWIRPVMQFAVPFAVLVAVMQLWVIPWAELRSREYAEILKQKQELSLVEAGEFNSLGKRNGRVYFVETFDTESGIMKNLFLREQDKNGGDNIIFAKEGNFSLNDNKRTLELRHGYRYSGTPGRADYNQVSFQKLNLIISTTPKLIDPVSHRRTIPTAQLIGSSNPQHQAELMWRISLTVSVLLLCLLAVPLSYFNPRSGHTYNILIAIGLFLIYQNGLTLLFEAVEDGKIHFWLGLLPMHIIMFVIAIVLLRVRSMPSQPFWQAVGKSLTLKGGK

SEQ ID NO: 20430 - protein, 91 aa, Neisseria meningitidis; identical to SEQ ID NO: 8478

SEQ ID NO: 20431 - protein, 40 aa, Neisseria meningitidis; identical to SEQ ID NO: 2302

SEQ ID NO: 20432 - protein, 94 aa, Neisseria meningitidis; identical to SEQ ID NO: 1124

SEQ ID NO: 20433 - protein, 195 aa, Neisseria meningitidis; identical to SEQ ID NO: 3348

SEQ ID NO: 20434 - protein, 238 aa, Neisseria meningitidis; identical to SEQ ID NO: 3469

SEQ ID NO: 20435 - protein, 181 aa, Neisseria meningitidis
MGKTVTFTSGHSNTDPGAVNGSDREADLAQDMCNIVAAILRDDYGLTVKTDGTGKGNMPLREAVKLIRGSDVAIEFHTNAAVSKAATGIEALSTVKNKRWCQVLSKAVAKKTGWKLRGEDGFKPDNAGQHSRLAYAQAGGIVFEPFFISNDTDLALFKTTKWGICRAIADAIAMELGAARV

SEQ ID NO: 20436 - protein, 235 aa, Neisseria meningitidis; identical to SEQ ID NO: 8533

SEQ ID NO: 20437 - protein, 205 aa, Neisseria meningitidis; identical to SEQ ID NO: 2641

SEQ ID NO: 20438 - protein, 373 aa, Neisseria meningitidis
MSNQDFYATLGVARTATDDEIKKAYRKLAMKYHPDRNPDNKDAEEKFKEVQKAYETLSDKEKRAMYDQYGHAAFEGGGQGGFGGFGGFGGAQGFDFGDIFSQMFGGGSGRAQPDYQGEDVQVGIEITLEEAAKGVKKRINIPTYEACDVCNGSGAKPGTSPETCPTCKGSGTVHIQQAIFRMQQTCPTCHGAGKHIKEPCVKCRGAGRNKAVKTVEVNIPAGIDDGQRIRLSGEGGPGMHGAPAGDLYVTVRIRAHKIFQRDGLDLHCELPISFATAALGGELEVPTLDGKVKLTVPKETQTGRRMRVKGKGVKSLRSSATGDLYCHIVVETPVNLTDRQKELLEEFERISTGLENQTPRKKSFLDKLRDLFD

SEQ ID NO: 20439 - protein, 231 aa, Neisseria meningitidis; identical to SEQ ID NO: 1993

SEQ ID NO: 20440 - protein, 159 aa, Neisseria meningitidis; identical to SEQ ID NO: 3392

SEQ ID NO: 20441 - protein, 206 aa, Neisseria meningitidis
  misc_feature 201, 202: 'Xaa' is any amino acid
MKTVSTAVVLAAAAVSLTGCATESSRSLEVEKVASYNTQYHGVRTPISVGTFDNRSSFQKGIFSDGEDRLGSQAKTILVTHLQQTNRFNVLNRTNLNALKQESGISGKAHNLKGADYVVTGDVTEFGRRDVGDHQLFGILGRGKSQIAYAKVALNIVNVNTSEIVYSAQGAGEYALSNREIIGFGGTSGYDATLNGKVLDXXHTLN

SEQ ID NO: 20442 - protein, 98 aa, Neisseria meningitidis; identical to SEQ ID NO: 3727

SEQ ID NO: 20443 - protein, 58 aa, Neisseria meningitidis; identical to SEQ ID NO: 1171

SEQ ID NO: 20444 - protein, 321 aa, Neisseria meningitidis; identical to SEQ ID NO: 3510

SEQ ID NO: 20445 - protein, 658 aa, Neisseria meningitidis; identical to SEQ ID NO: 9433

SEQ ID NO: 20446 - protein, 263 aa, Neisseria meningitidis
MARHPYRRLRPAKSSFPEVGISEEGNIRSLHLGSDTIQSSMNLDHPSELVLSYSRAMMGWLLFTDALPQHITQIGLGGGSFARWIDTYLPDTRQTAVDINPQVIAIARNLFELPFEGEKFEIIEADGAEYIKVFRHNTDIILVDGFDGEQIIDALVEEPFFRDCRNALSSDGIFVTNWWSGDKRYQRFIERLLNVFEGRVLELPAESHGNVAVMAFQSSPKEQNIDKLKKRADKLSNTYGLDFHRMLAGLKASNPNNGKHFHL

SEQ ID NO: 20447 - protein, 426 aa, Neisseria meningitidis; identical to SEQ ID NO: 3050

SEQ ID NO: 20448 - protein, 485 aa, Neisseria meningitidis
MPSEAVFLQFRQTRKIMKYISTRGETAHKPFSEVLLMGLAPDGGLMLPEHYPQIGREALDKWRGLAYPELAFEIMRLFVTDIPEDDLRDILNRTYTEAAFGTKEITPVRTLSDGIKIQALSNGPTLAFKDMAMQFLGNAFEYVLNKEGKKLNILGATSGDTGSAAEYALRGKKGVNVFMLSPDGKMSAFQRAQMYSLQDGNIHNIAVKGMFDDCQDIVKAVQNDAAFKEKYHIGTVNSINWGRIVAQVVYYFAGYFKATQSNDEQVSFCVPSGNFGNVCAGHIAKQMGLPIRRLIVATNENDVLDEFFKIGAYRPRNSAHTYVTSSPSMDISKASNFERFVFDLMDRDPQEINTLWTEVAAGKGFDLQFALDKVGGKYGFTSSKSTHADRLATIKQVYEQDQELIDPHTADGVKVAREVREEGETVVCLETALAAKFDATIREAVGDAAIPRPAALEGLENLPQRVQTVPNSADAVKGIIEQTLA

SEQ ID NO: 20449 - protein, 97 aa, Neisseria meningitidis; identical to SEQ ID NO: 1875

SEQ ID NO: 20450 - protein, 261 aa, Neisseria meningitidis; identical to SEQ ID NO: 7966

SEQ ID NO: 20451 - protein, 544 aa, Neisseria meningitidis; identical to SEQ ID NO: 2758

SEQ ID NO: 20452 - protein, 146 aa, Neisseria meningitidis; identical to SEQ ID NO: 2999

SEQ ID NO: 20453 - protein, 268 aa, Neisseria meningitidis; identical to SEQ ID NO: 9571

SEQ ID NO: 20454 - protein, 728 aa, Neisseria meningitidis
LPRCLKQTVRHVMPSETGADAAKPSDGIACPLRPNNNHLWENLMPEQNRILCRELSLLAFNRRVLAQAEDKNVPLLERLRFLCIVSSNLDEFFEVRMAWLKRENKLHPRRRLDNGKMPSETIADVTEAARSLIRHQYDLFNNVLQPELARESIHFYRRRNWTGTQKKWIEDYFDRELLPILTPIGLDPSHPFPRPLNKSLNFAVELDGTDAFGRPSGMAIVQAPRILPRVVPLPSELCGGGHGFVFLSSILHAHVGKLFPGMNVKGCHQFRLTRDSDLTVDEEDLQNLRAAIQNELHDREYGDGVRLEVADTCPAYIRDFLLAQFKLTAAELYQVKGPVNLVRLNAVPDLVNRPDLKFPTHTPGRLKALGKTASIFDLVRQSPILLHHPYQSFDPVVEMMREAAADPDVLAVKMTIYRTGTRSELVRALMKAALAGKQVTVVVELMARFDEANNVNWAKQLEEAGAHVVYGVFGYKVHAKMALVIRREDGVLKRYAHLGTGNYHQGTSRIYTDFGIITADEQITADVNTLFMEITGLGKPGRLNKLYQSPFTLHKMVIDRIARETEHAKAGKPARITAKMNSLIEPTVIEALYRASAAGVQIDLIVRGMCTLRPGVKGLSENIRVRSIIGRQLEHARVYCFHNNGADDTFISSADWMGRNFFRRIETAAPIAAPELKKRVIREGLEMALADNTHAWLMQPDGGYIRAAPAEGESEADLQNDLWTLLGG

SEQ ID NO: 20455 - protein, 288 aa, Neisseria meningitidis
MKAKILTSVALLACSGSLFAQTLATVNGQKIDSSVIDAQVAAFRAENSRAEDTPQLRQSLLENEVVNTVVAQEVKRLKLDRSAEFKNALAKLRAEAKKSGDDKKPSFKTVWQAVKYGLNGEAYALHIAKTQPVSEQEVKAAYDNISGFYKGTQEVQLGEILTDKEENAKKAVADLRAKKGFDAVLKQYSLNDRTKQTGAPVGYVPLKDLEQGVPPLYQAIKDLKKGEFTATPLKNGDFYGVYYVNDSREVKVPSFDEMKGQIAGNLQAERIDRAVGALLGKANIKPAK

SEQ ID NO: 20456 - protein, 394 aa, Neisseria meningitidis; identical to SEQ ID NO: 1253

SEQ ID NO: 20457 - protein, 765 aa, Neisseria meningitidis; identical to SEQ ID NO: 8087

SEQ ID NO: 20458 - protein, 284 aa, Neisseria meningitidis; identical to SEQ ID NO: 2008

SEQ ID NO: 20459 - protein, 63 aa, Neisseria meningitidis; identical to SEQ ID NO: 980

SEQ ID NO: 20460 - protein, 253 aa, Neisseria meningitidis; identical to SEQ ID NO: 8360

SEQ ID NO: 20461 - protein, 121 aa, Neisseria meningitidis; identical to SEQ ID NO: 8424

SEQ ID NO: 20462 - protein, 760 aa, Neisseria meningitidis
MTVFRICFIIRLFLKYLGWGDVFRRWFLPCWVVGAAASFALPVVPHWLFWLAAFAVFAVFARRFAFAGLMLCVLAGAAYGVFRTEAALSSQWRAEAVSGVPLTVEVADMPRSDGRRVQFAAKAVDSGGRTFDLLLSDYKRREWAVGSRWRITARVHPVVGELNLRGLNREAWALSNGIGGAGTVGADRVLLHGGSGWGIAVWRSRISRNWQQADADGGLSDGIGLMRALSVGEQSALRPELWQAFRPLGLTHLVSISGLHVTMVAVMFAWLAKRLLACSPRLPARPRAWVLAAGCAGALFYALLAGFSVPTQRSVLMLAAFAWAWRRGRLSAWATWWQALAAVLLFDPSAVLGVGTWLSFGLVAALIWACSGRLHEGKRQTAVRGQWAASVLSLVLLGYLFASLPLISPLVNAVAIPWFSWVLTPLALLGSVVPFAPLQQLGAFLAEYTLRFLVWLADVSPEFAVAAAPLPLLVLAVCAALLLLLPRGLGLRPWAVLLLAGFVFYRSPGVPENEVAVTVWDAGQGLSVSVQTANHHLLFDTGTAAAAQMGIVPSLNAAGVRRLDKLVLSHHDSDHDGGFQAVGKIPNGGIYAGQPEFYEGARHCAEQRWQWDGVDFEFLMPSERKNIDDNGKSCVLRVVAGGAALLVTGDLDTKGEESLVGKYGGNLYSQVLVLGHHGSNTSSSGVFLNAVSPEYAVASSGYANAYKHPTEAVQNRIRAHGIKLLRTDLSGALQFGLGRGGVKAQRLRGYKFYWQKKPFE

SEQ ID NO: 20463 - protein, 327 aa, Neisseria meningitidis; identical to SEQ ID NO: 2154

SEQ ID NO: 20464 - protein, 334 aa, Neisseria meningitidis
MSTFFQQTAQAMIAKHIDRFPLLKLDQVIDWQPIEQYLNRQKTRYLRDHRGRPAYPLLSMFKAILPGQWHSLSDPELEHSLITRIDFNLFCRFDELSIPDYSTLCRYRNWLAQDDTLSELLELINRQLTEKGLKIEKASAVVGATIIQTAGSKQRQAIEVDEEGQVSGQTTPSKDSDARWIKKNGLYKLGYKQHTRTDAEGYIEKLHITPANAHECKHLPPLLEGIAEGTTVYADKGYDSAENRQHLEEHQLQDGIMRKACRNRPLSETQTKRNRYLSKTRYVVEQSFGTLHRKFRYARSTYFGLIKVSAQSHLKAMCLNLLKAANRLSAPAAA

SEQ ID NO: 20465 - protein, 201 aa, Neisseria meningitidis; identical to SEQ ID NO: 9086

SEQ ID NO: 20466 - protein, 146 aa, Neisseria meningitidis; identical to SEQ ID NO: 9087

SEQ ID NO: 20467 - protein, 363 aa, Neisseria meningitidis; identical to SEQ ID NO: 2781

SEQ ID NO: 20468 - protein, 254 aa, Neisseria meningitidis; identical to SEQ ID NO: 10869

SEQ ID NO: 20469 - protein, 72 aa, Neisseria meningitidis; identical to SEQ ID NO: 1294

SEQ ID NO: 20470 - protein, 168 aa, Neisseria meningitidis; identical to SEQ ID NO: 5003

SEQ ID NO: 20471 - protein, 69 aa, Neisseria meningitidis; identical to SEQ ID NO: 5143

SEQ ID NO: 20472 - protein, 70 aa, Neisseria meningitidis; identical to SEQ ID NO: 3527

SEQ ID NO: 20473 - protein, 59 aa, Neisseria meningitidis; identical to SEQ ID NO: 5877

SEQ ID NO: 20474 - protein, 589 aa, Neisseria meningitidis; identical to SEQ ID NO: 9527

SEQ ID NO: 20475 - protein, 42 aa, Neisseria meningitidis; identical to SEQ ID NO: 6907

SEQ ID NO: 20476 - protein, 950 aa, Neisseria meningitidis; identical to SEQ ID NO: 11115

SEQ ID NO: 20477 - protein, 228 aa, Neisseria meningitidis
MEKQNIAVILARQNSKGLPLKNLRKMNGISLLGHTINAAISSKCFDRIIVSTDGGLIAEEAKNFGVEVVLRPAELASDTASSISGVIHALETIGSNSGTVTLLQPTSPLRIGAHIREAFSLFDEKIKGSVVSACPMEHHPLKTLLQINNGEYAPMRHLSDLEQPRQQLPQAFRPNGAIYINDTASLIANNCFFIAPTKLYIMSHQDSIDIDTELDLQQAENILNHKES

SEQ ID NO: 20478 - protein, 159 aa, Neisseria meningitidis; identical to SEQ ID NO: 9034

SEQ ID NO: 20479 - protein, 301 aa, Neisseria meningitidis; identical to SEQ ID NO: 1112

SEQ ID NO: 20480 - protein, 236 aa, Neisseria meningitidis; identical to SEQ ID NO: 3170

SEQ ID NO: 20481 - protein, 253 aa, Neisseria meningitidis; identical to SEQ ID NO: 265

SEQ ID NO: 20482 - protein, 155 aa, Neisseria meningitidis; identical to SEQ ID NO: 6688

SEQ ID NO: 20483 - protein, 127 aa, Neisseria meningitidis; identical to SEQ ID NO: 2146

SEQ ID NO: 20484 - protein, 144 aa, Neisseria meningitidis; identical to SEQ ID NO: 9600

SEQ ID NO: 20485 - protein, 259 aa, Neisseria meningitidis; identical to SEQ ID NO: 9036

SEQ ID NO: 20486 - protein, 206 aa, Neisseria meningitidis; identical to SEQ ID NO: 8522

SEQ ID NO: 20487 - protein, 215 aa, Neisseria meningitidis; identical to SEQ ID NO: 709

SEQ ID NO: 20488 - protein, 628 aa, Neisseria meningitidis; identical to SEQ ID NO: 8625

SEQ ID NO: 20489 - protein, 240 aa, Neisseria meningitidis; identical to SEQ ID NO: 9167

SEQ ID NO: 20490 - protein, 337 aa, Neisseria meningitidis; identical to SEQ ID NO: 1101

SEQ ID NO: 20491 - protein, 671 aa, Neisseria meningitidis; identical to SEQ ID NO: 8902

SEQ ID NO: 20492 - protein, 170 aa, Neisseria meningitidis
MKMFEQEDEWVSKTQMKKQMNGLQDLGMELTKLSSDTLKKIGLDEDLYEAVVTYKKITSNGALKRQAQFIGRLMRDTDPAPIEAFLAKLRGDDAAHNAFLQRVERTRMELLADDGALTQFMSDFPHADAGKLRTLIRNTKKEQEQNKPPKNFRALFQELKTVMENGDAEI

SEQ ID NO: 20493 - protein, 716 aa, Neisseria meningitidis
LGSDWVSDGIHSGFHRLMPSERRFRPIPTTRFVRKRITGKIMEVIRYPDSPFKLHQPFPPAGDQPTAIAGLLEGLSDGLAYQTLLGVTGSGKTYTMANVIAQSGRPAIIMAHNKTLAAQLYAEMREFFPENAVEYFVSYYDYYQPEAYVPSRDLFIEKDSAINEHIEQMRLSATKNLMTRDDVIIVATVSAIYGIGDPTEYQQMVLSVKEGDTIEQRDIIATLVSMQYERGDLDFKRGSFRVRGDVIDVYPAESSENALRISLFDDEIDRLDMFDPLSGSLIQRVGRYTVFPSSHYVTPRDTVLRACESIKEELRERIDFFTKENRPVEQQRIEQRTRFDLEMLYEMGFCKGIENYSRHFSSKKEGEPPPTLMDYLPDNAIMFIDESHVTVTQIGGMYKGDASRKQNLVDYGFRLPSARDNRPLKFHEFEKVMPQTVFVSATPAKYEEEHAGQVVEQVVRPTGLVDPQIIIRPVATQVDDLMSEINDRIQKGERVLVTTLTKRMAEQLTDYYSELGIKVRYLHSDIDTVERVEIIRDLRLGLFDVLVGINLLREGLDIPEVSLVAILDADKEGFLRSHRSLIQTIGRAARNVNGVAILYADKITDSMKAAIDETERRREKQIKFNEEHGIVPQQIKKQVKDIIDGVYHEEDGGKGRRQGKNKVKVSEIHNEEDAVKEIAKLEKAMQQAARDLQFEEAAVLRDRIRGIKEGLLFGSE

SEQ ID NO: 20494 - protein, 283 aa, Neisseria meningitidis; identical to SEQ ID NO: 9223

SEQ ID NO: 20495 - protein, 235 aa, Neisseria meningitidis; identical to SEQ ID NO: 1248

SEQ ID NO: 20496 - protein, 367 aa, Neisseria meningitidis; identical to SEQ ID NO: 7962

SEQ ID NO: 20497 - protein, 99 aa, Neisseria meningitidis
MGYRVGINCFDTRLQADDYLLSSFPPTVTQDGKIIRPERVGDKWILNGKPVTLSYPKCSNYEQVKSGAYLGSMVLILFVVIYGFRLLINFLKDIGKVGA

SEQ ID NO: 20498 - protein, 201 aa, Neisseria meningitidis; identical to SEQ ID NO: 2273

SEQ ID NO: 20499 - protein, 420 aa, Neisseria meningitidis; identical to SEQ ID NO: 9623

SEQ ID NO: 20500 - protein, 460 aa, Neisseria meningitidis; identical to SEQ ID NO: 8349

SEQ ID NO: 20501 - protein, 415 aa, Neisseria meningitidis
MADWAMTICTCADGDDLLNGDAGNDSIYSGNGNDTLDGGEGNDALYGYNGNDVLNGGEGNDHLNGEDGNDTLIGGAGNDYLEGSSGSDTYVFGKGFGQDTVYNYDYATGRKDIIRFTDGITADMLTFTREGNHLLIKAKDGSGQVTVQSYFQNDGSGAYRIDEIHFDNGKVLDVATVKKLVQQSTDGSDRLYAYQSGSTLNGGLGDDYLYGADGDDLLNGDAGNDSIYSGNGNDTLDGGEGNDALYGYNGNDVLNGGEGNDHLNGEDGNDTLIGGAGNDYLEGGSGSDTYVFGKGFGQDTVYNYHVDKNSDTMHFKGFKAADVHFIRSGSDLVLSASEQDNVRISGFFYGENHRVDTFVFDDAAISNPDFAKYINAGNNLVQSMSVFGSNTAATGGNVDANTQSVQQPLLVTPSA

SEQ ID NO: 20502 - protein, 431 aa, Neisseria meningitidis; identical to SEQ ID NO: 8095

SEQ ID NO: 20503 - protein, 357 aa, Neisseria meningitidis; identical to SEQ ID NO: 3038

SEQ ID NO: 20504 - protein, 470 aa, Neisseria meningitidis
MLLLPLLASAAYAEETPREPDLRSRPEFRLHEAEVKPIDREKVPGQVREKGKVLQIDGETLLKSPELLSRAMYSAVVSNNIAGIRVILPIYLQQAQQDKMLALYAQGILAQADGRVKEAISHYRELIAAQPDAPAVRMRLAAALFDNRQNEAAADQFDRLKAENLPPQLMEQVELYRKALRERDAWKVNGGFSVTREHNINQAPKRQQYGKWTFPKQVDGTAVNYRLGAEKKWSLKNGWYTTAGGDVSGRVYPGNKKFNDMTAGVSGGIGFADRRKDAGLAVFHERRTYGNDAYSYTNGARLYFNRWQTPKWQTLSSAEWGRLKNTRRARSDNTHLQISNSLVFYRNARQYWMGGLDFYRERNPADRGDNFNRYGLRFAWGQEWGGSGLSSLLRLGAAKRHYEKPGFFSGFKGERRRDKELNTSLSLWHRALHFKGITPRLTLSHRETRSNDVFNEYEKNRAFVEFNKTF

SEQ ID NO: 20505 - protein, 120 aa, Neisseria meningitidis; identical to SEQ ID NO: 2661

SEQ ID NO: 20506 - protein, 332 aa, Neisseria meningitidis
  misc_feature 328, 329, 330: 'Xaa' is any amino acid
MGIKVAINGYGRIGRQVLRAIYDYQIQDQLQIVAVNASGSLETNAHLTKFDTVHGRFEADVSHDGGNLIVNGDKIPFFSTRNPAELPWKELGVDLVMECTGAFTSKEKAKIHLESGAKKVLISAPGGDDVDATVVYGVNDSVLTADMTVVSNASCTTNCLSPVAKVLSESVGIVKGAMTTIHALTNDQTVTDVRHKDLRRARSGVENMIPTKTGAAKAVGLVLPELKGRLDGLAIRVPTVNVSLVDLSFQAARDTTVEEINALMKAASEAGALKGVLGYNTLPLVSMDFNHTTEASHFDATLTKVVDGNMIKVFAWYDNEWGFSCQMXXXHT

SEQ ID NO: 20507 - protein, 259 aa, Neisseria meningitidis; identical to SEQ ID NO: 9318

SEQ ID NO: 20508 - protein, 318 aa, Neisseria meningitidis; identical to SEQ ID NO: 2723

SEQ ID NO: 20509 - protein, 99 aa, Neisseria meningitidis; identical to SEQ ID NO: 1679

SEQ ID NO: 20510 - protein, 121 aa, Neisseria meningitidis; identical to SEQ ID NO: 847

SEQ ID NO: 20511 - protein, 198 aa, Neisseria meningitidis; identical to SEQ ID NO: 7255

SEQ ID NO: 20512 - protein, 93 aa, Neisseria meningitidis; identical to SEQ ID NO: 2125

SEQ ID NO: 20513 - protein, 255 aa, Neisseria meningitidis; identical to SEQ ID NO: 3724

SEQ ID NO: 20514 - protein, 318 aa, Neisseria meningitidis; identical to SEQ ID NO: 3073

SEQ ID NO: 20515 - protein, 518 aa, Neisseria meningitidis; identical to SEQ ID NO: 8503

SEQ ID NO: 20516 - protein, 68 aa, Neisseria meningitidis; identical to SEQ ID NO: 4044

SEQ ID NO: 20517 - protein, 193 aa, Neisseria meningitidis; identical to SEQ ID NO: 1600

SEQ ID NO: 20518 - protein, 642 aa, Neisseria meningitidis; identical to SEQ ID NO: 9709

SEQ ID NO: 20519 - protein, 129 aa, Neisseria meningitidis; identical to SEQ ID NO: 3613

SEQ ID NO: 20520 - protein, 94 aa, Neisseria meningitidis
MKFKRMAVAFVMSAFFVPAFSEDIEIHRVEEGFKKLNMTGKLYESVSNAPFGTVFPMRSRDGEIQYTMHKLGCFFNTCYFNVNKVPDNLKKKKT

SEQ ID NO: 20521 - protein, 798 aa, Neisseria meningitidis; identical to SEQ ID NO: 2881

SEQ ID NO: 20522 - protein, 221 aa, Neisseria meningitidis; identical to SEQ ID NO: 2270

SEQ ID NO: 20523 - protein, 365 aa, Neisseria meningitidis; identical to SEQ ID NO: 8102

SEQ ID NO: 20524 - protein, 833 aa, Neisseria meningitidis; identical to SEQ ID NO: 9278

SEQ ID NO: 20525 - protein, 498 aa, Neisseria meningitidis; identical to SEQ ID NO: 8909

SEQ ID NO: 20526 - protein, 93 aa, Neisseria meningitidis; identical to SEQ ID NO: 3468

SEQ ID NO: 20527 - protein, 54 aa, Neisseria meningitidis; identical to SEQ ID NO: 2207

SEQ ID NO: 20528 - protein, 190 aa, Neisseria meningitidis; identical to SEQ ID NO: 2428

SEQ ID NO: 20529 - protein, 161 aa, Neisseria meningitidis; identical to SEQ ID NO: 1189

SEQ ID NO: 20530 - protein, 150 aa, Neisseria meningitidis; identical to SEQ ID NO: 8244

SEQ ID NO: 20531 - protein, 394 aa, Neisseria meningitidis; identical to SEQ ID NO: 9082

SEQ ID NO: 20532 - protein, 312 aa, Neisseria meningitidis; identical to SEQ ID NO: 8564

SEQ ID NO: 20533 - protein, 320 aa, Neisseria meningitidis; identical to SEQ ID NO: 8490

SEQ ID NO: 20534 - protein, 469 aa, Neisseria meningitidis; identical to SEQ ID NO: 3473

SEQ ID NO: 20535 - protein, 179 aa, Neisseria meningitidis; identical to SEQ ID NO: 8483

SEQ ID NO: 20536 - protein, 1204 aa, Neisseria meningitidis; identical to SEQ ID NO: 8988

SEQ ID NO: 20537 - protein, 92 aa, Neisseria meningitidis; identical to SEQ ID NO: 8116

SEQ ID NO: 20538 - protein, 419 aa, Neisseria meningitidis
MKQTVLKNNLQNLLESAENILLLQGPVGDFFLRLADWLTANGKTVHKFNFNAGDDYFYPPTQAHTVVFNDNYDAFPEFLQEYITQHHIQAVVCFGDTRPYHVIAKRIANENQASFWAFEEGYFRPYYITLEKDGVNAFSPLPRRADFFLEQFPKLAQQEYKAPTPVHGGFTPMAKNAIRYYIELFRNPRKYPDYIHHRAPNAGHYLKPWSLSILKRLNYYIEDIQIAKRVEAGKYGKFFIVPLQVFNDSQVRIHCDFPSVRSFLLHVLSSFAEHAPADTNIIIKHHPMDRGFIDYWRDIKRFIKEPPELKGRVIYVHDVPLPVFLRHGLGMVTINSTSGLSGLIHNMPVKVLGRAYYDIPGITDQNTLAEFWNHPTPPDKELFHAYRMYHLNVTQINGNFYSQVFFPNKNTSDSSTPTT

SEQ ID NO: 20539 - protein, 273 aa, Neisseria meningitidis; identical to SEQ ID NO: 8582

SEQ ID NO: 20540 - protein, 195 aa, Neisseria meningitidis; identical to SEQ ID NO: 9126

SEQ ID NO: 20541 - protein, 335 aa, Neisseria meningitidis
MSTFFRQTAQAMIAKHIDRFPLLKLDQVIDWQPIEQYLNRQKTRYLRDHRGRPAYPLLSMFKAVLLGQWNSLSDPELEHSLITRIDFNLFCRFDELSIPDYSTLCRYRNWLAQDDTLSELLKLINRQLTEKGLKIEKASAAVVDATIIQTAGSKQRQAIEVDEEGQISGQTTPSKDSDARWIKKNGLYKLGYKQHTRTDAEGYIEKLHITPANAHECKHLSPLLEGLPEGTTVYADKGYDSAENRQHLEEHQLLDGIMRKACRNRPLSEVQTKRNRYLSKTRYVVEQSFGTLHRKFRYARAAYFGLIKVSAQSHLKAMCLNLLKAANRLSAPAAA

SEQ ID NO: 20542 - protein, 210 aa, Neisseria meningitidis; identical to SEQ ID NO: 48

SEQ ID NO: 20543 - protein, 182 aa, Neisseria meningitidis; identical to SEQ ID NO: 125

SEQ ID NO: 20544 - protein, 515 aa, Neisseria meningitidis; identical to SEQ ID NO: 654

SEQ ID NO: 20545 - protein, 232 aa, Neisseria meningitidis; identical to SEQ ID NO: 9204

SEQ ID NO: 20546 - protein, 524 aa, Neisseria meningitidis; identical to SEQ ID NO: 2756

SEQ ID NO: 20547 - protein, 404 aa, Neisseria meningitidis; identical to SEQ ID NO: 9479

SEQ ID NO: 20548 - protein, 725 aa, Neisseria meningitidis; identical to SEQ ID NO: 2772

SEQ ID NO: 20549 - protein, 213 aa, Neisseria meningitidis; identical to SEQ ID NO: 8153

SEQ ID NO: 20550 - protein, 431 aa, Neisseria meningitidis; identical to SEQ ID NO: 7311

SEQ ID NO: 20551 - protein, 158 aa, Neisseria meningitidis
  misc_feature 2, 3, 4: 'Xaa' is any amino acid
VXXXIISYGTSSYGYDIRCANEFKIFTNINSTIVDPKNFDPKNFVTVEDDCCIIPPNSFALARTVEYFRIPRNVLTVCLGKSTYARCGIIVNVTPFEPEWEGYVTLEFSNTTPLPAKIYAGEGVAQVLFFESDEICETSYKDRNGKYMGQTGVTLPKA

SEQ ID NO: 20552 - protein, 124 aa, Neisseria meningitidis; identical to SEQ ID NO: 2713

SEQ ID NO: 20553 - protein, 74 aa, Neisseria meningitidis; identical to SEQ ID NO: 5759

SEQ ID NO: 20554 - protein, 230 aa, Neisseria meningitidis; identical to SEQ ID NO: 3035

SEQ ID NO: 20555 - protein, 655 aa, Neisseria meningitidis; identical to SEQ ID NO: 9708

SEQ ID NO: 20556 - protein, 430 aa, Neisseria meningitidis; identical to SEQ ID NO: 8606

SEQ ID NO: 20557 - protein, 526 aa, Neisseria meningitidis
MPSIKRALISLSDKTGAVEFAQTLTKLGVEILSTGGTAKLLADAGVPVIEVADYTGFPEMLDGRVKTLHPKIHGGILGRCDLDEHVAKMEEHGIGNIDLVCVNLYPFAATIAKPNCTLEDAIENIDIGGPTMVRSAAKNWKHVAIVTDTADFPAIAAELEANNGALSDKTRFNLSRKAFSHTAQYDGMISNYLTSLSDDVLSGEPEIGEFPSQFNQSWIKVQDMRYGENPHQRAAFYRDIDPAAGSLSAYKQLQGKELSYNNIADADAAWEAVKSFDAPACVIVKHANPCGVAVAADTLTAYKLAYVTDTTSAFGGIIAFNREVDGETVKQITDNQFMEVLMAPKFTAEALEIAAAKKNVRVLEVPLEAGANRFELKRVGGGLLVQTPDIHRLNRADLKVVSKRQPTEQEWNDLMFVWNVAKYVKSNAIVFGKGGQTYGIGAGQMSRVDSTRIAARKAQDANLDLNGACAASDAFFPFRDGVDVIAEQGIKAIIHPAGSMRDQEVFDAADEHGIAMVVTDVRHFRH

SEQ ID NO: 20558 - protein, 624 aa, Neisseria meningitidis
LRPIFGRNAVCSDGISQTHCPTFKTTLMKNIRNFSIIAHIDHGKSTLADRFIQYCGGLDLREMSTQVLDSMDIEKERGITIKAQTAALNYKARDGQVYQLNLIDTPGHVDFSYEVSRSLSACEGALLVVDASQGVEAQTVANCYTAIDLGVEVVPVLNKIDLPAADPERVEQEIEDIIGIDAVGAVQCSAKSGIGVEDVLEEIVAKIPAPTGDENAPLQAVIVDSWFDNYVGVVMLIRVKNGTIKLKDKVRFMSTKAETQVEQLGVFTPKSVQKQELKAGEVGFLITGVKELGQAKVGDTVTLVANPATEPLPGFQEVQSQVFAGLYPVESHDYEALRDALEKLQLNDASLKFEPEVSQALGFGFRCGFLGLLHLEIVQERLEREFDMDLITTAPTVVYEVVLKSGEKIEVENPSKLPDIGSIETILEPIITATILVPQEYVGNVMTLCNQKRGVQVNMQYMGRQVMLTYDLPMNEVVMDFFDKLKSTSRGYASLDYHFKEFQPSDLIKLDIMVNGEKVDALSLIVHRQSAVHRGRELASKMRELIPRQMFDIAVQAAIGSQIIARENVKALRKNVLAKCYGGDITRKKKLLEKQKAGKRRMKQVGNVEIPQSAFLAILQVSDK

SEQ ID NO: 20559 - protein, 363 aa, Neisseria meningitidis; identical to SEQ ID NO: 8784

SEQ ID NO: 20560 - protein, 737 aa, Neisseria meningitidis; identical to SEQ ID NO: 8684

SEQ ID NO: 20561 - protein, 593 aa, Neisseria meningitidis
MPYFALFDDAVSGRAKRYQNHVESRFFRPEELDALDGALQSGWQKGLHAVLFADYGFGLPLTGVESERGGNLALHWFADCADTDAASWLARHSDDLPAGISTPQSSVSEADYLDHIRQIHEAIRRGDTYQINYTTRLHLQAYGNPVKLYQRLRQPVPYAVLSHLPDAQGQSAWTLCFSPELFLKIGSDGTISTEPMKGTAPILGDGQDERRAAELQADPKNRAENVMIVDLLRNDLGKIAQTGTVCVPEPFKVSRFGSVWQMTSTIQAQALPHTSFADILRAAFPCGSITGAPKKMSMQIIESLEAEARGLYTGSIGYLNPCSGGLGFEGTFNVVIRTLSLTPLSDGIYQGVYGVGSGIVIDSDPAAEYRECGWKARFLNELRPNFGIFETLRAENGRCTLLDRHLCRLKTSARALNLPLPDGCENQIKQYIADLPDGAFRVKALLASDGISLSRAVLNRLTDKQRVIISPTILPAQNYLRRFKTTHRALFDQAWQTAETQGAFDSLFFNSDGILLEGGRSNVFVKYQGQWLTPSLDLDILNGIMRQAVLDEPQKYLQTNQVIETHITQKTLQEAEEIRLSNALRGVFAAALA

SEQ ID NO: 20562 - protein, 323 aa, Neisseria meningitidis; identical to SEQ ID NO: 3380

SEQ ID NO: 20563 - protein, 245 aa, Neisseria meningitidis; identical to SEQ ID NO: 10890

SEQ ID NO: 20564 - protein, 298 aa, Neisseria meningitidis
LNPTNDLKAWQQRAQAQTELLLERFLPSENEIPHTLHEAMRYAALDGGKRLRPMLVLAASELGEAVHEAVEQAMAAIEMIHVYSLVHDDMPAMDNDSLRRGKPTCHIKYGEANALLTGDALQTQAFDVLSRPTELPAARQLAMLSVLAKAGGSRGMAGGQAIDLANVGKQMVQADLEQMHSLKTGALIRAAVLLGAMSCPNLSEDSLAVLDDYAAKLGLAFQVIDDVLDCEADTATLGKTAGKDADNDKPTYVKLMGLEAARSYAHKLVAEAVALLEPFGDKALRLRQLAEFAVARKY

SEQ ID NO: 20565 - protein, 378 aa, Neisseria meningitidis
MKNISLSPPAMLGILGGGQLGRMFTVAAKTMGYKVTVLDPDPDAPAAEFADCHLCAPFNDQAALDELAKCAAVTTEFENVNADAMRFLAKHTNVSPGSDCVAIAQNRIQEKAWIRKAGLQTAPYQAICKAEDITEESIQFLPGILKTATLGYDGKGQIRVKTVDELKAAFAEHRGVDCVLEKMVDLRGEISVIVCRLNNDNVQTFDPAENIHENGILAYSIVPARLSADIQQQARQMAQRLADELNYVGVLAVEMFVVGDTHELVVNEIAPRPHNSGHHTVDACAADQFQQQVRLMCNLPPADTKLLSSCCMANILGDVWQEDGGEPDWFPLQSRPDARLHLYGKKTAHKGRKMGHFTVLTTDSDTAFQEAKKLHQSL

SEQ ID NO: 20566 - protein, 395 aa, Neisseria meningitidis; identical to SEQ ID NO: 2182

SEQ ID NO: 20567 - protein, 160 aa, Neisseria meningitidis; identical to SEQ ID NO: 9458

SEQ ID NO: 20568 - protein, 278 aa, Neisseria meningitidis; identical to SEQ ID NO: 8643

SEQ ID NO: 20569 - protein, 242 aa, Neisseria meningitidis; identical to SEQ ID NO: 5117

SEQ ID NO: 20570 - protein, 167 aa, Neisseria meningitidis; identical to SEQ ID NO: 2861

SEQ ID NO: 20571 - protein, 220 aa, Neisseria meningitidis; identical to SEQ ID NO: 8978

SEQ ID NO: 20572 - protein, 123 aa, Neisseria meningitidis; identical to SEQ ID NO: 9280

SEQ ID NO: 20573 - protein, 177 aa, Neisseria meningitidis; identical to SEQ ID NO: 5671

SEQ ID NO: 20574 - protein, 686 aa, Neisseria meningitidis; identical to SEQ ID NO: 8494

SEQ ID NO: 20575 - protein, 252 aa, Neisseria meningitidis; identical to SEQ ID NO: 9703

SEQ ID NO: 20576 - protein, 65 aa, Neisseria meningitidis; identical to SEQ ID NO: 6901

SEQ ID NO: 20577 - protein, 99 aa, Neisseria meningitidis; identical to SEQ ID NO: 9108

SEQ ID NO: 20578 - protein, 123 aa, Neisseria meningitidis; identical to SEQ ID NO: 7208

SEQ ID NO: 20579 - protein, 436 aa, Neisseria meningitidis; identical to SEQ ID NO: 6841

SEQ ID NO: 20580 - protein, 513 aa, Neisseria meningitidis; identical to SEQ ID NO: 3645

SEQ ID NO: 20581 - protein, 416 aa, Neisseria meningitidis; identical to SEQ ID NO: 8411

SEQ ID NO: 20582 - protein, 114 aa, Neisseria meningitidis; identical to SEQ ID NO: 13744

SEQ ID NO: 20583 - protein, 942 aa, Neisseria meningitidis; identical to SEQ ID NO: 9455

SEQ ID NO: 20584 - protein, 429 aa, Neisseria meningitidis; identical to SEQ ID NO: 2821

SEQ ID NO: 20585 - protein, 169 aa, Neisseria meningitidis; identical to SEQ ID NO: 718

SEQ ID NO: 20586 - protein, 178 aa, Neisseria meningitidis; identical to SEQ ID NO: 1831

SEQ ID NO: 20587 - protein, 81 aa, Neisseria meningitidis; identical to SEQ ID NO: 7948

SEQ ID NO: 20588 - protein, 166 aa, Neisseria meningitidis; identical to SEQ ID NO: 1498

SEQ ID NO: 20589 - protein, 354 aa, Neisseria meningitidis; identical to SEQ ID NO: 18199

SEQ ID NO: 20590 - protein, 166 aa, Neisseria meningitidis; identical to SEQ ID NO: 1240

SEQ ID NO: 20591 - protein, 221 aa, Neisseria meningitidis; identical to SEQ ID NO: 8910

SEQ ID NO: 20592 - protein, 313 aa, Neisseria meningitidis; identical to SEQ ID NO: 3869

SEQ ID NO: 20593 - protein, 307 aa, Neisseria meningitidis; identical to SEQ ID NO: 8903

SEQ ID NO: 20594 - protein, 225 aa, Neisseria meningitidis
MQADFNRPVLAIDTGTSCLSLALRADGETRLFHQEAGSRQSELILPEIRTLFLDAGITAADLGAVVYAQGPGAFTGLRIGIGVAQGLATPFDTPLIGVPSLDAAASMPPPQSCILAATDARMGEVFYAWFDTLNCRRLSDYQVGKAADIRLPEGCTFSDGIGSAFALEEAPPFSGKPDMPTAADFLALAAKGGYPAVHAAHAELLYVRNKIALTAKEQAERKART

SEQ ID NO: 20595 - protein, 122 aa, Neisseria meningitidis; identical to SEQ ID NO: 2347

SEQ ID NO: 20596 - protein, 241 aa, Neisseria meningitidis; identical to SEQ ID NO: 9063

SEQ ID NO: 20597 - protein, 160 aa, Neisseria meningitidis; identical to SEQ ID NO: 2526

SEQ ID NO: 20598 - protein, 288 aa, Neisseria meningitidis; identical to SEQ ID NO: 11152

SEQ ID NO: 20599 - protein, 517 aa, Neisseria meningitidis; identical to SEQ ID NO: 8070

SEQ ID NO: 20600 - protein, 483 aa, Neisseria meningitidis; identical to SEQ ID NO: 10527

SEQ ID NO: 20601 - protein, 275 aa, Neisseria meningitidis
MQLVNQSLIVQAGKRRNIQASEAEIDAVVAKNPALKNLSPAQRRDFADNIIAEKVRQQAVMQNSRVSEAEIDAFLEQAQKQGITLPEGAPLRQYRAQHIVIKASTYYILFVKINNKYKAIQMKELDKIDFRILKILQQNARIPMTELAEKVGLSTTPVTERVRRLEREHYISGYHAHLNPHLLGKPLLVFVELKLQSKSGNIFEDFKKEVLKIPQIMECHLVSGEYDYLIKVRLPDMSAYRDMLGNILLQLPAASESRSYVVMEEVKENPVLDLD

SEQ ID NO: 20602 - protein, 330 aa, Neisseria meningitidis; identical to SEQ ID NO: 8389

SEQ ID NO: 20603 - protein, 281 aa, Neisseria meningitidis; identical to SEQ ID NO: 8926

SEQ ID NO: 20604 - protein, 307 aa, Neisseria meningitidis; identical to SEQ ID NO: 9535

SEQ ID NO: 20605 - protein, 636 aa, Neisseria meningitidis; identical to SEQ ID NO: 9157

SEQ ID NO: 20606 - protein, 251 aa, Neisseria meningitidis; identical to SEQ ID NO: 2955

SEQ ID NO: 20607 - protein, 377 aa, Neisseria meningitidis; identical to SEQ ID NO: 8674

SEQ ID NO: 20608 - protein, 325 aa, Neisseria meningitidis; identical to SEQ ID NO: 11179

SEQ ID NO: 20609 - protein, 261 aa, Neisseria meningitidis
MENGKTVPRWRFALKSAGWHLLISLSVAGLAALLVFKVWYPYPYAELTGGLSLYQLVVAVDIVCGPLLTLILASPKKKTKARMVDFSMVGIIQLAALVYGLHSVSLARPVVEAFEQDRMTIVTAAEVVVEDLHKAPEGLQSLSWFGIRRIALKEPEDADEKNKTLDLSLKGIEPSMRPDQWLPYSDKEAEEIRKHLKPLKVLADARKTTVADILKQAGLAEGEELYYLPFTSSRQKEWIVITDKEGNTKGYAPIDGFIITP

SEQ ID NO: 20610 - protein, 303 aa, Neisseria meningitidis; identical to SEQ ID NO: 8029

SEQ ID NO: 20611 - protein, 239 aa, Neisseria meningitidis; identical to SEQ ID NO: 9474

SEQ ID NO: 20612 - protein, 256 aa, Neisseria meningitidis; identical to SEQ ID NO: 3040

SEQ ID NO: 20613 - protein, 199 aa, Neisseria meningitidis; identical to SEQ ID NO: 2856

SEQ ID NO: 20614 - protein, 76 aa, Neisseria meningitidis; identical to SEQ ID NO: 374

SEQ ID NO: 20615 - protein, 91 aa, Neisseria meningitidis; identical to SEQ ID NO: 9295

SEQ ID NO: 20616 - protein, 296 aa, Neisseria meningitidis; identical to SEQ ID NO: 8802

SEQ ID NO: 20617 - protein, 241 aa, Neisseria meningitidis; identical to SEQ ID NO: 400

SEQ ID NO: 20618 - protein, 83 aa, Neisseria meningitidis; identical to SEQ ID NO: 8382

SEQ ID NO: 20619 - protein, 249 aa, Neisseria meningitidis; identical to SEQ ID NO: 10521

SEQ ID NO: 20620 - protein, 202 aa, Neisseria meningitidis
MMEKIGLFGGTFDPIHNGHLHIARAFADEIGLDAVVFLPTGGPYHKDAASASAADRLAMVELATAEDARFAVSDCDIVRRGETYTFDTVQIFRQQFPSAQLWWLMGSDSLMKLHTWKKWQMLVRETNIAVAMRQGDSLHQTPRELHAWLGNALQDGSVRILSAPMHNVSSTEIRRNLAGQGVSDGIPPAAARYIREHGLYEK

SEQ ID NO: 20621 - protein, 83 aa, Neisseria meningitidis; identical to SEQ ID NO: 9519

SEQ ID NO: 20622 - protein, 106 aa, Neisseria meningitidis; identical to SEQ ID NO: 2510

SEQ ID NO: 20623 - protein, 80 aa, Neisseria meningitidis; identical to SEQ ID NO: 3196

SEQ ID NO: 20624 - protein, 287 aa, Neisseria meningitidis; identical to SEQ ID NO: 8500

SEQ ID NO: 20625 - protein, 122 aa, Neisseria meningitidis; identical to SEQ ID NO: 848

SEQ ID NO: 20626 - protein, 299 aa, Neisseria meningitidis
LPSEKKMCIEMKFIFFVLYVLQFLPFALLHKLADLTGLLAYLLVKPRRRIGEINLAKCFPEWDGKKRETVLKQHFKHMAKLMLEYGLYWYAPAGRLKSLVRYRNKHYLDDALAAGEKVIILYPHFTAFEMAVYALNQDVPLISMYSHQKNKILDAQILKGRNRYDNVFLIGRTEGLRALVKQFRKSSAPFLYLPDQDFGRNDSVFVDFFGIQTATITGLSRIAALANAKVIPAIPVREADNTVTLHFYPAWESFPSEDAQADAQRMNRFIEERVREHPEQYFWLHKRFKTRPEGSPDFY

SEQ ID NO: 20627 - protein, 170 aa, Neisseria meningitidis; identical to SEQ ID NO: 8813

SEQ ID NO: 20628 - protein, 360 aa, Neisseria meningitidis
MQTANKKTILVTGGAGFIGSAVVRHIIRNTQDSVVNLDKLTYAGNLESLTDIADNPRYAFEQVDICDRAELDRVFAQHRPDAVMHLAAESHVDRSIGSAGEFIQTNIVGTFNLLEAARAYWQQMPSEQHEAFRFHHISTDEVYGDLGGTDDLFTETTPYAPSSPYSASKASSDHLVRAWQRTYGLPTIVTNCSNNYGPYHFPEKLIPLMILNALDGKPLPVYGDGMQIRDWLFVEDHARALYQVVTEGVVGETYNIGGHNEKANIEVVKTICALLEELVPEKPAGVARYEDLITFVQDRPGHDVRYAVDAAKIRRDLGWLPLETFESGLRKTVQWYLDNKTWWQNVLNGSYRLERLGTGK

SEQ ID NO: 20629 - protein, 109 aa, Neisseria meningitidis; identical to SEQ ID NO: 1560

SEQ ID NO: 20630 - protein, 196 aa, Neisseria meningitidis; identical to SEQ ID NO: 8445

SEQ ID NO: 20631 - protein, 115 aa, Neisseria meningitidis; identical to SEQ ID NO: 1985

SEQ ID NO: 20632 - protein, 242 aa, Neisseria meningitidis; identical to SEQ ID NO: 3156

SEQ ID NO: 20633 - protein, 494 aa, Neisseria meningitidis; identical to SEQ ID NO: 8319

SEQ ID NO: 20634 - protein, 90 aa, Neisseria meningitidis; identical to SEQ ID NO: 2539

SEQ ID NO: 20635 - protein, 403 aa, Neisseria meningitidis; identical to SEQ ID NO: 9029

SEQ ID NO: 20636 - protein, 716 aa, Neisseria meningitidis; identical to SEQ ID NO: 2479

SEQ ID NO: 20637 - protein, 89 aa, Neisseria meningitidis; identical to SEQ ID NO: 1367

SEQ ID NO: 20638 - protein, 234 aa, Neisseria meningitidis
MTSCEPVNEQTSFNNLEPMTGFEHTVTFDFQGIKMVIPYGYLARYTQDNATKWLSDTPGQDAYSINLIEISVYYKKTDQGWVLEPYNQQNKAHFIQFLRDGLDSVDDIVIRKDACSLSTTMGERLLTYGVKKMPSAYPEYEAYEDKRHIPENPYFHEFYYIKKGENPAIITHRNYHRYGENDYSTSVGSCINGFTVRYYPFIREKQQLTQQELVGYHQQVEQLVQSFVNNSSKK

SEQ ID NO: 20639 - protein, 116 aa, Neisseria meningitidis; identical to SEQ ID NO: 840

SEQ ID NO: 20640 - protein, 581 aa, Neisseria meningitidis; identical to SEQ ID NO: 8251

SEQ ID NO: 20641 - protein, 90 aa, Neisseria meningitidis; identical to SEQ ID NO: 8325

SEQ ID NO: 20642 - protein, 408 aa, Neisseria meningitidis; identical to SEQ ID NO: 8409

SEQ ID NO: 20643 - protein, 296 aa, Neisseria meningitidis; identical to SEQ ID NO: 8302

SEQ ID NO: 20644 - protein, 375 aa, Neisseria meningitidis; identical to SEQ ID NO: 9697

SEQ ID NO: 20645 - protein, 122 aa, Neisseria meningitidis; identical to SEQ ID NO: 2373

SEQ ID NO: 20646 - protein, 101 aa, Neisseria meningitidis; identical to SEQ ID NO: 705

SEQ ID NO: 20647 - protein, 232 aa, Neisseria meningitidis; identical to SEQ ID NO: 18908

SEQ ID NO: 20648 - protein, 417 aa, Neisseria meningitidis; identical to SEQ ID NO: 9265

SEQ ID NO: 20649 - protein, 122 aa, Neisseria meningitidis; identical to SEQ ID NO: 2377

SEQ ID NO: 20650 - protein, 422 aa, Neisseria meningitidis; identical to SEQ ID NO: 8427

SEQ ID NO: 20651 - protein, 704 aa, Neisseria meningitidis; identical to SEQ ID NO: 8924

SEQ ID NO: 20652 - protein, 436 aa, Neisseria meningitidis; identical to SEQ ID NO: 8096

SEQ ID NO: 20653 - protein, 139 aa, Neisseria meningitidis; identical to SEQ ID NO: 13062

SEQ ID NO: 20654 - protein, 225 aa, Neisseria meningitidis; identical to SEQ ID NO: 1002

SEQ ID NO: 20655 - protein, 305 aa, Neisseria meningitidis; identical to SEQ ID NO: 9487

SEQ ID NO: 20656 - protein, 459 aa, Neisseria meningitidis; identical to SEQ ID NO: 17478

SEQ ID NO: 20657 - protein, 481 aa, Neisseria meningitidis
MNWSDLNLMPAMPEVALLSLLVLLLLADLWVSDDKRRWTHYGALATVAVTAVVQLAVWEQGSTSSFNGMYIADGMSRLAKMVLYALTFALFVYAKPYNQVRGIFKGEFYTLSLFALLGMSVMVSAGHFLTAYIGLELLSLALYALIALRRDSGFAAEAALKYFVLGALASGLLLYGISMVYGATGSLEFAGVLASSFNEEANEWLLKLGLVFIVVAVAFKLGAVPFHMWVPDVYHGAPTSVTALVGTAPKVAAVVFAFRILVTGLGTVHHDWSLMFALLAAASLLVGNLAAIMQTNIKRMLAYSTVSHMGFILLAFMAGAVGFAAGLYYAITYALMAAAGFGVLMVLSDGDNECENISDLAGLNQHRVWLAFLMLLVMFSMAGIPPLMGFYAKFGVIMALLKQGYVWLSVFAVVMSLIGAFYYLRVVKVMYFDESGRARPTVGGNNAAKFLLSVNALLLVLWGIMPQTVIDWCAKALENTL

SEQ ID NO: 20658 - protein, 243 aa, Neisseria meningitidis; identical to SEQ ID NO: 8753

SEQ ID NO: 20659 - protein, 301 aa, Neisseria meningitidis; identical to SEQ ID NO: 2409

SEQ ID NO: 20660 - protein, 365 aa, Neisseria meningitidis
LRYNSNHLPKPSNTMPSETRLPNFIRVLIFALGFIFLNACSEQTAQTVTLQGETMGTTYTVKYLSNNRDKLPSPAEIQKRIDDALKEVNRQMSTYQPDSEISRFNQHTAGKPLRISSDFAHVTAEAVRLNRLTHGALDVTVGPLVNLWGFGPDKSVTREPSPEQIKQAASYTGIDKIILKQGKDYASLSKTHPKAYLDLSSIAKGFGVDKVAGELEKYGIQNYLVEIGGELHGKGKNARGEPWRIGIEQPNIVQGGNTQIIVPLNNRSLATSGDYRIFHVDKSGKRLSHIINPNNKRPISHNLASISVVADSAMTADGLSTGLFVLGETEALKLAEREKLAVFLIVRDTGGYRTAMSSEFEKLLR

SEQ ID NO: 20661 - protein, 1392 aa, Neisseria meningitidis; identical to SEQ ID NO: 8821

SEQ ID NO: 20662 - protein, 416 aa, Neisseria meningitidis; identical to SEQ ID NO: 5338

SEQ ID NO: 20663 - protein, 392 aa, Neisseria meningitidis; identical to SEQ ID NO: 8479

SEQ ID NO: 20664 - protein, 313 aa, Neisseria meningitidis; identical to SEQ ID NO: 2172

SEQ ID NO: 20665 - protein, 79 aa, Neisseria meningitidis; identical to SEQ ID NO: 8059

SEQ ID NO: 20666 - protein, 921 aa, Neisseria meningitidis; identical to SEQ ID NO: 9329

SEQ ID NO: 20667 - protein, 163 aa, Neisseria meningitidis; identical to SEQ ID NO: 6300

SEQ ID NO: 20668 - protein, 122 aa, Neisseria meningitidis; identical to SEQ ID NO: 6208

SEQ ID NO: 20669 - protein, 279 aa, Neisseria meningitidis; identical to SEQ ID NO: 3315

SEQ ID NO: 20670 - protein, 328 aa, Neisseria meningitidis; identical to SEQ ID NO: 7999

SEQ ID NO: 20671 - protein, 141 aa, Neisseria meningitidis; identical to SEQ ID NO: 13582

SEQ ID NO: 20672 - protein, 741 aa, Neisseria meningitidis; identical to SEQ ID NO: 8115

SEQ ID NO: 20673 - protein, 85 aa, Neisseria meningitidis; identical to SEQ ID NO: 4382

SEQ ID NO: 20674 - protein, 315 aa, Neisseria meningitidis; identical to SEQ ID NO: 9309

SEQ ID NO: 20675 - protein, 363 aa, Neisseria meningitidis; identical to SEQ ID NO: 10115

SEQ ID NO: 20676 - protein, 286 aa, Neisseria meningitidis; identical to SEQ ID NO: 5322

SEQ ID NO: 20677 - protein, 271 aa, Neisseria meningitidis; identical to SEQ ID NO: 3345

SEQ ID NO: 20678 - protein, 484 aa, Neisseria meningitidis; identical to SEQ ID NO: 8543

SEQ ID NO: 20679 - protein, 506 aa, Neisseria meningitidis; identical to SEQ ID NO: 2869

SEQ ID NO: 20680 - protein, 187 aa, Neisseria meningitidis; identical to SEQ ID NO: 8603

SEQ ID NO: 20681 - protein, 99 aa, Neisseria meningitidis; identical to SEQ ID NO: 9108

SEQ ID NO: 20682 - protein, 397 aa, Neisseria meningitidis
MNPKHLIAFSALFAATQANALPVASVSLDTVTVSPSAPYTDTNGLLTDYGNAAASPWMKKLRSVAQGSGETFRILQIGDSHTAGDFFTDSLRKRLQKTWGDGGIGWVYPANVKGQRMAAVRHNGNWQSLTSRSAAADFPLGGILAHTGSGGSMTLTASDGKTGKQRISLFAKPLLAEQTLTVNGNTVSANGGGWQVLDTGAALPLTIQTEMPWDIGFINIENPAGGITVSAMGINGAQLTQWSKWRADRMNDLAQTGADLVILAYGTNEAFGDNIDIADTEQKWLDTVRQIHDSLPAAGILIIGAPESLKNTLGVCGTRPVRLTEVQQMQRRVARQGQTMFWSWQNAMGGICSMKNWLNQGWAAKDGVHFSAKGYRRAAEMLADSLEELVRAAAIRQ

SEQ ID NO: 20683 - protein, 398 aa, Neisseria meningitidis; identical to SEQ ID NO: 3453

SEQ ID NO: 20684 - protein, 178 aa, Neisseria meningitidis; identical to SEQ ID NO: 2084

SEQ ID NO: 20685 - protein, 347 aa, Neisseria meningitidis; identical to SEQ ID NO: 2159

SEQ ID NO: 20686 - protein, 163 aa, Neisseria meningitidis; identical to SEQ ID NO: 684

SEQ ID NO: 20687 - protein, 447 aa, Neisseria meningitidis; identical to SEQ ID NO: 2839

SEQ ID NO: 20688 - protein, 333 aa, Neisseria meningitidis; identical to SEQ ID NO: 8271

SEQ ID NO: 20689 - protein, 222 aa, Neisseria meningitidis; identical to SEQ ID NO: 8955

SEQ ID NO: 20690 - protein, 404 aa, Neisseria meningitidis; identical to SEQ ID NO: 9186

SEQ ID NO: 20691 - protein, 196 aa, Neisseria meningitidis; identical to SEQ ID NO: 8287

SEQ ID NO: 20692 - protein, 421 aa, Neisseria meningitidis; identical to SEQ ID NO: 11090

SEQ ID NO: 20693 - protein, 264 aa, Neisseria meningitidis; identical to SEQ ID NO: 8571

SEQ ID NO: 20694 - protein, 199 aa, Neisseria meningitidis; identical to SEQ ID NO: 9606

SEQ ID NO: 20695 - protein, 268 aa, Neisseria meningitidis; identical to SEQ ID NO: 8685

SEQ ID NO: 20696 - protein, 582 aa, Neisseria meningitidis; identical to SEQ ID NO: 8569

SEQ ID NO: 20697 - protein, 759 aa, Neisseria meningitidis; identical to SEQ ID NO: 11235

SEQ ID NO: 20698 - protein, 300 aa, Neisseria meningitidis; identical to SEQ ID NO: 9406

SEQ ID NO: 20699 - protein, 329 aa, Neisseria meningitidis; identical to SEQ ID NO: 8120

SEQ ID NO: 20700 - protein, 199 aa, Neisseria meningitidis; identical to SEQ ID NO: 2043

SEQ ID NO: 20701 - protein, 427 aa, Neisseria meningitidis; identical to SEQ ID NO: 146

SEQ ID NO: 20702 - protein, 237 aa, Neisseria meningitidis; identical to SEQ ID NO: 13052

SEQ ID NO: 20703 - protein, 272 aa, Neisseria meningitidis; identical to SEQ ID NO: 18460

SEQ ID NO: 20704 - protein, 397 aa, Neisseria meningitidis; identical to SEQ ID NO: 8317

SEQ ID NO: 20705 - protein, 469 aa, Neisseria meningitidis; identical to SEQ ID NO: 19069

SEQ ID NO: 20706 - protein, 626 aa, Neisseria meningitidis; identical to SEQ ID NO: 2278

SEQ ID NO: 20707 - protein, 408 aa, Neisseria meningitidis; identical to SEQ ID NO: 9981

SEQ ID NO: 20708 - protein, 76 aa, Neisseria meningitidis; identical to SEQ ID NO: 8288

SEQ ID NO: 20709 - protein, 1161 aa, Neisseria meningitidis; identical to SEQ ID NO: 9311

SEQ ID NO: 20710 - protein, 107 aa, Neisseria meningitidis; identical to SEQ ID NO: 875

SEQ ID NO: 20711 - protein, 212 aa, Neisseria meningitidis; identical to SEQ ID NO: 8173

SEQ ID NO: 20712 - protein, 261 aa, Neisseria meningitidis; identical to SEQ ID NO: 3244

SEQ ID NO: 20713 - protein, 418 aa, Neisseria meningitidis; identical to SEQ ID NO: 9181

SEQ ID NO: 20714 - protein, 298 aa, Neisseria meningitidis; identical to SEQ ID NO: 9176

SEQ ID NO: 20715 - protein, 397 aa, Neisseria meningitidis; identical to SEQ ID NO: 9490

SEQ ID NO: 20716 - protein, 154 aa, Neisseria meningitidis; identical to SEQ ID NO: 741

SEQ ID NO: 20717 - protein, 154 aa, Neisseria meningitidis; identical to SEQ ID NO: 9113

SEQ ID NO: 20718 - protein, 71 aa, Neisseria meningitidis; identical to SEQ ID NO: 3375

SEQ ID NO: 20719 - protein, 414 aa, Neisseria meningitidis; identical to SEQ ID NO: 8661

SEQ ID NO: 20720 - protein, 522 aa, Neisseria meningitidis; identical to SEQ ID NO: 968

SEQ ID NO: 20721 - protein, 290 aa, Neisseria meningitidis
LRPSESFGQTMCQLLGMNCNTPTDIMFSFEGFRRRGGITDHHADGFGIGFFEGKGVRLFHDDKPSANSPVADLVRAYQIKSENVIAHIRKASQGQTSLANTHPFMREMWGGYWLFAHNGHLIDFFPEQGEFFHPVGTTDSERAFCHILNRLRTRFAARPDDDTLFDAIAGLTHEIRKFGLFNFMLSDGIALFAHASTLLHYIVRQAPFGKARLLDDDVMVDFAEVTTPSDRVAVIATLPLTRDESWSQLAVDELVMFREGNIVRHDRPENPVYMSAEEGLEIARAAGVSV

SEQ ID NO: 20722 - protein, 1067 aa, Neisseria meningitidis; identical to SEQ ID NO: 495

SEQ ID NO: 20723 - protein, 257 aa, Neisseria meningitidis; identical to SEQ ID NO: 780

SEQ ID NO: 20724 - protein, 130 aa, Neisseria meningitidis
VVFGCLALHQAVSGAQRECRRQTAYARYFVAERRGREVRAVDAPLSKLAQEALQSYRNYRRNEASELAHALPLNEYLVIQIRNSMAQIMRRFDYGMTALASIGATAPFIGLFGTVWGIYHALIISGKAGR

SEQ ID NO: 20725 - protein, 273 aa, Neisseria meningitidis; identical to SEQ ID NO: 221

SEQ ID NO: 20726 - protein, 258 aa, Neisseria meningitidis; identical to SEQ ID NO: 9275

SEQ ID NO: 20727 - protein, 117 aa, Neisseria meningitidis; identical to SEQ ID NO: 3438

SEQ ID NO: 20728 - protein, 136 aa, Neisseria meningitidis; identical to SEQ ID NO: 8184

SEQ ID NO: 20729 - protein, 548 aa, Neisseria meningitidis
MKHFHDLPAWSKLWNHFDDSKTLHMREMFEQDPQRAERYWLQVGGLTLDYSKNRINDETMSLLFELAREAGVPERMRQMFHGEKINTTENRAVLHVALRNRTNSPIVVDGEDVMPKVNRVLQRMGEFAHEVRSGSWLGYTNQVITDVVNIGIGGSDLGPLMMCTALKPFGHPRLNMHFVSNVDGSQLRDVLSKVHPETTLFIIASKTFTTQETLTNALTAREWFLNHAGDEEAVAKHFAAVSTNQKAVAEFGIDTANMFEFWDWVGGRYSLWSAIGLPIMLYLGEENFIEMLNGAHLMDQHFINTPLERNLPVILALIGIWYINYYGGGSHVIAPYDQHLHRLPKFIQQLDMESNGKQVTLDGKAVGHETSPIIWGETGINGQHAFFQLLHQGTHITPIDLIASLEKRSNLPGHHEILLANVFAQAEAFMRGKTPDEVRAELKAQGMDEARIEELVPHKTFSGNRPTNLILMDKVNPRNMGSLIAMYEHKTFVQGIIWGINSFDQWGVELGKQLAKTILGELTGETGSQKHDSSTERLINLYLQTNRK

SEQ ID NO: 20730 - protein, 90 aa, Neisseria meningitidis; identical to SEQ ID NO: 8632

SEQ ID NO: 20731 - protein, 179 aa, Neisseria meningitidis; identical to SEQ ID NO: 8483

SEQ ID NO: 20732 - protein, 352 aa, Neisseria meningitidis; identical to SEQ ID NO: 2780

SEQ ID NO: 20733 - protein, 431 aa, Neisseria meningitidis; identical to SEQ ID NO: 9394

SEQ ID NO: 20734 - protein, 489 aa, Neisseria meningitidis; identical to SEQ ID NO: 2475

SEQ ID NO: 20735 - protein, 349 aa, Neisseria meningitidis
MSKQPTSKRQWRDGAAPSAKKTAKPFKSKARPKGETRKTATQAYGQKASDGIKPQNAPKQRAAKAKKLVVRNPNQKIMEHARDLKERRSDLSRMEPERLQKVLAASGVGSRREMEEWITNGWITVNGKTAQLGDKVTPDDHVTVKGSIIKLKWADRLPRIILYYKQEGEIVSRDDPQGRVSIFDRLPQAASSRWVAIGRLDINTSGLLILTTSGELVQRFAHPSFEVEREYAVRVLGGLTGEQMRVLTEEGVMLEDGLAKVERIREQGGEGANKWYNVVIKEGRNREVRRIFESQGLTVSRLVRVGFGPIGLPNRLKRGQFYELNPAEVANILKWAEMLLPGEYRRKKA

SEQ ID NO: 20736 - protein, 188 aa, Neisseria meningitidis; identical to SEQ ID NO: 477

SEQ ID NO: 20737 - protein, 108 aa, Neisseria meningitidis; identical to SEQ ID NO: 3002

SEQ ID NO: 20738 - protein, 305 aa, Neisseria meningitidis; identical to SEQ ID NO: 8920

SEQ ID NO: 20739 - protein, 157 aa, Neisseria meningitidis; identical to SEQ ID NO: 140

SEQ ID NO: 20740 - protein, 329 aa, Neisseria meningitidis; identical to SEQ ID NO: 8120

SEQ ID NO: 20741 - protein, 283 aa, Neisseria meningitidis; identical to SEQ ID NO: 9200

SEQ ID NO: 20742 - protein, 174 aa, Neisseria meningitidis; identical to SEQ ID NO: 8756

SEQ ID NO: 20743 - protein, 179 aa, Neisseria meningitidis; identical to SEQ ID NO: 18863

SEQ ID NO: 20744 - protein, 123 aa, Neisseria meningitidis; identical to SEQ ID NO: 616

SEQ ID NO: 20745 - protein, 105 aa, Neisseria meningitidis; identical to SEQ ID NO: 9293

SEQ ID NO: 20746 - protein, 244 aa, Neisseria meningitidis; identical to SEQ ID NO: 8034

SEQ ID NO: 20747 - protein, 208 aa, Neisseria meningitidis; identical to SEQ ID NO: 1121

SEQ ID NO: 20748 - protein, 107 aa, Neisseria meningitidis; identical to SEQ ID NO: 8140

SEQ ID NO: 20749 - protein, 78 aa, Neisseria meningitidis; identical to SEQ ID NO: 1622

SEQ ID NO: 20750 - protein, 916 aa, Neisseria meningitidis; identical to SEQ ID NO: 1114

SEQ ID NO: 20751 - protein, 437 aa, Neisseria meningitidis
MMNTPHPRPKIAVIGAGWAGLSAAVTLARHADVTLFEAGRQAGGRARALAGNTDGFGFLDNGQHILLGAYRGVLRLMKTIGSDPRAAFLRVPLHWHMHGGLQFRTLPLPAPLHILGGVLLARRVPSAFKAKLLADMSDLQKSARLGQPDTTVAQWLKQRNVPCAAVMQFWQPLVWGALNTPLETASLRVLCNVLSDGVLTKKSGSDYLLPKQDLGAIVAEPALAELQRLGADIRLETRVCRLNTLPDGKVLVNGEAFDAAVPATAPYHAAALLPEGTPEHVQTAYQNLRYHAITTVYLRYAEPVRLPAPLTGLADGTVQWLLCRGRLGLPENEVSAVISVSDRVGAFANRAWADKAHADLKRILPHLGEPEAVRVITEKRATTAADAPPPDLSWLHRHRIFPAGDYLHPDYPATLEAAVQSGFASAEACLQSLSDAV

SEQ ID NO: 20752 - protein, 563 aa, Neisseria meningitidis; identical to SEQ ID NO: 2966

SEQ ID NO: 20753 - protein, 248 aa, Neisseria meningitidis; identical to SEQ ID NO: 2041

SEQ ID NO: 20754 - protein, 387 aa, Neisseria meningitidis; identical to SEQ ID NO: 30

SEQ ID NO: 20755 - protein, 183 aa, Neisseria meningitidis; identical to SEQ ID NO: 8299

SEQ ID NO: 20756 - protein, 86 aa, Neisseria meningitidis; identical to SEQ ID NO: 3484

SEQ ID NO: 20757 - protein, 140 aa, Neisseria meningitidis; identical to SEQ ID NO: 662

SEQ ID NO: 20758 - protein, 144 aa, Neisseria meningitidis; identical to SEQ ID NO: 4528

SEQ ID NO: 20759 - protein, 307 aa, Neisseria meningitidis; identical to SEQ ID NO: 983

SEQ ID NO: 20760 - protein, 201 aa, Neisseria meningitidis
MLCPNTARNKENIMSIKSDKWIRRMSEEFGMIDPFEPNQIKEADGKRIISYGTSSYGYDIRCANEFKIFTNINSTIVDPKNFDPKNFVTVEDDCCIIPPNSFALARTVEYFRIPRNVLTVCLGKSTYARCGIIVNVTPFEPEWEGYVTLEFSNTTPLPAKIYAGEGVAQVLFFESDEICETSYKDRNGKYMGQTGVTLPKA

SEQ ID NO: 20761 - protein, 214 aa, Neisseria meningitidis; identical to SEQ ID NO: 909

SEQ ID NO: 20762 - protein, 172 aa, Neisseria meningitidis; identical to SEQ ID NO: 2773

SEQ ID NO: 20763 - protein, 206 aa, Neisseria meningitidis; identical to SEQ ID NO: 8742

SEQ ID NO: 20764 - protein, 72 aa, Neisseria meningitidis; identical to SEQ ID NO: 332

SEQ ID NO: 20765 - protein, 217 aa, Neisseria meningitidis; identical to SEQ ID NO: 9349

SEQ ID NO: 20766 - protein, 366 aa, Neisseria meningitidis
MDNIDMFMPEQEEIQSMWKEILLNYGIFLLELLTVFGAIALIVLAIVQSKKQSESGSVVLTDFSENYKKQRQSFEAFFLSGEEAKHQEKEEKKKEKAEAKAEKKRLKEGGEKSSETQKSRLFVLDFDGDLYAHAVESLRHEITAVLLIAKPEDEVLLRLESPGGVVHGYGLAASQLRRLRERNIPLTVAVDKVAASGGYMMACVADKIVSAPFAIVGSVGVVAEVPNIHRLLKKHDIDVDVMTAGEFKRTVTFMGENTEKGKQKFRQELEETHQLFKQFVSENRPQLDIEEVATGEHWFGRQALALNLIDEISTSDDLLLKAFENKQVIEVKYQEKQSLIQRIGLQAEASVEKLFAKLVNRRADVM

SEQ ID NO: 20767 - protein, 550 aa, Neisseria meningitidis; identical to SEQ ID NO: 9058

SEQ ID NO: 20768 - protein, 258 aa, Neisseria meningitidis; identical to SEQ ID NO: 9233

SEQ ID NO: 20769 - protein, 513 aa, Neisseria meningitidis; identical to SEQ ID NO: 8465

SEQ ID NO: 20770 - protein, 115 aa, Neisseria meningitidis; identical to SEQ ID NO: 3528

SEQ ID NO: 20771 - protein, 143 aa, Neisseria meningitidis; identical to SEQ ID NO: 2432

SEQ ID NO: 20772 - protein, 462 aa, Neisseria meningitidis; identical to SEQ ID NO: 8160

SEQ ID NO: 20773 - protein, 402 aa, Neisseria meningitidis; identical to SEQ ID NO: 8614

SEQ ID NO: 20774 - protein, 41 aa, Neisseria meningitidis; identical to SEQ ID NO: 3182

SEQ ID NO: 20775 - protein, 145 aa, Neisseria meningitidis; identical to SEQ ID NO: 2822

SEQ ID NO: 20776 - protein, 148 aa, Neisseria meningitidis; identical to SEQ ID NO: 2500

SEQ ID NO: 20777 - protein, 148 aa, Neisseria meningitidis; identical to SEQ ID NO: 4053

SEQ ID NO: 20778 - protein, 328 aa, Neisseria meningitidis; identical to SEQ ID NO: 8723

SEQ ID NO: 20779 - protein, 100 aa, Neisseria meningitidis
MKMIARVTGMKRSKGITEKGQSYDSTKLFIEIQFPESQDMCGYASQEFAYGTYENYEKLLASGVKMPFKAEIDFDFVTNGKAVKQIVTNVVPVFEKPKNS

SEQ ID NO: 20780 - protein, 163 aa, Neisseria meningitidis; identical to SEQ ID NO: 6300

SEQ ID NO: 20781 - protein, 757 aa, Neisseria meningitidis; identical to SEQ ID NO: 9089

SEQ ID NO: 20782 - protein, 223 aa, Neisseria meningitidis; identical to SEQ ID NO: 8619

SEQ ID NO: 20783 - protein, 76 aa, Neisseria meningitidis; identical to SEQ ID NO: 8288

SEQ ID NO: 20784 - protein, 310 aa, Neisseria meningitidis; identical to SEQ ID NO: 2407

SEQ ID NO: 20785 - protein, 455 aa, Neisseria meningitidis; identical to SEQ ID NO: 8196

SEQ ID NO: 20786 - protein, 140 aa, Neisseria meningitidis; identical to SEQ ID NO: 2595

SEQ ID NO: 20787 - protein, 693 aa, Neisseria meningitidis; identical to SEQ ID NO: 8731

SEQ ID NO: 20788 - protein, 107 aa, Neisseria meningitidis
MNPAPKKPSLLFSSAAQAASEDSGHGPYYVQADLAYAAERITHNYPEPTGADKDKISTVSDYFRNIRAHSIHPRVSVGYDFGDWRIAADYASYRKWKESNSSTRACP

SEQ ID NO: 20789 - protein, 231 aa, Neisseria meningitidis; identical to SEQ ID NO: 3708

SEQ ID NO: 20790 - protein, 67 aa, Neisseria meningitidis; identical to SEQ ID NO: 966

SEQ ID NO: 20791 - protein, 128 aa, Neisseria meningitidis; identical to SEQ ID NO: 3576

SEQ ID NO: 20792 - protein, 288 aa, Neisseria meningitidis; identical to SEQ ID NO: 8489

SEQ ID NO: 20793 - protein, 322 aa, Neisseria meningitidis; identical to SEQ ID NO: 9117

SEQ ID NO: 20794 - protein, 203 aa, Neisseria meningitidis
  misc_feature 198, 199: 'Xaa' is any amino acid
MSQNHTILQNLPVGQKVGIAFSGGLDTSAALLWMKLKGALPYAYTANLGQPDEDDYNAIPKKAMEYGAENARLIDCRAQLAHEGIAAIQCGAFHVSTGGIAYFNTTPLGRAVTGTMLVSAMKEDDVNIWGDGSTYKGNDIERFYRYSLLTNPALKIYKPWLDQQFIDELGGRHEMSEFLIANGFNYKMSLKKPTPPIXXHTLN

SEQ ID NO: 20795 - protein, 95 aa, Neisseria meningitidis; identical to SEQ ID NO: 589

SEQ ID NO: 20796 - protein, 227 aa, Neisseria meningitidis; identical to SEQ ID NO: 2905

SEQ ID NO: 20797 - protein, 106 aa, Neisseria meningitidis; identical to SEQ ID NO: 3331

SEQ ID NO: 20798 - protein, 118 aa, Neisseria meningitidis
MLSAYFPVFVFILVGLAAGVLFILLGTILGPKRHYAEKDAPYECGFEAFENARMKFDVRYYLVAILFILFDLEVAFMLPWAVVFKDLGAYGFWSMLVFIVVLTVGFIYEWKKGALEWE

SEQ ID NO: 20799 - protein, 160 aa, Neisseria meningitidis; identical to SEQ ID NO: 1762

SEQ ID NO: 20800 - protein, 451 aa, Neisseria meningitidis; identical to SEQ ID NO: 2767

SEQ ID NO: 20801 - protein, 388 aa, Neisseria meningitidis; identical to SEQ ID NO: 9109

SEQ ID NO: 20802 - protein, 101 aa, Neisseria meningitidis; identical to SEQ ID NO: 2399

SEQ ID NO: 20803 - protein, 1389 aa, Neisseria meningitidis; identical to SEQ ID NO: 9258

SEQ ID NO: 20804 - protein, 367 aa, Neisseria meningitidis
MSSFIFPDNGAEWRNESVQKPPKGWHYVRESGADGILKAAYQNIATVWQGDFHNAKQVLSAMKKRARKPAAVRSDADIAALFHAHRMKQAQQSRILNMLAVEIRPGFVLDNKRAPDIRAALLDVYGEADGKPFFLPLNLLLGFMGAHEWHKKGVAVPQLGGSIHVPFGVFSPLRGEYLDLLAHAPSTGFQTAFDIGTGSGVLAAILAKQGIPSVIGTDTNPKAVACARANIARLGFEKQVEIRETDLFPEGFADLIVCNPPWLPAKPTSAVESALYDPESAMLAAFLRDAPKHLNPDGEIRLIISDLAEHLGLRPADFLEKAFIRAGLRVADMMKTKPKHKKAANPSDPLAFARTRETTFLYRLKKA

SEQ ID NO: 20805 - protein, 300 aa, Neisseria meningitidis; identical to SEQ ID NO: 4775

SEQ ID NO: 20806 - protein, 125 aa, Neisseria meningitidis; identical to SEQ ID NO: 2690

SEQ ID NO: 20807 - protein, 169 aa, Neisseria meningitidis; identical to SEQ ID NO: 111

SEQ ID NO: 20808 - protein, 96 aa, Neisseria meningitidis; identical to SEQ ID NO: 4744

SEQ ID NO: 20809 - protein, 312 aa, Neisseria meningitidis; identical to SEQ ID NO: 2391

SEQ ID NO: 20810 - protein, 304 aa, Neisseria meningitidis; identical to SEQ ID NO: 8391

SEQ ID NO: 20811 - protein, 436 aa, Neisseria meningitidis; identical to SEQ ID NO: 9259

SEQ ID NO: 20812 - protein, 219 aa, Neisseria meningitidis; identical to SEQ ID NO: 11505

SEQ ID NO: 20813 - protein, 336 aa, Neisseria meningitidis; identical to SEQ ID NO: 2187

SEQ ID NO: 20814 - protein, 129 aa, Neisseria meningitidis; identical to SEQ ID NO: 2271

SEQ ID NO: 20815 - protein, 352 aa, Neisseria meningitidis; identical to SEQ ID NO: 1104

SEQ ID NO: 20816 - protein, 324 aa, Neisseria meningitidis; identical to SEQ ID NO: 9440

SEQ ID NO: 20817 - protein, 257 aa, Neisseria meningitidis; identical to SEQ ID NO: 4650

SEQ ID NO: 20818 - protein, 896 aa, Neisseria meningitidis; identical to SEQ ID NO: 8249

SEQ ID NO: 20819 - protein, 215 aa, Neisseria meningitidis; identical to SEQ ID NO: 1509

SEQ ID NO: 20820 - protein, 281 aa, Neisseria meningitidis
MPQVRQEKGEEMDKIRVAAVQMVSGVSPETNVAAMKRLVARAAEQGVDWVLLPEYWVLMGANDTDKLALAEPLGGGRFQTALSETAKECGVVLFGGTVPLQSPEAGKVMNTLLVYGRDGKRTGLYHKMHLFGFSGLGERYAEADTISAGREVPHLSAEGVSVAAGICYDVRFPEFFRRQLPFDVLMLPAAFTHTTGKAHWELLLRARAVENQCYVVAAAQGGLHENGRRTFGHSMIVDPWGDVLDVLPEGEGIVTADIDANRLNSVRNRLPALKYRVLDAV

SEQ ID NO: 20821 - protein, 88 aa, Neisseria meningitidis
MPSETFPFQTAFYSNLNRADWNQKHTFAIPAQALPLYAPNPNPPHSRRHCLSDSRTKPRIRLHGSGHISNTGIVLRKTVKSASASQYI

SEQ ID NO: 20822 - protein, 181 aa, Neisseria meningitidis; identical to SEQ ID NO: 8896

SEQ ID NO: 20823 - protein, 310 aa, Neisseria meningitidis; identical to SEQ ID NO: 8806

SEQ ID NO: 20824 - protein, 661 aa, Neisseria meningitidis; identical to SEQ ID NO: 1085

SEQ ID NO: 20825 - protein, 502 aa, Neisseria meningitidis; identical to SEQ ID NO: 9511

SEQ ID NO: 20826 - protein, 40 aa, Neisseria meningitidis; identical to SEQ ID NO: 1884

SEQ ID NO: 20827 - protein, 169 aa, Neisseria meningitidis; identical to SEQ ID NO: 4575

SEQ ID NO: 20828 - protein, 43 aa, Neisseria meningitidis; identical to SEQ ID NO: 2340

SEQ ID NO: 20829 - protein, 110 aa, Neisseria meningitidis; identical to SEQ ID NO: 7667

SEQ ID NO: 20830 - protein, 328 aa, Neisseria meningitidis
LPDAANRHRPAIRLFKNRKIRMENQRPLLGFALALLAAMTWGTLPIAVRQVLKFVDAPTLVWVRFTVAAAVLFVLLALGGRLPKWRDFSWCSFRLLLLGVAGISANFVLIAQGLHYISPTTTQVLWQISPFTMIVVGVLVFKDRMTAAQKIGLVLLLAGLLMFFNDKFGELSGLGAYAKGVLLCAAGSMAWVCYAVAQKLLSAQFGPQQILLLIYAASAAVFLPFAKPAHIGSLDGTLAWVCFAYCCLNTLIGYGSFGEALKHWEASKVSAVTTLLPVFTVIFSLLGHYVMPDTFAAPDMNGLGYVGALVVVGGAVTAAVGDRLFKRR

SEQ ID NO: 20831 - protein, 156 aa, Neisseria meningitidis; identical to SEQ ID NO: 2613

SEQ ID NO: 20832 - protein, 140 aa, Neisseria meningitidis; identical to SEQ ID NO: 5192

SEQ ID NO: 20833 - protein, 753 aa, Neisseria meningitidis; identical to SEQ ID NO: 9137

SEQ ID NO: 20834 - protein, 384 aa, Neisseria meningitidis; identical to SEQ ID NO: 3277

SEQ ID NO: 20835 - protein, 205 aa, Neisseria meningitidis; identical to SEQ ID NO: 9114

SEQ ID NO: 20836 - protein, 129 aa, Neisseria meningitidis
  misc_feature 3, 4: 'Xaa' is any amino acid
VCXXTGSYRFTRSGGLIENEVVFPVAFADGNVKCFVSERHSGRVTGDRRQHNWLFIRAKNHAAAIITNWYEGSCDWMAIGKAASGNAASSPIGPEIPETNEEPQRESGRTSTGPRNRRRRDGLLEALQD

SEQ ID NO: 20837 - protein, 678 aa, Neisseria meningitidis; identical to SEQ ID NO: 8329

SEQ ID NO: 20838 - protein, 140 aa, Neisseria meningitidis; identical to SEQ ID NO: 11230

SEQ ID NO: 20839 - protein, 182 aa, Neisseria meningitidis; identical to SEQ ID NO: 2877

SEQ ID NO: 20840 - protein, 247 aa, Neisseria meningitidis; identical to SEQ ID NO: 4076

SEQ ID NO: 20841 - protein, 230 aa, Neisseria meningitidis; identical to SEQ ID NO: 3169

SEQ ID NO: 20842 - protein, 234 aa, Neisseria meningitidis; identical to SEQ ID NO: 5705

SEQ ID NO: 20843 - protein, 122 aa, Neisseria meningitidis
VLSGMTNPSIRKPAPRHSHESGNLESRGFQSFPIDSRRVRGLDSRLRGNDEFRDCGIVGNGGFQDCGIVGNDGFQDYGVVGNDGSGISTPAPRLSTAGASKMPSEGSDGIGIGESEAVAHAQ

SEQ ID NO: 20844 - protein, 123 aa, Neisseria meningitidis; identical to SEQ ID NO: 2701

SEQ ID NO: 20845 - protein, 473 aa, Neisseria meningitidis; identical to SEQ ID NO: 8267

SEQ ID NO: 20846 - protein, 333 aa, Neisseria meningitidis; identical to SEQ ID NO: 7958

SEQ ID NO: 20847 - protein, 1007 aa, Neisseria meningitidis
MNSQKLPEVKWGNSYKKGELRPEDRDRKFTFTSTYGIKRNTNITFNNTDYLVSEKNGTAVFGAATYLPPYGKVSGFDTDRLTKRGNAVDWINTTHPGLIGYSYQGITCSSSSCPEFGYKTQFTFGNSGLAKKTNSSKLDIYEDKSRDNSPIYKLQDYPWLGVSFNLSSDSYVKQKRHNSLVSSFSEDVTQSNGTQSPYKDRNLVYRTDDYHNKGNYSHQDAHHAIAFYLNAKLHLLDKKQIKNIAQGSELNLGMLKTHIELPKNFNQRSLVGSVVSWTVKDEGKVSVKLKLPEVKAGRCINKDNPNPKSKAPSPALTAPALWFGPVQNGKAQMYSASVSTYPDSSSSRIFLQNLERKTDPGRPGRHSLETLTENDIKSRQPNFTGRQTIIRLDSGVQQIKLDQNNTEVVNFNGNSNNATFGIVSEYGLTPDANEWKKVLLPWTVRAFNDDGRFNTVNKEENNGKPKYSQKYRSRDNGKHERNLGDIVNSPIVAVGEYLATSANDGMVHIFKQSGGDKRSYNLKLSYIPGTMPRKDIQNTESTLAKELRAFAEKSYVGDRYGVDGGFVLRKVERNGKDHVFMFGAMGFGGRGAYALDLSKIDSGNGNLADVSLFDVKHDKNGNNGVKLGYTVGTPQIGKTHDGKYAAFLASGYATKDITSGDNKTALYVYDLESSGTLIKKIDVPGGKGGLSSPTLVDKDLDGTVDIAYAGDRGGNMYRFDLSSQSPDQWTVRPIFEGTKPITSAPAISQLKDKRVVIFGTGSDLSEDDVDNTDEQHIYGIFDDDTATTGSVNFSGTGGGLLEQHLTQENKTLFLTDYKRSDGSGSKGWMVKLQPGQRVTVKPTVVLRTAFVTIRKYKDNGCGAETAILGINTADGGKLTKKSARPIVPEANTAVAQYSGHKQTAKGKSIPIGCMWKNNETVCPNGYVYDKPVNVRYLDEKKTDGFSTTADGDAGGSGIDPAGKRSGKNNRCFSQKGVRTLLMNDLDSLDITGPTCGMKRISWREVFY

SEQ ID NO: 20848 - protein, 129 aa, Neisseria meningitidis
MKNVQKGFTLLELMIAVAILGILTLITYPSYKTYIRRIRLSEVKSTLLMNAQTMERYYRQKGTFENYDKNKLKQNKYFNVTLSKVSPDHFTLLADPNPTTNDGETCVVTLNDGGTIAASGTNQSCPGFD

SEQ ID NO: 20849 - protein, 242 aa, Neisseria meningitidis; identical to SEQ ID NO: 9647

SEQ ID NO: 20850 - protein, 207 aa, Neisseria meningitidis; identical to SEQ ID NO: 8658

SEQ ID NO: 20851 - protein, 181 aa, Neisseria meningitidis; identical to SEQ ID NO: 3612

SEQ ID NO: 20852 - protein, 311 aa, Neisseria meningitidis; identical to SEQ ID NO: 9507

SEQ ID NO: 20853 - protein, 608 aa, Neisseria meningitidis; identical to SEQ ID NO: 8337

SEQ ID NO: 20854 - protein, 189 aa, Neisseria meningitidis; identical to SEQ ID NO: 9578

SEQ ID NO: 20855 - protein, 215 aa, Neisseria meningitidis; identical to SEQ ID NO: 4487

SEQ ID NO: 20856 - protein, 201 aa, Neisseria meningitidis; identical to SEQ ID NO: 3643

SEQ ID NO: 20857 - protein, 200 aa, Neisseria meningitidis; identical to SEQ ID NO: 321

SEQ ID NO: 20858 - protein, 348 aa, Neisseria meningitidis; identical to SEQ ID NO: 7414

SEQ ID NO: 20859 - protein, 259 aa, Neisseria meningitidis; identical to SEQ ID NO: 2978

SEQ ID NO: 20860 - protein, 202 aa, Neisseria meningitidis
MLEPYRLICQNRSICGKIPRLNLTEGDTVLDREGYRPNVGIILTNNRDEVFWGKRVREHSWQFPQGGIKPGESPETAMYRELYEEVGLLSQHVKIVGRTRDWLRYDVPNNWVRREWRGSYRGQKQIWYLLRLTGRDCDVNLRATRHPEFDGWRWHQYWAPVDEVIDFKRDVYLGALKELSSRFLRGMESYEDFAARQLSGNR

SEQ ID NO: 20861 - protein, 251 aa, Neisseria meningitidis; identical to SEQ ID NO: 9216

SEQ ID NO: 20862 - protein, 431 aa, Neisseria meningitidis; identical to SEQ ID NO: 3103

SEQ ID NO: 20863 - protein, 366 aa, Neisseria meningitidis; identical to SEQ ID NO: 9546

SEQ ID NO: 20864 - protein, 342 aa, Neisseria meningitidis
MPQGHFMSKKRVLTGVTTTGIPHLGNYVGAIRPAVRAAQNPDTESFLFLADYHGIIKCHEPEMIHQSTQAVAATWLACGLDPERTTFYRQSDIPEVMELNWILTCITAKGLMNRAHAYKAAVQANSENNQEDPDFGVEMGLFSYPILMTADILMFNANEVPVGRDQIQHVEMARDIAGRFNHRFRELFTLPEVKIDENVELLVGLDGRKMSKSYGNTIPLWENDKKTQKSVNKIITNMKEPGEPKQPDESPLFEIYKAFSTPSETVEFTKMLADGLAWGEAKKLLAAKINAELAEPRERYNELTADPSQIEEILQAGAQKARKEARELLDKVRDAVGIRPLK

SEQ ID NO: 20865 - protein, 841 aa, Neisseria meningitidis
MNPNSKHNTNFTNLLKPSDSDIKQFAAQHIRHLTDLLNRYAYEYYTLDAPSVPDAEYDKLFRELEALELNHPELKLPDSPTQRVGGEPLAGFAEVRHEVPMLSLTNAFSPQDENGVFDHAEMYAFDQRVRDGLDGGKPEYVIEPKFDGLAISLLYRDGVLVQAATRGDGTTGEDVTQNIKTVSNIPLRLHGENTPELIEVRGEVLMLKADFVALNKRQAENGQKPFANPRNAAAGSLRQLDSRITAQRKLHFFPYSVARQQDGFVAEEHIQELAYFQALGFSLPNGNFGCFKNIDEVLAFYEHMQQKRPELPYEIDGMVVKVNSLAQQHELGFISRAPRWAVAHKFPAEEALTIVEAIDVQIGRTGAVTPVARLQPVFVGGVTVTNATLHNQDEVSRKDVRVGDTVVVRRAGDVIPEVVRVIFERRPMRETAVAVSDGIGHRQDDLFAETPSANQTQSVPLHKPYRLPTHCPICRSEIEREEGEAVARCSGGMLCQAQRAQGLIHFASRKAMDLDGLGEKQIEQLVAQDLVRHFADLYRLDIPTLQKMKETADKTVAESDQMPSEGSSVGASGKHKKQPVKWAENILAGIEASKTPELARFLFALGIRHVGERTAKTLAQAFGTLERVRRAPEPVLACLPDIGTVVARSIAHFFAQAEQQAMIDELLAAGVAPQTQAVTIPPARHAEPQRWIARLPGFKISENKAQALWELAGKNIEGLQTDKALPTDWQAWRSEPQNAALLENLKTFFAQMPSEDEAAQGSDGINKAVAGKTFVLTGTLPTLKRDQAQSLIEAAGGKVSGSVSKKTDYVVAGEAAGSKLEKANALGVSVLSEAELLTLLG

SEQ ID NO: 20866 - protein, 96 aa, Neisseria meningitidis
  misc_feature 92, 93, 94: 'Xaa' is any amino acid
MLKQTTLLAACASFAALLGGCATQQPAPVIAGNSGMQDAPSSAVYNNPYGATPYSPAPAGDAPYVPPVQSAPVYTPPAYVPPSAPAVSGTYXXXHT

SEQ ID NO: 20867 - protein, 217 aa, Neisseria meningitidis; identical to SEQ ID NO: 19279

SEQ ID NO: 20868 - protein, 591 aa, Neisseria meningitidis; identical to SEQ ID NO: 3154

SEQ ID NO: 20869 - protein, 163 aa, Neisseria meningitidis; identical to SEQ ID NO: 2563

SEQ ID NO: 20870 - protein, 226 aa, Neisseria meningitidis; identical to SEQ ID NO: 9347

SEQ ID NO: 20871 - protein, 302 aa, Neisseria meningitidis; identical to SEQ ID NO: 9020

SEQ ID NO: 20872 - protein, 263 aa, Neisseria meningitidis; identical to SEQ ID NO: 8525

SEQ ID NO: 20873 - protein, 351 aa, Neisseria meningitidis; identical to SEQ ID NO: 8449

SEQ ID NO: 20874 - protein, 456 aa, Neisseria meningitidis; identical to SEQ ID NO: 9164

SEQ ID NO: 20875 - protein, 540 aa, Neisseria meningitidis
METIPAAQNKAVSPSFSDGISGQTVNNSDKMLYSRPLPRRPKPPFGKAEMISKQEYQAQAAQGYNRIPLVQELLADLDTPLSLYLKLANRPYTYLLESVVGGERFGRYSFIGLPCSHYLKASGKHVDVYQNGEIVEQHDGNPLPFIEAFHNRFKTPEIPSLPRFTGGLVGYFGYETIYNFEHFAHRLKNTTKADPLGTPDILLMLSQELAVVDNLSGKIYLIVYADPSQPDGYERARERLEDIRTQLRQSCAIPLSLGSKHTEAVSEFGEEPFKACVNKIKDYIFAGDCMQVVPSQRMSMEFTDSSLALYRALRTLNPSPYLFYYDFGDFHIVGSSPEILVRRERDDVIVRPIAGTRLRGKTPAEDLANEQDLLSDAKEIAEHVMLIDLGRNDVGRISKTGEVKVTDKMVIEKYSHVMHIVSNVEGRLKDGMTNMDILAATFPAGTLSGAPKVRAMEIIEEVEPSKRGIYGGAVGVWGFNNDMDLAIAIRTAVVKNNTLYVQSGAGVVADSDPASEWQETQNKARAVIHAAQMVQEGLDK

SEQ ID NO: 20876 - protein, 331 aa, Neisseria meningitidis; identical to SEQ ID NO: 1014

SEQ ID NO: 20877 - protein, 152 aa, Neisseria meningitidis; identical to SEQ ID NO: 9368

SEQ ID NO: 20878 - protein, 212 aa, Neisseria meningitidis; identical to SEQ ID NO: 3448

SEQ ID NO: 20879 - protein, 328 aa, Neisseria meningitidis
MKHFLSLFASILMSALIAAWFAQNPINAYWQQTYHRNSPLEPLAAYGWWRSGAALQENAYTLSDGIKAFLSGETPPTAQDGGSADMPPEAAASEAAPQTGEIQEWKQDTDTAAVRSGDKVFFAGDSLMQGVAPFVQKSLKQQYGIESVNLSKQSTGLSYPSFFDWPKTIEETLKKHPEISVLAVFLGPNDPWDFPVGKRYLKFASDEWAQEYLKRVDRILEAAHTHRVQVVWLGIPYMKKAKLDGQMRYLDKLLSEHLKGKIILIPTAHTLSGGKDRYTDSVNVNGKPVRYRSKDGIHFTAEGQKLLATKIMEKIVFEPSTQPSSTQP

SEQ ID NO: 20880 - protein, 274 aa, Neisseria meningitidis; identical to SEQ ID NO: 8054

SEQ ID NO: 20881 - protein, 206 aa, Neisseria meningitidis; identical to SEQ ID NO: 9595

SEQ ID NO: 20882 - protein, 324 aa, Neisseria meningitidis; identical to SEQ ID NO: 3192

SEQ ID NO: 20883 - protein, 250 aa, Neisseria meningitidis
LKVDANPDKYIKATGYPGYSEKVEVAPGTKVNMGPVTDRNGNPVQVVATFGRDSQGNTTVDVQVIPRPDLTPGSAEAPNAQPLPEVSPAENPANNPAPNENPGTRPNPEPDPDLNPDANPDTDGQPGTSPDSPAVPDRPNGRDGKDGGLLCKFFPDILACDRLPEPNPAEDLNLPSETVNVEFKKSGIFQDSAQCPAPVTFTITVLDSSKQFAFSFENACTIAERLRYMLLALAWAVAAFFCIRTVSREV

SEQ ID NO: 20884 - protein, 322 aa, Neisseria meningitidis; identical to SEQ ID NO: 7028

SEQ ID NO: 20885 - protein, 157 aa, Neisseria meningitidis; identical to SEQ ID NO: 7285

SEQ ID NO: 20886 - protein, 919 aa, Neisseria meningitidis; identical to SEQ ID NO: 8702

SEQ ID NO: 20887 - protein, 88 aa, Neisseria meningitidis; identical to SEQ ID NO: 1100

SEQ ID NO: 20888 - protein, 117 aa, Neisseria meningitidis; identical to SEQ ID NO: 9754

SEQ ID NO: 20889 - protein, 339 aa, Neisseria meningitidis; identical to SEQ ID NO: 8559

SEQ ID NO: 20890 - protein, 69 aa, Neisseria meningitidis; identical to SEQ ID NO: 3638

SEQ ID NO: 20891 - protein, 332 aa, Neisseria meningitidis; identical to SEQ ID NO: 8245

SEQ ID NO: 20892 - protein, 45 aa, Neisseria meningitidis; identical to SEQ ID NO: 645

SEQ ID NO: 20893 - protein, 42 aa, Neisseria meningitidis; identical to SEQ ID NO: 9053

SEQ ID NO: 20894 - protein, 486 aa, Neisseria meningitidis
MGSAVGGQPLEKIFLPDDKGLFILPNLPVLHPDWVYRLFSFIMPPLIFATFPMKPFAENIPHSLRGNCRDEALPPHTVDCPECGCRADVPRLDRGEAAFCPRCGYKLFRVGRHPFSAPPAYAAASLILMAFAYGMTYIEVGIPGAASVLSLPEMMRLMVFQDYGFLAEVMFVLTFGAPVLFLLLCLYVYAALIRKRVYPALRLATRVMVRLRQAMMVDVFFVSTLVAYIKLSSVAEVRFGSAFYLMFALSVMLIRTSVSVPQHWGYFQIGRLTGDNAVQTASEGKTCCSRCLYFRDSAESPCGVCGAELYRRRPKSLSISSAFLTAAVILYFPANILPIMISSNPAATEVNTILNGIAYMWDEGDRLIAAVIFSASILVPVLKIAAMSVLIASARFALPTGAKKLSHLYRITEAVGRWSMIDIFVIIILMCSFHTYAARVIPGSAAVYFCLVVILTMLSAYYFDPRLLWDKRASDGIAFNETEKHD

SEQ ID NO: 20895 - protein, 235 aa, Neisseria meningitidis
LVKTADGYKAIARIRVGDRVFAKDETSGVTGYKPVTARYGNPYQETVYIEISDGIGNNQTLISNKIHPFYSQGKWIQAGRLKKGDTLLSESGAKQTVQNITFKQQPLKAYNLTVADWHTYFVKGSQAETEGVWVHNDCPYDKGNQRYKDASYHGKNDNSVKSRAPTNGQAALDNSVQVKSTSPRRVGVDKANNEIVVLDKTQTFNNGFAEYHGHVRSWQDLHTDQKNALKKAGLD

SEQ ID NO: 20896 - protein, 181 aa, Neisseria meningitidis; identical to SEQ ID NO: 13160

SEQ ID NO: 20897 - protein, 356 aa, Neisseria meningitidis; identical to SEQ ID NO: 8612

SEQ ID NO: 20898 - protein, 105 aa, Neisseria meningitidis; identical to SEQ ID NO: 895

SEQ ID NO: 20899 - protein, 321 aa, Neisseria meningitidis; identical to SEQ ID NO: 2168

SEQ ID NO: 20900 - protein, 508 aa, Neisseria meningitidis
VKPLRRLTNLLAACAVAAAAFGQPALAADLAQDPFITDNAQRQHYEPGGKYHLFGDPRGSVSDRTGKINVIQDYTHQMGNLLIQQAAIQGNLGYTVRFSGHGYEEHAPFDNHAADSASKEQGNVNEGFTVYRLNWEGHEHHPADAYDGPKGGNYPKPTGARDEYTYHVNGTARSIKLNPTDTRSIKLNPTDTRSIRQRISDNYSNLGSNFSDRADEANRKMFEHNAKLDRWGNSMEFVNGIAAGALNPFISAGEALGIGDILYGTRYAIDKATMRNIAPLPAEGKFAAIGGLGSVAGFEKNTREAVDRWIQENPNAAETVEALVNVLPFAKVKNLTKAAKPGKAAVSGDFSAAYNTRTTRKVTTETEGLNRIRQNQKNSNIHEKNYGRDNPNHINVLSGNSIQHILYGDEAGGGHLFPGKPGKTTFPQHWSASKITHEISDIVTSPKTQWYAQTGTGGKYIAKGRPARWVSYETRDGIRIRTVYEPATGKVVTAFPDRTSNPKYNPVK

SEQ ID NO: 20901 - protein, 321 aa, Neisseria meningitidis; identical to SEQ ID NO: 9169

SEQ ID NO: 20902 - protein, 322 aa, Neisseria meningitidis; identical to SEQ ID NO: 7941

SEQ ID NO: 20903 - protein, 240 aa, Neisseria meningitidis; identical to SEQ ID NO: 551

SEQ ID NO: 20904 - protein, 48 aa, Neisseria meningitidis; identical to SEQ ID NO: 6016

SEQ ID NO: 20905 - protein, 326 aa, Neisseria meningitidis
LPFSTLFRLKPMTDITPFANRLGKNIKHLMKWAKRNGIEAWRIYDRDIPQFPFAADVYGDRIHLQEYDTGWLMRPEEYEAWLAEVLEAVAFVTGFEPEQIRLKRRERQKGLQQYEKTGKAGDDFVITENGRKFWVNLDKYLDTGLFLDHRNTRKKVGETAAGKRFLNLFSYTGSFTVYAATGGAASSETVDLSNTYLDWARRNFELNGIDTERHKIVRADVFQYLQTAYGEGRRFDLIVMDPPSFSNSKKMSDILDIQRDHKKLIDGAVKLLASDGILYFSNNLRSFVLDDLVSEQYAVKDISKQSVPEDFRNKKIHRCWEIRHKS

SEQ ID NO: 20906 - protein, 203 aa, Neisseria meningitidis; identical to SEQ ID NO: 352

SEQ ID NO: 20907 - protein, 207 aa, Neisseria meningitidis; identical to SEQ ID NO: 243

SEQ ID NO: 20908 - protein, 279 aa, Neisseria meningitidis; identical to SEQ ID NO: 9071

SEQ ID NO: 20909 - protein, 240 aa, Neisseria meningitidis; identical to SEQ ID NO: 9589

SEQ ID NO: 20910 - protein, 70 aa, Neisseria meningitidis; identical to SEQ ID NO: 2310

SEQ ID NO: 20911 - protein, 98 aa, Neisseria meningitidis; identical to SEQ ID NO: 1735

SEQ ID NO: 20912 - protein, 352 aa, Neisseria meningitidis; identical to SEQ ID NO: 1807

SEQ ID NO: 20913 - protein, 107 aa, Neisseria meningitidis; identical to SEQ ID NO: 2467

SEQ ID NO: 20914 - protein, 1295 aa, Neisseria meningitidis
MQSWGIPLAIAGDIIAATAIATGDTGTISTEEFYNFDNWKGFGYELFEDWSRWVYDWLPDGWNLWKELDRNRSGQYHIYDPLALDLDGDGIETVAAKGFSGSLFDHNGNGIRTATGWVSADDGLLVRDLNGNGIIDNGAELFGDNTKLADGSFAKHGYAALAELDSNGDNIINAADAAFQSLRVWQDLNQDGISQANELRTLEELGIQSLDLAYKDVNKNLGNGNTLAQQGSYTKTNGTTAKMGDLLLAADNLHSRFKDKVELTAEQAKAANLAGIGRLRDLREAAALSGDLANMLKAYSAAETKEAQLALLDNLIHKWAETDSNWGKKSPMRLSTDWTQTANGGVALTPSQVTRLKQNALVSLSDKAKAAIDAARDRIAVLDAYTGQDSSTLYYMSEEDALNIVKVTNDTYDHLAKNIYQNLLFQTRLQPYLNQISFKMENDTFTLDFSGLVQAFNHVKETNPQKAFVDLAEMLAYGELRSWYEGRRLMADYVEEAKKAGKFEDYQKVLGQETVALLAKTSGTQADDILQNVGFGHNKNVSLYGNDGNDTLIGGAGNDYLEGGSGSDTYVFGKGFGQDTVYNYDYATGRKDIIRFTDGITADMLTFTREGNHLLIKAKDGSGQVTVQSYFQNDGSGAYRIDEIHFDNGKVLDVATVKELVQQSTDGSDRLYAYQSGSTLNGGLGDDYLYGADGDDLLNGDAGNDSIYSGNGNDTLNGGEGNDALYGYNGNDVLNGGEGNDHLNGEDGNDTLIGGAGNDYLEGGSGSDTYVFGKGFGQDTVYNYDYATGRKDIIRFTDGITADMLTFTREGNHLLIKAKDGSGQVTVQSYFQNDGSGAYRIDEIHFDNGKVLDVATVKKLVQQSTDGSDRLYAYQSGSTLNGGLGDDYLYGADGDDLLNGDAGNDSIYSGNGNDTLDGGEGNDALYGYNGNDVLNGGEGNDHLNGEDGNDTLIGGAGNDYLEGSSGSDTYVFGEGFGQDTVYNYDYATGRKDIIRFTDGITADMLTFTREGNHLLIKAKDGSGQVTVQSYFQNDGSGAYRIDEIHFDNGKVLDVATVKKLVQQSTDGSDRLYAYQSGSTLNGGLGDDYLYGADGDDLLNGDAGNDSIYSGNGNDTLDGGEGNDALYGYNGNDVLNGGEGNDHLNGEDGNDTLIGGAGNDYLEGGSGSDTYVFGKGFGQDTVYNYHVDKNSDTMHFKGFKAADVHFIRSGSDLVLSASEQDNVRISGFFYGENHRVDTFVFDDAAISNPDFAKYINAGNNLVQSMSVFGSNTAATGGNVDANIQSVQQPLLVTPSA

SEQ ID NO: 20915 - protein, 245 aa, Neisseria meningitidis; identical to SEQ ID NO: 3451

SEQ ID NO: 20916 - protein, 61 aa, Neisseria meningitidis; identical to SEQ ID NO: 1836

SEQ ID NO: 20917 - protein, 417 aa, Neisseria meningitidis; identical to SEQ ID NO: 3141

SEQ ID NO: 20918 - protein, 362 aa, Neisseria meningitidis; identical to SEQ ID NO: 9075

SEQ ID NO: 20919 - protein, 227 aa, Neisseria meningitidis; identical to SEQ ID NO: 2059

SEQ ID NO: 20920 - protein, 91 aa, Neisseria meningitidis; identical to SEQ ID NO: 5452

SEQ ID NO: 20921 - protein, 146 aa, Neisseria meningitidis; identical to SEQ ID NO: 2658

SEQ ID NO: 20922 - protein, 109 aa, Neisseria meningitidis; identical to SEQ ID NO: 9320

SEQ ID NO: 20923 - protein, 344 aa, Neisseria meningitidis; identical to SEQ ID NO: 2104

SEQ ID NO: 20924 - protein, 295 aa, Neisseria meningitidis; identical to SEQ ID NO: 3063

SEQ ID NO: 20925 - protein, 94 aa, Neisseria meningitidis; identical to SEQ ID NO: 944

SEQ ID NO: 20926 - protein, 445 aa, Neisseria meningitidis; identical to SEQ ID NO: 10806

SEQ ID NO: 20927 - protein, 218 aa, Neisseria meningitidis; identical to SEQ ID NO: 5422

SEQ ID NO: 20928 - protein, 581 aa, Neisseria meningitidis; identical to SEQ ID NO: 2972

SEQ ID NO: 20929 - protein, 383 aa, Neisseria meningitidis; identical to SEQ ID NO: 3357

SEQ ID NO: 20930 - protein, 106 aa, Neisseria meningitidis; identical to SEQ ID NO: 5695

SEQ ID NO: 20931 - protein, 369 aa, Neisseria meningitidis; identical to SEQ ID NO: 8387

SEQ ID NO: 20932 - protein, 389 aa, Neisseria meningitidis
MTAHKILPVLLSIILGVSHATAASPAPNKPAVHAAPTFQTPETLTAAHIVIDLQSKQILSAKNINTPVEPAALTQLMTAYLVFKNMKSGNIRSEENLKIPESAWASEGSRMFVRPSDTVSTDKLLKGMIALSANDAALTLAGRLGNGSIENFVQQMNKEARRLGMKNTVFKNPTGLSREGQVSTAKDLAQLSEALMRDFPEYYPLFSIKSFKFKNIEQNNRNILLYRDNNVNGLKAGHTESGGYNLAVSYSGNGRHILVITLGSESAETRASDNSKLLNWALQAFDTPKIYPKGKTVAQIQISGGSKKTVRAGFLKEAYITLPHKEAKMAEQILETIQPIPAPVKKGQILGKIKIRQNGYTIAEKEIVALENVKKRSRWQRLWARLTGQ

SEQ ID NO: 20933 - protein, 463 aa, Neisseria meningitidis; identical to SEQ ID NO: 9172

SEQ ID NO: 20934 - protein, 324 aa, Neisseria meningitidis; identical to SEQ ID NO: 8003

SEQ ID NO: 20935 - protein, 338 aa, Neisseria meningitidis; identical to SEQ ID NO: 8361

SEQ ID NO: 20936 - protein, 143 aa, Neisseria meningitidis; identical to SEQ ID NO: 9142

SEQ ID NO: 20937 - protein, 148 aa, Neisseria meningitidis; identical to SEQ ID NO: 11176

SEQ ID NO: 20938 - protein, 327 aa, Neisseria meningitidis
MWRIGGAGGRQTVRPAAALPYIITAKSASCFQTATAVKKKRRVYNTRIVCLGRIGKRMENIGRQRPIGVFDSGIGGLTNVRALMERLPMENIIYFGDTARVPYGTKSKATIENFSMQIVDFLLEHDVKAMVIACNTIAAVAGQKIRQKTGNMPVLDVISAGAKAALATTRNNKIGIIATNTTVNSNAYARAIHRNNPDTLVRTQAAPLLVPLVEEGWLEHEVTRLTVCEYLKPLLADGIDTLVLGCTHFPLLKPLIGREAHNVALVDSAITTAEETARVLAQEGLLNTDNNNPDYRFYVSDIPLKFRTIGERFLGRTMEQIEMVSLG

SEQ ID NO: 20939 - protein, 481 aa, Neisseria meningitidis
MSTQTNFDLVLFGATGDLAMRKLLPCLYQAHVAGLLHPEGRILGVSRSELDTEGFLAKVETSSKIHVKENFSDEAWASFVERLAYLKVDVTQPDDFAALGDLVKARKETDNVVIYLSTAPKFFAQTCENLAKIGLNADNVRVVLEKPLGTDLASSQQINTDVARYFKEGQIYRIDHYLGKESLQNLLALRFANVMFEPLWNNKYIESVQLTIAEQLGVEERGEFYDITGALRDMVQNHLMQMLCMTAMEAPASLDADAVRDEKVKVIKSLKPLTVESVNENVVRGQYTAAKGMNGYLEEINVPQDSFTETYVAIKAEIENERWKGVPFYLRTGKRMAGKVAEIVLNFKDLNSHIFEGSRTAPNRLVIELQPYESVRLYTQMKTPGAGNKVETVPLATDLGKALEGRRAEAYERLLLDVINGKLALFNRRDELEAAWEYVMPILENWANNTTPPHGYGAHSWGPEAARELLARDGHKWHEEQ

SEQ ID NO: 20940 - protein, 239 aa, Neisseria meningitidis; identical to SEQ ID NO: 1086

SEQ ID NO: 20941 - protein, 514 aa, Neisseria meningitidis; identical to SEQ ID NO: 3437

SEQ ID NO: 20942 - protein, 145 aa, Neisseria meningitidis; identical to SEQ ID NO: 1767

SEQ ID NO: 20943 - protein, 622 aa, Neisseria meningitidis; identical to SEQ ID NO: 9739

SEQ ID NO: 20944 - protein, 57 aa, Neisseria meningitidis; identical to SEQ ID NO: 12019

SEQ ID NO: 20945 - protein, 672 aa, Neisseria meningitidis; identical to SEQ ID NO: 10362

SEQ ID NO: 20946 - protein, 287 aa, Neisseria meningitidis; identical to SEQ ID NO: 8694

SEQ ID NO: 20947 - protein, 144 aa, Neisseria meningitidis; identical to SEQ ID NO: 14763

SEQ ID NO: 20948 - protein, 159 aa, Neisseria meningitidis; identical to SEQ ID NO: 2265

SEQ ID NO: 20949 - protein, 267 aa, Neisseria meningitidis; identical to SEQ ID NO: 2269

SEQ ID NO: 20950 - protein, 379 aa, Neisseria meningitidis; identical to SEQ ID NO: 8994

SEQ ID NO: 20951 - protein, 239 aa, Neisseria meningitidis; identical to SEQ ID NO: 7937

SEQ ID NO: 20952 - protein, 86 aa, Neisseria meningitidis; identical to SEQ ID NO: 13718

SEQ ID NO: 20953 - protein, 67 aa, Neisseria meningitidis; identical to SEQ ID NO: 3513

SEQ ID NO: 20954 - protein, 684 aa, Neisseria meningitidis; identical to SEQ ID NO: 9417

SEQ ID NO: 20955 - protein, 162 aa, Neisseria meningitidis; identical to SEQ ID NO: 911

SEQ ID NO: 20956 - protein, 200 aa, Neisseria meningitidis; identical to SEQ ID NO: 2775

SEQ ID NO: 20957 - protein, 96 aa, Neisseria meningitidis; identical to SEQ ID NO: 2317

SEQ ID NO: 20958 - protein, 169 aa, Neisseria meningitidis; identical to SEQ ID NO: 2049

SEQ ID NO: 20959 - protein, 231 aa, Neisseria meningitidis; identical to SEQ ID NO: 1028

SEQ ID NO: 20960 - protein, 336 aa, Neisseria meningitidis; identical to SEQ ID NO: 3061

SEQ ID NO: 20961 - protein, 453 aa, Neisseria meningitidis; identical to SEQ ID NO: 8793

SEQ ID NO: 20962 - protein, 100 aa, Neisseria meningitidis; identical to SEQ ID NO: 1023

SEQ ID NO: 20963 - protein, 279 aa, Neisseria meningitidis; identical to SEQ ID NO: 2627

SEQ ID NO: 20964 - protein, 188 aa, Neisseria meningitidis
LNIKYSGIENRFETAILKKNGVRSGFVSFAPNLAAVKLNDYAKVRKRITKTKQKADIVIVMFHGGGKGNRRNTCRSIPKSSMGKTGATSSSLHGLPSIPARMSYSGRGRTLHAPSNFTATASSLTAAATLPPTAQSTPPASAALRRFSKLSPTNRVNLFPELSSLLPKPTIKSPKSTLKNRYRADYLS

SEQ ID NO: 20965 - protein, 945 aa, Neisseria meningitidis; identical to SEQ ID NO: 8150

SEQ ID NO: 20966 - protein, 416 aa, Neisseria meningitidis; identical to SEQ ID NO: 2246

SEQ ID NO: 20967 - protein, 293 aa, Neisseria meningitidis; identical to SEQ ID NO: 9178

SEQ ID NO: 20968 - protein, 485 aa, Neisseria meningitidis; identical to SEQ ID NO: 4003

SEQ ID NO: 20969 - protein, 139 aa, Neisseria meningitidis; identical to SEQ ID NO: 2531

SEQ ID NO: 20970 - protein, 512 aa, Neisseria meningitidis; identical to SEQ ID NO: 3339

SEQ ID NO: 20971 - protein, 658 aa, Neisseria meningitidis; identical to SEQ ID NO: 8968

SEQ ID NO: 20972 - protein, 161 aa, Neisseria meningitidis
MDALHTIARNLTKKRQTVSCAESCTGGLLAAAFTSVAGSSQWFDQSFVTYSNKAKEDRLGVLPETLLEHGAVSRQTVYEMARGAKAVAQADYAVGISGIAGPGGGSESKPVGTVWFGFAFPGGSCEAMRRFDGNRESVRAQAVAFALERLAGLIENGGDAV

SEQ ID NO: 20973 - protein, 200 aa, Neisseria meningitidis; identical to SEQ ID NO: 9503

SEQ ID NO: 20974 - protein, 405 aa, Neisseria meningitidis; identical to SEQ ID NO: 8083

SEQ ID NO: 20975 - protein, 589 aa, Neisseria meningitidis; identical to SEQ ID NO: 9214

SEQ ID NO: 20976 - protein, 244 aa, Neisseria meningitidis
MCAFTSKEKAKIHLESGAKKVLISAPGGDDVDATVVYGVNDSVLTADMTVVSNASCTTNCLSPVAKVLSESVGIVKGAMTTIHALTNDQTVTDVRHKDLRRARSGVENMIPTKTGAAKAVGLVLPELKGRLDGLAIRVPTVNVSLVDLSFQAARDTTVEEINALMKAASEAGALKGVLGYNTLPLVSMDFNHTTEASHFDATLTKVVDGNMIKVFAWYDNEWGFSCQMLNTARRMFGLEVRPLK

SEQ ID NO: 20977 - protein, 66 aa, Neisseria meningitidis; identical to SEQ ID NO: 1185

SEQ ID NO: 20978 - protein, 105 aa, Neisseria meningitidis; identical to SEQ ID NO: 9293

SEQ ID NO: 20979 - protein, 499 aa, Neisseria meningitidis; identical to SEQ ID NO: 8413

SEQ ID NO: 20980 - protein, 160 aa, Neisseria meningitidis; identical to SEQ ID NO: 236

SEQ ID NO: 20981 - protein, 149 aa, Neisseria meningitidis; identical to SEQ ID NO: 3543

SEQ ID NO: 20982 - protein, 748 aa, Neisseria meningitidis
LRNFDHTGAQTASRSLNCRLNIKAGITLMQQKIRFQIEGMTCQACASRIEKVLNKKDFVESAGVNFASEEAQVTFDDSKTSAADIAKIIEKTGYGAKEKTEDTLPQAEAEHHIGWRLWLLSAINIPFLVGMAGMMIGRHDWMIPPLWQFALASIVQLWLAIPFYKSAWASIKGGLANMDVLVTIGTVSIYLYSVYMLFFSPHAAHGMAHVYFEAGVMVIGFVSLGKFLEHRTKKSSLNSLGLLLKLTPTQVNVQRDGEWKQLPIDQVQIGDLIRANHGERIAADGVIESGSGWADESHLTGESNPEEKKAGGKVLAGALMTEGSVVYRAAQLGSQTLLGDMMNALSEAQGSKAPIARVADKAAAVFVPAVVGIALLTFIVTWLIKGDWTVALMHAVAVLVIACPCALGLATPAAIMVGMGKAVKHGIWFKDAAAMEEAAHVDAVVLDKTGTLTEGRPQVAAVYCVPDSGFDEDDLYRIAAAVEQNAAHPLARAIVSATQARGLEIPAAQNAQTVVGAGIAAEVEGAGLVKAGKAEFAELTLPEFSDGVWDIASIVAVSVDNKPIGAFALADALKADTAEAIGRLKKHNIDVYIMSGDNQGTVEYVAQQLGIAHAFGNMSPRDKAAEVQKLKAAGKTVAMVGDGINDAPALAAANVSFAMKGGADVAEHTASATLMQHSVNQLADALLVSQATLKNIKQNLFFAFFYNILGIPLAALGFLNPVIAGAAMAASSVSVLSNALRLKRVKID

SEQ ID NO: 20983 - protein, 590 aa, Neisseria meningitidis; identical to SEQ ID NO: 8127

SEQ ID NO: 20984 - protein, 56 aa, Neisseria meningitidis; identical to SEQ ID NO: 1209

SEQ ID NO: 20985 - protein, 328 aa, Neisseria meningitidis; identical to SEQ ID NO: 9651

SEQ ID NO: 20986 - protein, 268 aa, Neisseria meningitidis; identical to SEQ ID NO: 8914

SEQ ID NO: 20987 - protein, 252 aa, Neisseria meningitidis
MITIRNVSFHIGTCPILDNISLDIPEGGITALIGPNGAGKSTLFSFMARLRPLESGSIAYRGKNLAGTPTAELARTLSILTQENSIMSRITVRDLLMFGRYPYHQGRPTAECRRIVNGAIEEFHLQDLSDRYLTELSGGQRQRAMIAMVFCQSTDYVLLDEPLNNLDMYHARSLMQILQKLTREHKRTTVAVLHDINQAAAYADHVVAMKNGKVALTGTPEEVFTVHNIKELFDMDVDVLDYEGKKLIVHHI

SEQ ID NO: 20988 - protein, 109 aa, Neisseria meningitidis; identical to SEQ ID NO: 9343

SEQ ID NO: 20989 - protein, 464 aa, Neisseria meningitidis; identical to SEQ ID NO: 8899

SEQ ID NO: 20990 - protein, 284 aa, Neisseria meningitidis; identical to SEQ ID NO: 3000

SEQ ID NO: 20991 - protein, 179 aa, Neisseria meningitidis; identical to SEQ ID NO: 8483

SEQ ID NO: 20992 - protein, 975 aa, Neisseria meningitidis
MPSEQGFQTAFAFSVIIRGCAGSGFKPASSFPIFFCPLSVLSGFFMSNRPTLLLVDGSSYLYRAYHAMGQNLTAPDGAPTGALYGVLNMLRRLRSEYPHDYCAVVFDAKGKNFRHQMFEEYKATRPPMPDDLRPQAEALPDLVRLTGWPVLVIGQVEADDVIGTLAKQGAEHGLRVIVSTGDKDMAQLVDERVTLVNTMSGETLDIEGVKAKFGVRPDQIRDYLALMGDKVDNVPGVEKCGPKTAVKWLEAYGSLQGVMEHASEIKGKVGENLRAALPRLPLSYDLVTIKTDVDLHAELSDGIESLRRTAPKWAQLVVDFKRWGFRTWLKEAESNMNTGSTDDVFGSDSIGEQAALNAEMPSEKQAEKATAPERLDYQAVTTEAQFAALLDKLSRANTIGIDTETTSLDAMNASLVGISIAFQAGEAVYIPVGHSLTAAPEQLDLQDVLGRLKPHLGNPALKKIGQNLKYDQHVFANYGIALNGIAGDAMLASYIIESHLGHGLDELSERWLGLETITYESLCGKGAKQIGFADVAIGQATEYAAQDADFALRLEAHLRAQMDEKQLEMYEKMELPVAQVLFEMERNGVQIDRAELARQSAELGAELMKLEQQAYAAADQPFNLNSPKQLQEILFDKMGIPTKGLKKTAKGGISTNEAVLEQLAPDYPLPKIILQNRSLAKLKSTYTDKLPEMISPKDGRVHTTYAQAVAITGRLASNNPNLQNIPIRTAEGRRVRRAFTAPQGSVIVSADYSQIELRIMAHLSGDKTLIAAFQNGEDVHRRTAAEVFGTAPENVSSEQRRYAKTINFGLIYGMGQYGLAKSLGIDNLSAKNFIDRYFARYPGVAEYMQRTKEQAAAQGYVETLFGRRLYLPDIRNKNANARAGAERAAINAPMQGTASDLIKRAMIDVRNCLSDGIGSKLVMQVHDELVLEVVETELDFVKEKLPQIMAKVDGGLLDVPLVAEVGVGENWEEAH

SEQ ID NO: 20993 - protein, 123 aa, Neisseria meningitidis; identical to SEQ ID NO: 5008

SEQ ID NO: 20994 - protein, 164 aa, Neisseria meningitidis; identical to SEQ ID NO: 7401

SEQ ID NO: 20995 - protein, 415 aa, Neisseria meningitidis; identical to SEQ ID NO: 2921

SEQ ID NO: 20996 - protein, 208 aa, Neisseria meningitidis
MTQEHFPSFFNQAPTITVQDALAEFLGAAENGILTYRYADAVRLCGHSCPTVAGAYLMVIKGLKALYGEELPERGGIEAFMQGTRDEGTVGVTASVVQLLTGAAPETGFGGIGMQGRFARRHLLSFGVGEINGTLTLRRKDNGKTVAVSLNAALQPFAPEMRELMPKAVGGSASADELKQFGELWQERVRAFLIDQADNPEFVTVSEI

SEQ ID NO: 20997 - protein, 57 aa, Neisseria meningitidis; identical to SEQ ID NO: 6070

SEQ ID NO: 20998 - protein, 92 aa, Neisseria meningitidis; identical to SEQ ID NO: 8116

SEQ ID NO: 20999 - protein, 155 aa, Neisseria meningitidis; identical to SEQ ID NO: 1336

SEQ ID NO: 21000 - protein, 96 aa, Neisseria meningitidis; identical to SEQ ID NO: 2317

SEQ ID NO: 21001 - protein, 326 aa, Neisseria meningitidis
MGIAPYCRNLIIQEQKMKIANSITELIGNTPLVKLNRLTEGLKAEVAVKLEFFNPGSSVKDRIAEAMIEGAEKAGKINKNTVIVEATSGNTGVGLAMVCAARGYKLAITMPESMSKERKMLLRAFGAELILTPAAEGMAGAIAKAKSLVDAHPDTYFMPRQFDNEANPEVHRKTTAEEIWRDTDGKVDVFVAGVGTGGTITGVGEVLKKYKPEVKVVAVEPEASPVLSGGEKGPHPIQGIGAGFIPTVLNTKIYDSITKVSNEAAFETARAIAEKEGILVGISSGAAVWSALQLAKQPENEGKLIVVLLPSYGERYLSTPLFADLA

SEQ ID NO: 21002 - protein, 315 aa, Neisseria meningitidis; identical to SEQ ID NO: 18491

SEQ ID NO: 21003 - protein, 604 aa, Neisseria meningitidis; identical to SEQ ID NO: 8822

SEQ ID NO: 21004 - protein, 492 aa, Neisseria meningitidis; identical to SEQ ID NO: 8385

SEQ ID NO: 21005 - protein, 376 aa, Neisseria meningitidis
MFTDENMTAKEELFAWLRHMNQNKGSDLFVTTHFPPAMKLDGKITRITDEPLTAEKCMEIAFSIMSAKQAEEFSSTNECNFAISLPDTSRFRVNAMIQRGATALVFRAITSKIPKFESLNLPPVLKDVALKKRGLVIFVGGTGSGKSTSLASLIDYRNENSFGHIITIEDPIEFVHEHKNCIITQREVGVDTENWMAALKNTLRQAPDVILIGEIRDRETMDYAIAFAETGHLCMATLHANSTNQALDRIINFFPEERREQLLTDLSLNLQAFISQRLVPRDGGKGRVAAVEVLLNSPLISELIHNGNIHEIKEVMKKSTTLGMQTFDQHLYQLYEKGDISLQDALKNADSAHDLRLAVQLRSRRAQSSGPDLELL

SEQ ID NO: 21006 - protein, 92 aa, Neisseria meningitidis; identical to SEQ ID NO: 2199

SEQ ID NO: 21007 - protein, 445 aa, Neisseria meningitidis; identical to SEQ ID NO: 2190

SEQ ID NO: 21008 - protein, 188 aa, Neisseria meningitidis; identical to SEQ ID NO: 9104

SEQ ID NO: 21009 - protein, 498 aa, Neisseria meningitidis; identical to SEQ ID NO: 2733

SEQ ID NO: 21010 - protein, 449 aa, Neisseria meningitidis; identical to SEQ ID NO: 10727

SEQ ID NO: 21011 - protein, 161 aa, Neisseria meningitidis; identical to SEQ ID NO: 9396

SEQ ID NO: 21012 - protein, 287 aa, Neisseria meningitidis; identical to SEQ ID NO: 7964

SEQ ID NO: 21013 - protein, 864 aa, Neisseria meningitidis; identical to SEQ ID NO: 8467

SEQ ID NO: 21014 - protein, 228 aa, Neisseria meningitidis
MTVLQERYREVSDRIGKLVLQAGRKPHSVSLIAVGKTFPSDGIREVYAAGQRDFGENYIQEWYGKTEELADLTDIVWHVIGDVQSNKTKFVAERAHWVHTVCRLKTAVRLSGQRPSSMPPLQVCIEVNIAGEAAKHGVAPEEAVALAVEVAKLPNLVVRGLMCVAKANSSETELKTQFQTMQKLLADLNAAGVKADVLSMGMSDDMPAAIECGATHVRIGSAIFGKRG

SEQ ID NO: 21015 - protein, 65 aa, Neisseria meningitidis; identical to SEQ ID NO: 127

SEQ ID NO: 21016 - protein, 251 aa, Neisseria meningitidis
LGLFKLGTRPKTNIVKIDEKLEAVADTVDKHAEAFNDIADSLDETNTKADEAVKTANEAKQTAEETKQNVDAKVKAAETAAGTANTAADKAEAVAAKVTDIKADIATNKDNIAKKANSADVYTREESDSKFVRIDGLNATTEKLDTRLASAEKSITEHGTRLNGLDRTVSDLRKETRQGLAEQAALSGLFQPYNVGRFNVTAAVGGYKSESAVAIGTGFRFTENFAAKAGVAVGTSSGSSAAYHVGVNYEW

SEQ ID NO: 21017 - protein, 97 aa, Neisseria meningitidis; identical to SEQ ID NO: 177

SEQ ID NO: 21018 - protein, 45 aa, Neisseria meningitidis; identical to SEQ ID NO: 3752

SEQ ID NO: 21019 - protein, 434 aa, Neisseria meningitidis; identical to SEQ ID NO: 3368

SEQ ID NO: 21020 - protein, 43 aa, Neisseria meningitidis
MQVSVWMDSSFPRRRESRSVGAETYRVKRFLEILRPEFPLSWE

SEQ ID NO: 21021 - protein, 428 aa, Neisseria meningitidis; identical to SEQ ID NO: 9520

SEQ ID NO: 21022 - protein, 459 aa, Neisseria meningitidis; identical to SEQ ID NO: 8031

SEQ ID NO: 21023 - protein, 57 aa, Neisseria meningitidis; identical to SEQ ID NO: 735

SEQ ID NO: 21024 - protein, 251 aa, Neisseria meningitidis; identical to SEQ ID NO: 8366

SEQ ID NO: 21025 - protein, 881 aa, Neisseria meningitidis
LRDIEKIMKTSELRQKFLKFFETKGHTVVRSSSLVPHDDPTLLFTNAGMNQFKDVFLGFDKRPYSRATTAQKCVRAGGKHNDLENVGYTARHHTFFEMMGNFSFGDYFKRDAIHFAWEFLTSPEWLNIPKDKLLATVYAEDDEAYNIWLNEIGMPSERIVRIGDNKGAKYASDNFWQMGDTGPCGPCSEIFYDHGEEIWGGIPGSPEEDGDRWIEIWNCVFMQFNRDEQGNMNPLPKPSVDTGMGLERMAAVMQHVHSNYEIDLFQDLLKAVARETGAAFSMEEPSLKVIADHIRSCSFLIADGVLPSNEGRGYVLRRIIRRAVRHGYKLGQSKPFFHKLVADLVKEMGDAYPELKEKQVQIEEALKNEESRFAQTLETGMALLENALAKGSKKLDGEIIFKLYDTYGFPYDLTADICRERNIELDEAGFEREMEAQRARARAAQSFKANAQLPYDGQDTEFKGYSERQTESKVLALYKDGEQVDELNEGDSGAVVIDFTPFYAESGGQVGDVGYIFSGENRFEVLDTQKIKAAVFGQFGVQTSGRLKVGDSVTAKVDDEIRNANMRNHSATHLMHKALRDVLGRHVEQKGSLVTAESTRFDISHPQAVTAEEIAEVERRVNEAVLANVAVNAAIMSMEDAQKTGAMMLFGEKYGDEVRVLQMGGFSTELCGGTHVSRTGDIGLFKIISEGGIAAGVRRIEAITGLNALKWAQEQERLVKDIIAETKAQTEKDVLAKIQAGAAHAKALEKELARAKAELAVHAGAKLLDDAKDLGAAKLVAAQIEADAAALREIVTDLTGKSDNAVILLAAVNDGKVSLCAGVSKALTGKVKAGDLVKFAAEQVGGKGGGRPDLAQAGGTDAGKLPAVLDSVKDWVGAKLV

SEQ ID NO: 21026 - protein, 644 aa, Neisseria meningitidis; identical to SEQ ID NO: 9954

SEQ ID NO: 21027 - protein, 108 aa, Neisseria meningitidis; identical to SEQ ID NO: 8858

SEQ ID NO: 21028 - protein, 130 aa, Neisseria meningitidis; identical to SEQ ID NO: 425

SEQ ID NO: 21029 - protein, 253 aa, Neisseria meningitidis; identical to SEQ ID NO: 3373

SEQ ID NO: 21030 - protein, 333 aa, Neisseria meningitidis; identical to SEQ ID NO: 620

SEQ ID NO: 21031 - protein, 113 aa, Neisseria meningitidis; identical to SEQ ID NO: 118

SEQ ID NO: 21032 - protein, 123 aa, Neisseria meningitidis; identical to SEQ ID NO: 9472

SEQ ID NO: 21033 - protein, 114 aa, Neisseria meningitidis; identical to SEQ ID NO: 1818

SEQ ID NO: 21034 - protein, 481 aa, Neisseria meningitidis; identical to SEQ ID NO: 8364

SEQ ID NO: 21035 - protein, 68 aa, Neisseria meningitidis; identical to SEQ ID NO: 3041

SEQ ID NO: 21036 - protein, 148 aa, Neisseria meningitidis; identical to SEQ ID NO: 3068

SEQ ID NO: 21037 - protein, 271 aa, Neisseria meningitidis; identical to SEQ ID NO: 1333

SEQ ID NO: 21038 - protein, 793 aa, Neisseria meningitidis; identical to SEQ ID NO: 8027

SEQ ID NO: 21039 - protein, 312 aa, Neisseria meningitidis; identical to SEQ ID NO: 8810

SEQ ID NO: 21040 - protein, 413 aa, Neisseria meningitidis; identical to SEQ ID NO: 9110

SEQ ID NO: 21041 - protein, 157 aa, Neisseria meningitidis; identical to SEQ ID NO: 8117

SEQ ID NO: 21042 - protein, 191 aa, Neisseria meningitidis; identical to SEQ ID NO: 1730

SEQ ID NO: 21043 - protein, 242 aa, Neisseria meningitidis; identical to SEQ ID NO: 18805

SEQ ID NO: 21044 - protein, 281 aa, Neisseria meningitidis
  misc_feature 2, 3: 'Xaa' is any amino acid
VXXTNLGEHKIGAKAYNPVWYIPKSIQKERGDGVKTIAAGPDNPLGPVFVRLGDPKLGLGIHGTNAPASVPGVRSHGCVRMKSPDALEFAKTIASGSPASVIYQMAGLNEDADRNLWLAAFRDPYGKNNLDIASLKKSIAQWAKTQGKTIAPEKVDAVLKDRTGSAVCLTCGKNGKMKMPLKSLAWIQGSSSYSQAEVIEQTEETNSAEISETRTPEVPDVHTPEAQPHLNTQSDGTPTAYTEPAADSSPQVETPDQAASEPVDVLFSIDVIRQGNLRLGN

SEQ ID NO: 21045 - protein, 140 aa, Neisseria meningitidis
MKITKIFTFDSSHMLDGHDGKCQNLHGHTYKLEITVSDGIIKGSAKDGMVMDFTDLKAIVKQHITDPFDHAFIYHGGNSRESQIAALLEGWNMKTLRLPCRTTAENMAVEMYDRLKNAGLNVCRVKLWETPTSCAEYEGE

SEQ ID NO: 21046 - protein, 120 aa, Neisseria meningitidis; identical to SEQ ID NO: 9287

SEQ ID NO: 21047 - protein, 344 aa, Neisseria meningitidis; identical to SEQ ID NO: 9761

SEQ ID NO: 21048 - protein, 108 aa, Neisseria meningitidis
VNFKQPLLPKGALKMGQYKKLWYLLFAVLAVCFTILGYMGSEVYKKAPPYPEQVVSASGKVLMTKDDILAGQSAWQSTGGMEVGSILGHGAYQAPDWTADWLHRELVA

SEQ ID NO: 21049 - protein, 96 aa, Neisseria meningitidis; identical to SEQ ID NO: 5466

SEQ ID NO: 21050 - protein, 138 aa, Neisseria meningitidis; identical to SEQ ID NO: 937

SEQ ID NO: 21051 - protein, 157 aa, Neisseria meningitidis; identical to SEQ ID NO: 8970

SEQ ID NO: 21052 - protein, 404 aa, Neisseria meningitidis; identical to SEQ ID NO: 8535

SEQ ID NO: 21053 - protein, 183 aa, Neisseria meningitidis; identical to SEQ ID NO: 9012

SEQ ID NO: 21054 - protein, 397 aa, Neisseria meningitidis; identical to SEQ ID NO: 103

SEQ ID NO: 21055 - protein, 43 aa, Neisseria meningitidis; identical to SEQ ID NO: 12437

SEQ ID NO: 21056 - protein, 358 aa, Neisseria meningitidis; identical to SEQ ID NO: 8668

SEQ ID NO: 21057 - protein, 93 aa, Neisseria meningitidis; identical to SEQ ID NO: 3308

SEQ ID NO: 21058 - protein, 525 aa, Neisseria meningitidis; identical to SEQ ID NO: 8126

SEQ ID NO: 21059 - protein, 126 aa, Neisseria meningitidis; identical to SEQ ID NO: 3371

SEQ ID NO: 21060 - protein, 177 aa, Neisseria meningitidis; identical to SEQ ID NO: 8138

SEQ ID NO: 21061 - protein, 533 aa, Neisseria meningitidis; identical to SEQ ID NO: 3462

SEQ ID NO: 21062 - protein, 357 aa, Neisseria meningitidis; identical to SEQ ID NO: 8094

SEQ ID NO: 21063 - protein, 524 aa, Neisseria meningitidis; identical to SEQ ID NO: 19792

SEQ ID NO: 21064 - protein, 148 aa, Neisseria meningitidis; identical to SEQ ID NO: 4019

SEQ ID NO: 21065 - protein, 143 aa, Neisseria meningitidis; identical to SEQ ID NO: 28

SEQ ID NO: 21066 - protein, 115 aa, Neisseria meningitidis; identical to SEQ ID NO: 2034

SEQ ID NO: 21067 - protein, 321 aa, Neisseria meningitidis; identical to SEQ ID NO: 2913

SEQ ID NO: 21068 - protein, 284 aa, Neisseria meningitidis; identical to SEQ ID NO: 8204

SEQ ID NO: 21069 - protein, 250 aa, Neisseria meningitidis; identical to SEQ ID NO: 2637

SEQ ID NO: 21070 - protein, 346 aa, Neisseria meningitidis; identical to SEQ ID NO: 8941

SEQ ID NO: 21071 - protein, 447 aa, Neisseria meningitidis; identical to SEQ ID NO: 2570

SEQ ID NO: 21072 - protein, 240 aa, Neisseria meningitidis; identical to SEQ ID NO: 3621

SEQ ID NO: 21073 - protein, 299 aa, Neisseria meningitidis; identical to SEQ ID NO: 167

SEQ ID NO: 21074 - protein, 261 aa, Neisseria meningitidis; identical to SEQ ID NO: 8388

SEQ ID NO: 21075 - protein, 195 aa, Neisseria meningitidis; identical to SEQ ID NO: 653

SEQ ID NO: 21076 - protein, 239 aa, Neisseria meningitidis
MKNKNYLLVFIVLHIALIVINIVFGYFVFLFDFFAFLFFANVFLAVNLLFLEKNIKNKLLFLLPISIIIWMVIHISMINIKFYKFEHQIKEQNISSITGVIKPHDSYNYVYDSNGYAKLKDNHRYGRVIRETPYIDVVASDVKNKSIRLSLVCGIHSYAPCANFIKFAKKPVKIYFYNQPQGDFIDNVIFEINDGNKSLYLLDKYKTFFLIENSVCIVLIILYLKFNLLLYRTYFNELE

SEQ ID NO: 21077 - protein, 180 aa, Neisseria meningitidis; identical to SEQ ID NO: 2298

SEQ ID NO: 21078 - protein, 71 aa, Neisseria meningitidis; identical to SEQ ID NO: 2248

SEQ ID NO: 21079 - protein, 321 aa, Neisseria meningitidis; identical to SEQ ID NO: 4494

SEQ ID NO: 21080 - protein, 207 aa, Neisseria meningitidis; identical to SEQ ID NO: 1132

SEQ ID NO: 21081 - protein, 468 aa, Neisseria meningitidis
MTAAPDILYRQAAALLEQSNTAQALPLLQQAAEQGYAEAAFVLGNHLLQNGQPEQALSWLEAAAAQRHPKALFSLLQQREHNGTPTGQLLNDYAWLGEQGHSEAQLILMRYHTQRNDPQSLYWAELAAAQYAAPAYYHLARHHQRQGDVETAIEQYEKAAALGVTAACWQLGQIYFYGTGVSPNHAQAEHYLEPAAQAGHIAAQTLLADLLAAQRKPEALEWYRRAADKEQAEAQAKLAQYALTGELSERDPFQAARYAKAAAEKDHPEALKIMGDLYRYGLGIKADNHIAQDYYHRAAALGSAAAAQKLISDAALYHPQQYEQIKTAALQQQQTETIYRLAEAQACAIGRPADYNAARKNYMEAAGFHHKNAAAALGRIYHYGLGTAQDPRAAAHWYAIAAEQNHPSAQYHLACFYYHGQGVGCHVPTACYWLQAAIGNGHTSAESLISLLEQWRREAHHAIGQKAV

SEQ ID NO: 21082 - protein, 151 aa, Neisseria meningitidis; identical to SEQ ID NO: 3388

SEQ ID NO: 21083 - protein, 401 aa, Neisseria meningitidis
LKPCDTGGKIAVYPVRETGDSKDFPMIKISTRFDAGSVVVKDLTDPSNIRLALRPDNASDFAQWFYFRLQGAAYQNCIMHFDNAAEAAYPKGWEGYQACASYDRRNWFRVPTSYENGVLTVNHTPLSNSVYYAYFEPYSEEQHLNLLGDAQGSGLCRIDDLGSTVQGRDINLLTIGNQVESDLKIWITARQHPGETMAEWFVEGLLGRLLDHQDATARTLLDRATFYIVPNMNPDGSALGNLRTNAAGVNLNREWENPTVEKSPEVFFVRERMLETGVDLFLDIHGDEGLPFVFVAGTEGVPNYNPRISALETQFKTALLNASPDFQDEYGYEKDAPGQANVTLATNWVGNRFNCLAYTLEMPFKDNANLPDDDFGWNGQRSLRLGEAVLSAILNVAGDLR

SEQ ID NO: 21084 - protein, 252 aa, Neisseria meningitidis; identical to SEQ ID NO: 4740

SEQ ID NO: 21085 - protein, 93 aa, Neisseria meningitidis; identical to SEQ ID NO: 2977

SEQ ID NO: 21086 - protein, 292 aa, Neisseria meningitidis; identical to SEQ ID NO: 1803

SEQ ID NO: 21087 - protein, 262 aa, Neisseria meningitidis; identical to SEQ ID NO: 8292

SEQ ID NO: 21088 - protein, 463 aa, Neisseria meningitidis; identical to SEQ ID NO: 736

SEQ ID NO: 21089 - protein, 387 aa, Neisseria meningitidis; identical to SEQ ID NO: 9434

SEQ ID NO: 21090 - protein, 207 aa, Neisseria meningitidis; identical to SEQ ID NO: 2101

SEQ ID NO: 21091 - protein, 100 aa, Neisseria meningitidis; identical to SEQ ID NO: 2893

SEQ ID NO: 21092 - protein, 272 aa, Neisseria meningitidis; identical to SEQ ID NO: 1395

SEQ ID NO: 21093 - protein, 282 aa, Neisseria meningitidis; identical to SEQ ID NO: 1327

SEQ ID NO: 21094 - protein, 170 aa, Neisseria meningitidis; identical to SEQ ID NO: 2052

SEQ ID NO: 21095 - protein, 205 aa, Neisseria meningitidis; identical to SEQ ID NO: 8862

SEQ ID NO: 21096 - protein, 388 aa, Neisseria meningitidis; identical to SEQ ID NO: 9033

SEQ ID NO: 21097 - protein, 246 aa, Neisseria meningitidis; identical to SEQ ID NO: 2993

SEQ ID NO: 21098 - protein, 120 aa, Neisseria meningitidis; identical to SEQ ID NO: 1496

SEQ ID NO: 21099 - protein, 208 aa, Neisseria meningitidis; identical to SEQ ID NO: 9498

SEQ ID NO: 21100 - protein, 1391 aa, Neisseria meningitidis; identical to SEQ ID NO: 3726

SEQ ID NO: 21101 - protein, 330 aa, Neisseria meningitidis; identical to SEQ ID NO: 8754

SEQ ID NO: 21102 - protein, 169 aa, Neisseria meningitidis; identical to SEQ ID NO: 3746

SEQ ID NO: 21103 - protein, 472 aa, Neisseria meningitidis; identical to SEQ ID NO: 4196

SEQ ID NO: 21104 - protein, 281 aa, Neisseria meningitidis; identical to SEQ ID NO: 8149

SEQ ID NO: 21105 - protein, 226 aa, Neisseria meningitidis; identical to SEQ ID NO: 8827

SEQ ID NO: 21106 - protein, 237 aa, Neisseria meningitidis; identical to SEQ ID NO: 10560

SEQ ID NO: 21107 - protein, 507 aa, Neisseria meningitidis; identical to SEQ ID NO: 8037

SEQ ID NO: 21108 - protein, 522 aa, Neisseria meningitidis; identical to SEQ ID NO: 739

SEQ ID NO: 21109 - protein, 195 aa, Neisseria meningitidis
MSELDNILAHNRQFVESGEYEKYFTDKYPERGLAVLSCMDARIIELLPNALGLRNGDAKLIKNAGALVTHPWGSVMRSLLVAVFELKVREIMVIAHHDCGMQGLNAEEFLGRVRESRIPEDRIETLRYAGIDLDGWLTGFDNVEDSVRHTVELIRHHPLMPRHIAVHGLIIHPVTGKLTTVVRDGVSDGIPREAV

SEQ ID NO: 21110 - protein, 206 aa, Neisseria meningitidis; identical to SEQ ID NO: 1725

SEQ ID NO: 21111 - protein, 295 aa, Neisseria meningitidis; identical to SEQ ID NO: 2981

SEQ ID NO: 21112 - protein, 611 aa, Neisseria meningitidis
VNTTPIHSKLAEITGRIIERSRPTREKYLAKIRSAKQMGRLERNQLGCSNLAHGYAAMPKSIKIEMLQETVPNLGIITAYNDMVSAHQPFKDFPDQIKDEAQKNGATAQVAGGTPAMCDGITQGYAGMELSLFSRDVIAMSTAVGLSHQMFDGSLFMGVCDKIVPGLMIGALSFGHIPGIFVPAGPMSSGIGNKEKARTRQLFAEGKVGRNELLKSEMGSYHSPGTCTFYGTANSNQMMMEMMGVHLPAAAFVHPYTDLREALTRYAAGHLARGIKNGTIKPLGEMLTEKSFINALIGLMATGGSTNHTMHLVAMARAAGVILNWDDFDEISSIIPLLIRVYPNGKADVNHFTAAGGLPFVIRELLNAGLLHDDVDTVVGHGMRHYTKEPFLIDGKLEWREAPETSGNDDILRKADNPFSPDGGLRLMKGNIGRGVIKVSAVREGCRIIEAPAIVFNDQREVLAAFERGELERDFVCVVRYQGPRANGMPELHKLTPPLGILQDRGFKVALLTDGRMSGASGKVPASIHMTPEALMGGNIAKIRTGDLIRFDSVTGELNVLINEAEWNAREVESIDLGANQQGCGRELFANFRSMTSSAETGAMSFGGEFA

SEQ ID NO: 21113 - protein, 596 aa, Neisseria meningitidis; identical to SEQ ID NO: 9098

SEQ ID NO: 21114 - protein, 129 aa, Neisseria meningitidis
MLYKCKIKKLDNTIEETVLIEINGYELHCFISYCPFKIFENQFYEVELSYEIFNDCILDKSTSNIGFRKIDDSFKYEITAELKNNHLTLQNIQFEEDEYLINYSYLDNCLVTLTVDRISVSFIREIQAA

SEQ ID NO: 21115 - protein, 216 aa, Neisseria meningitidis; identical to SEQ ID NO: 2708

SEQ ID NO: 21116 - protein, 221 aa, Neisseria meningitidis
VDNMMKFKYVFLLACVVVSLSYRLNAAPMFNDNPVVYGKIKVQSWKARRDFNIVKQDLDFSCGAASVATLLNNFYGQTLTEEEVLKKLDKEQMRASFEDMRRIMPDLGFEAKGYALSFEQLAQLKIPVIVYLKYRKDDHFSVLRGIDGNTVLLADPSLGHVSMSRAQFLDAWQTREGNLAGKILAVVPKKAETISNKLFFTHHPKRQTEFAVRQIRQARAE

SEQ ID NO: 21117 - protein, 309 aa, Neisseria meningitidis; identical to SEQ ID NO: 9408

SEQ ID NO: 21118 - protein, 189 aa, Neisseria meningitidis; identical to SEQ ID NO: 9128

SEQ ID NO: 21119 - protein, 307 aa, Neisseria meningitidis; identical to SEQ ID NO: 3458

SEQ ID NO: 21120 - protein, 335 aa, Neisseria meningitidis; identical to SEQ ID NO: 7950

SEQ ID NO: 21121 - protein, 507 aa, Neisseria meningitidis; identical to SEQ ID NO: 9867

SEQ ID NO: 21122 - protein, 157 aa, Neisseria meningitidis; identical to SEQ ID NO: 8805

SEQ ID NO: 21123 - protein, 251 aa, Neisseria meningitidis; identical to SEQ ID NO: 6395

SEQ ID NO: 21124 - protein, 503 aa, Neisseria meningitidis; identical to SEQ ID NO: 8447

SEQ ID NO: 21125 - protein, 43 aa, Neisseria meningitidis; identical to SEQ ID NO: 9163

SEQ ID NO: 21126 - protein, 421 aa, Neisseria meningitidis; identical to SEQ ID NO: 3252

SEQ ID NO: 21127 - protein, 475 aa, Neisseria meningitidis; identical to SEQ ID NO: 3229

SEQ ID NO: 21128 - protein, 75 aa, Neisseria meningitidis; identical to SEQ ID NO: 8833

SEQ ID NO: 21129 - protein, 273 aa, Neisseria meningitidis; identical to SEQ ID NO: 1044

SEQ ID NO: 21130 - protein, 103 aa, Neisseria meningitidis; identical to SEQ ID NO: 3283

SEQ ID NO: 21131 - protein, 336 aa, Neisseria meningitidis; identical to SEQ ID NO: 11671

SEQ ID NO: 21132 - protein, 257 aa, Neisseria meningitidis; identical to SEQ ID NO: 8017

SEQ ID NO: 21133 - protein, 152 aa, Neisseria meningitidis; identical to SEQ ID NO: 1697

SEQ ID NO: 21134 - protein, 347 aa, Neisseria meningitidis; identical to SEQ ID NO: 8843

SEQ ID NO: 21135 - protein, 164 aa, Neisseria meningitidis; identical to SEQ ID NO: 7379

SEQ ID NO: 21136 - protein, 360 aa, Neisseria meningitidis; identical to SEQ ID NO: 9706

SEQ ID NO: 21137 - protein, 296 aa, Neisseria meningitidis; identical to SEQ ID NO: 337

SEQ ID NO: 21138 - protein, 468 aa, Neisseria meningitidis; identical to SEQ ID NO: 2817

SEQ ID NO: 21139 - protein, 206 aa, Neisseria meningitidis; identical to SEQ ID NO: 1164

SEQ ID NO: 21140 - protein, 273 aa, Neisseria meningitidis
MMKGMDKLRYQQDFLNIRPIFTAGEQEYLTGLSDRLPLSVLTGSVRNIEEIGIDFVYSSAKLEGNTYNQYDTQALLKLGQTAGGKLYSDAVMLINLRESYRHLLSGLDSPEPFDWLDFLKTTHSLISENLLEKGSGGVVRRDSVTISGTDYTPLSNPQSLDTELKWLLQEAPKIENPFDRAVYLHNNLAYLQYFKDCNKRTARNCMTLSLMRSGFFPCVFAPDSYPAYAEAVVAYYETGDYGLFKKYFISAYENTVNKYGPQPDMDISRNFSL

SEQ ID NO: 21141 - protein, 449 aa, Neisseria meningitidis; identical to SEQ ID NO: 481

SEQ ID NO: 21142 - protein, 294 aa, Neisseria meningitidis
LDVVSFALGQLRVAHGNLSCRKGRMLPHTGLFLLGKVALQMRIRRPASAYRPAFLPHYRPRRYRQRRHGGNTGNRRRAGRGRQCGDGEAQLMAAPAGVATECRLTVQGGTDRESDASLLARLLKIIRRPPAGGNRYDYKNWALSVDGVTSAYVYPLRRGLGTVDIAITSADGVPSEETVRRVQAYIDEMRPVTAKNALVLKPTVTAVPVTVQVKLDGIDLDEAKRRIRTALKEYFDTLIPGDGLTVSQIEAAISNVDGVIDRRLTAPTANRAADTVNRIEWFKAGAINVTEMPS

SEQ ID NO: 21143 - protein, 166 aa, Neisseria meningitidis; identical to SEQ ID NO: 1704

SEQ ID NO: 21144 - protein, 109 aa, Neisseria meningitidis; identical to SEQ ID NO: 899

SEQ ID NO: 21145 - protein, 142 aa, Neisseria meningitidis; identical to SEQ ID NO: 4400

SEQ ID NO: 21146 - protein, 141 aa, Neisseria meningitidis; identical to SEQ ID NO: 26

SEQ ID NO: 21147 - protein, 87 aa, Neisseria meningitidis
MNKLNFLLLLAVCVSAFSVVMQQNQYRLNFTALDKAKKQEIALEQDYAQMRLQQARLANHEAIRAAAEKQNLHPPVSGNTFMVEHQR

SEQ ID NO: 21148 - protein, 575 aa, Neisseria meningitidis; identical to SEQ ID NO: 9410

SEQ ID NO: 21149 - protein, 81 aa, Neisseria meningitidis; identical to SEQ ID NO: 2079

SEQ ID NO: 21150 - protein, 51 aa, Neisseria meningitidis; identical to SEQ ID NO: 1872

SEQ ID NO: 21151 - protein, 306 aa, Neisseria meningitidis
LHQTFHSFRFSDGIVKVVLPFPYFQHCFMLPLKTPGVLPGFKLSLGLTVLCLSLLVVLPFAMMAAKAAEIGWGGFWNTIAEPNALAAVWLSLRMSFYAMLTNVVFGTLVAWVLVRYEFPGKGLANALVDLPFALPTAVTGIALATLYAPNGWIGRFFEPLGIKIAFTPVGIWIALVVVSLPFIVRAVQPVLEELSGEYEEAAATLGANRFTTFRRVLLPEITPALLTGAGMMFARATGEYGSVIFIAGNIPMVSEILPLIITGKLEQFDVQGASAVALFMLLVSFVILFALNVMQWALGRRSGAKG

SEQ ID NO: 21152 - protein, 220 aa, Neisseria meningitidis; identical to SEQ ID NO: 5269

SEQ ID NO: 21153 - protein, 334 aa, Neisseria meningitidis; identical to SEQ ID NO: 8283

SEQ ID NO: 21154 - protein, 808 aa, Neisseria meningitidis; identical to SEQ ID NO: 2836

SEQ ID NO: 21155 - protein, 544 aa, Neisseria meningitidis; identical to SEQ ID NO: 9554

SEQ ID NO: 21156 - protein, 279 aa, Neisseria meningitidis; identical to SEQ ID NO: 7960

SEQ ID NO: 21157 - protein, 112 aa, Neisseria meningitidis; identical to SEQ ID NO: 3481

SEQ ID NO: 21158 - protein, 200 aa, Neisseria meningitidis
LRVLSAPPALPFAYASVSCGFFCLLWFLSEALMVDAWSVPDFESKICPPEALSERLARLPRPLVFTNGCFDILHRGHVTYLAQARSAGAALVLALNTDASVRRLGKDGDRPINPLENRAAVAAALESVDLVTWFDGDTPAALIEAVKPEILVKGGDWAADKIVGAAETLARGGQVFSIPFLHQTSTTKTLAKIRAAEGGK

SEQ ID NO: 21159 - protein, 81 aa, Neisseria meningitidis; identical to SEQ ID NO: 1361

SEQ ID NO: 21160 - protein, 92 aa, Neisseria meningitidis; identical to SEQ ID NO: 1005

SEQ ID NO: 21161 - protein, 138 aa, Neisseria meningitidis; identical to SEQ ID NO: 489

SEQ ID NO: 21162 - protein, 222 aa, Neisseria meningitidis; identical to SEQ ID NO: 3618

SEQ ID NO: 21163 - protein, 167 aa, Neisseria meningitidis; identical to SEQ ID NO: 2666

SEQ ID NO: 21164 - protein, 391 aa, Neisseria meningitidis; identical to SEQ ID NO: 8600

SEQ ID NO: 21165 - protein, 656 aa, Neisseria meningitidis
LDLTAQQTYGKKFDEVSPEEQAVLKTRLADEYRNQSRIKEDGSVVISDTRVKAIESILPYYHGVYGDDPALQTTREHFAMKNNTLPSQEAREKLFDFFFWTSWSASTNRPDETFTYTNNWPHEPLINNVPTTENYMWSFTSVVLLLMGIGLLMWGYSFLTKHEEVEVPSEDPISKIQLTPSQKALGKYVFLTVALFVVQVLLGGLTAHYTVEGQGFYGIDEALGFEMSDWFPYALTRTWHIQSAIFWIATGFLTAGLFLAPIVNGGKDPKFQRAGVNFLYIALFIVVGGSYAGNFFALTHILPPEFNFWFGHQGYEYLDLGRFWQLLLMVGLLLWLFLMLRCTVSAFKEKGVDKNLLAIFVASMVGVGVFYAPGLFYGEKSPIAVMEYWRWWVVHLWVEGFFEVFATAAFAFVFYNMGFVRRSTATASTLAAAAIFMLGGVPGTLHHLYFSGSTSASMAIGACFSALEVVPLVLLGREAYEHWSYQHLSDWAKRLRWPLMCFVAVAFWNMIGAGVFGFLINPPISLFYIQGLNTSAVHAHAALFGVYGFLALGFVLLVARYLKPNAQFDDKLMTWGFWLLNGGLVGMIAISLLPVGVIQAYASITHGLWYARSEECLQMEILDTLRWVRTAADLVFIGGAICVAIQATKIVFGRDK

SEQ ID NO: 21166 - protein, 444 aa, Neisseria meningitidis
VGEPENKSSEPVREIQASKEMPSETSSPRKENETEVHIPAAPFIVKQSGSNALAVCALVLAALGLGTSGFLFVQGQNVLKNQELAFNQKIDKAALGESENAALLKDNLNRQAAIQSELDRLDGNVKANGEQILEMQKSYRELTKGRADWLVDETETILNLAAQQLVLTGNIQTAVGVLEHIDSRLSRFNQAELLPIKQAVSSDLAELKNRPYVDISGTALRLDRLETAVSGLPLMLDGVLKPGVQARNEAVSASWWQNVWEKSLGTLKGLVEIRRLENNDSMLISPEQAYFVRENLRLRLLDARTALMQRNSEVYQGDLNNAEAAVRQYFDAKSPATQSWLKELAELKALDVRMTADDGLKNSLNAVRAYRDGTRMTAAENQEAEQAASEPANENTASEPAAASDVKTIEAPSLPSERKPEQPAKKQTVPEKAGRSPSAKGERA

SEQ ID NO: 21167 - protein, 275 aa, Neisseria meningitidis; identical to SEQ ID NO: 2739

SEQ ID NO: 21168 - protein, 106 aa, Neisseria meningitidis; identical to SEQ ID NO: 2449

SEQ ID NO: 21169 - protein, 122 aa, Neisseria meningitidis; identical to SEQ ID NO: 3754

SEQ ID NO: 21170 - protein, 161 aa, Neisseria meningitidis; identical to SEQ ID NO: 9758

SEQ ID NO: 21171 - protein, 192 aa, Neisseria meningitidis; identical to SEQ ID NO: 746

SEQ ID NO: 21172 - protein, 113 aa, Neisseria meningitidis; identical to SEQ ID NO: 3580

SEQ ID NO: 21173 - protein, 464 aa, Neisseria meningitidis
LIQSAAQLYRQRIFSSFNIYISVGLQGDTMKPVNIGLLGLGTVGGGTAAVLRDNAEEISRRLGREVRISAVCDLSEEKARQICPSAAFVKDPFELVARKDVDVVVELFGGTGIAKDAVLKAIENGKHIVTANKKLLAEYGNEIFPLAEEKNVMVQFEAAVAGGIPIIKALREGLAANRIKSIAGIINGTSNFILSEMREKGSAFADVLKEAQALGYAEADPTFDIEGHDAGHKITIMSALAFGTPMNFSACYLEGISKLDSRDIKYAEELGYRIKLLGITRKTGKGIELRVHPTLIPESRLLANVNGVMNAVRVNADMVGETLYYGAGAGALPTASAVVADIIDIARLVEADTAHRVPHLAFQPAQVQAQTILPMDEITSSYYLRVQAKDEPGTLGQIAALLAQENVSIEALIQKGVIDQTTAEIVILTHSTVEKHIKSAIAAIEALDCVEKPITMIRMESLHD

SEQ ID NO: 21174 - protein, 160 aa, Neisseria meningitidis; identical to SEQ ID NO: 515

SEQ ID NO: 21175 - protein, 193 aa, Neisseria meningitidis; identical to SEQ ID NO: 1322

SEQ ID NO: 21176 - protein, 92 aa, Neisseria meningitidis; identical to SEQ ID NO: 419

SEQ ID NO: 21177 - protein, 118 aa, Neisseria meningitidis; identical to SEQ ID NO: 680

SEQ ID NO: 21178 - protein, 309 aa, Neisseria meningitidis; identical to SEQ ID NO: 11185

SEQ ID NO: 21179 - protein, 144 aa, Neisseria meningitidis; identical to SEQ ID NO: 8878

SEQ ID NO: 21180 - protein, 419 aa, Neisseria meningitidis; identical to SEQ ID NO: 2185

SEQ ID NO: 21181 - protein, 482 aa, Neisseria meningitidis; identical to SEQ ID NO: 9935

SEQ ID NO: 21182 - protein, 520 aa, Neisseria meningitidis; identical to SEQ ID NO: 2831

SEQ ID NO: 21183 - protein, 436 aa, Neisseria meningitidis
MYAKKGGLGLVKSRRFAPLFATQFLGAFNDNVFKTALFVMIGFYGLGQNGFLPAGQMLNLGALLFILPYFLFSSLSGQLGNKFDKAVLARWVKVLEMIIMAVAAYGFYIRSAPLLLACLFCMGAQSTLFGPLKYAILPDYLDDKELMMGNSLIESGTFVAILFGQILGTAVAGVPPYIVGILVLLVAVGGTVGSLFMPSVPAKAADTQIEWNIVRGTKSLLSETVRHKPVFTAIIGISWFWFVGAVYTTQLPTFTQIHLGGNDNVFNLMLALFSIGIAAGSVLCAKFSRERLMLAWVTVGALGLTVCGLVLVWLTHGHRFEGLNGIFWFLSQGWAYPVMAVMTLIGFFGGFFSVPLYTWLQTASSETFRARAVAANNIVNGIFMVSAAVLSAVLLFLFDSISLLYLIVALGNIPLSVFLIKRERRFLGAAAIRKKP

SEQ ID NO: 21184 - protein, 97 aa, Neisseria meningitidis; identical to SEQ ID NO: 8257

SEQ ID NO: 21185 - protein, 316 aa, Neisseria meningitidis; identical to SEQ ID NO: 3819

SEQ ID NO: 21186 - protein, 409 aa, Neisseria meningitidis; identical to SEQ ID NO: 4088

SEQ ID NO: 21187 - protein, 304 aa, Neisseria meningitidis; identical to SEQ ID NO: 9759

SEQ ID NO: 21188 - protein, 70 aa, Neisseria meningitidis
LEICGIRRKRKPVMYLTVVFFTSVRLLTSKRRAKKGFGSAFYRIFFYLSIWYWYFFISTRRGLRRNNAAG

SEQ ID NO: 21189 - protein, 296 aa, Neisseria meningitidis; identical to SEQ ID NO: 11189

SEQ ID NO: 21190 - protein, 127 aa, Neisseria meningitidis; identical to SEQ ID NO: 2622

SEQ ID NO: 21191 - protein, 427 aa, Neisseria meningitidis; identical to SEQ ID NO: 8285

SEQ ID NO: 21192 - protein, 90 aa, Neisseria meningitidis; identical to SEQ ID NO: 1115

SEQ ID NO: 21193 - protein, 265 aa, Neisseria meningitidis; identical to SEQ ID NO: 6655

SEQ ID NO: 21194 - protein, 1010 aa, Neisseria meningitidis; identical to SEQ ID NO: 8450

SEQ ID NO: 21195 - protein, 99 aa, Neisseria meningitidis; identical to SEQ ID NO: 2699

SEQ ID NO: 21196 - protein, 914 aa, Neisseria meningitidis; identical to SEQ ID NO: 9423

SEQ ID NO: 21197 - protein, 305 aa, Neisseria meningitidis; identical to SEQ ID NO: 5961

SEQ ID NO: 21198 - protein, 176 aa, Neisseria meningitidis; identical to SEQ ID NO: 8570

SEQ ID NO: 21199 - protein, 311 aa, Neisseria meningitidis; identical to SEQ ID NO: 13934

SEQ ID NO: 21200 - protein, 490 aa, Neisseria meningitidis; identical to SEQ ID NO: 7973

SEQ ID NO: 21201 - protein, 178 aa, Neisseria meningitidis; identical to SEQ ID NO: 8294

SEQ ID NO: 21202 - protein, 355 aa, Neisseria meningitidis; identical to SEQ ID NO: 1236

SEQ ID NO: 21203 - protein, 424 aa, Neisseria meningitidis; identical to SEQ ID NO: 8842

SEQ ID NO: 21204 - protein, 2026 aa, Neisseria meningitidis
MNKGLHRIIFSKKHSTMVAVAETANSQGKGKQAGSSVSVSLKTSGDLCGKLKTTLKTLVCSLVSLSMVLPAHAQITTDKSAPKNQQVVILKTNTGAPLVNIQTPNGRGLSHNRYTQFDVDAKGAVLNNDRNNNPFLAKGSAQLILNEVRGAASKLNGIVTVGGQKADVIIANPNGITVNGGGFKNVGRGILTTGAPQIGKDGALTGFDVRQGTLTVGAAGWNDKGGADYTGVLARAVALQGKLQGKNLAVSTGPQKVDYASGEISAGTAAGTKPTIALDTTALGGMYADSITLIANEKGVGVKNAGTLEAAKQLIVTSSGRIENSGRIATTADGTEASPTYLSIETTEKGAAGTFISNGGRIESKGLLVIETGEDISLRNGAVVQNNGSRPATTVLNAGHNLVIESKTNVNNAKGSANLSAGGRTTINDATIQAGSSVYSSTKGDTELGENTRIIAENVTVLSNGSIGSAAVIEAKDTAHIESGKPLSLETSTVASNIRLNNGNIKGGKQVVLMADGDIQAKASNLNASGNLYIHAGKDLDLNADKDLSTQSISLRADNTALISSNGNTLTAEKNLDIQAGSLSVRQSNLQSSGGNVQMSATKGNISLNQSWINASQNIDTAALQGNIISDGLTAVAEVGRVSLLANGNVDFNGLNTLIAEGDINAGSVGKGRLKMDNTDIYASAGDVKLVAGGQLDLGNGTVNGGHISLDSNKGSMVVQDVHLNARASLKVDADQTLTINNSKLNSGHNTQINTNHGHMTLNQLDAHSRRHMSISAQGKGKGKDSGQILQNDQQNSKSTLAADGVLSLNSSALQVLDNTTLRGGAINIKAGGGIIKRGYIDWETQDTATMRSAELKPLSGMMSIESGGDNPLTVEPGNRIVSAGDLAVNHNGTFQISARAGNNGNPSAQTASVSAKGNIGIVAGEVDIDAANIAAGKDLALVATKGNISLNSIRNTFSNYQLKTDKHNITQQLTDVEQELSKLTSDPKYRKAQDLPQMLRRKYKRRDKVFGDSEARLRGLRAEINAADEAWAELQSPVKALLERKQLLQQALLTVSQPGSGHENQGSTLSGQNIKLLAAGGIRIQGSKVAATQQANIQAAGFLPAPAAEELQEGRLQSAIDISGVFDTFEYGQQGSDKYGYAIFSRPSEISGKTGVTLSAPNANENSRISLSAANIEAENGKIKLQSYGDQSYYAGQGELYTLERRSYKTGKWYNRKHITEVKEHKNAKPDAVNLSASQGIDIKSGGNIDAYATAFDAPKGSINIEAGRKLTLYAVEELNYDKLDSQKRRRFLGISYSKAHDTTTQVMKTALPSRVVAESANLQSGWDTKLQGTQFETTLGGATIRAGVGEQARADAKIILEGIKSSIHTETVSSSKSTLWQKQAGRGSNIETLQLPSFTGPVAPVLSAPGGYIVDIPKGNLKTEIEKLSKQPEYAYLKQLQTAKNVDWKQVQLAYDKWDYKQEGLTGAGAAIVVIIVTALTYGYGAAAAGSVTAAGSSTAAAATTTAAATTTVSTAAAMQTAALASLYSQAAVAIINNKGDVGKALKDLGTSDTVKQIVTSALTAGALNQMGADIAQLNSKVRTELFSSTGNQTIANLGGRLATNLSNAGISAGINTAVNGGSLKDNLGNAALGALVNSFQGEAASKIKTTFSDDYVAKQFAHALAGCVSGLVQGKCKDGAIGAAVGEIVAESILGGRNPATLSDAEKHKVISYSKIIAGSVAALNGGDVNTAANAAEVAVVNNALNFDSTPTNAKKHQPQKPDKTALEKIIQSIMPAHAAGAMTNPQDKDAAIWISNIRNGITGPIVITSYGVYAAGWTAPLIGTAGKAAISTCMANPSGCTVMVTQAAEAGAGIATGAVTVGNAWEAPVGALSKAKAAKQAIPTQTVKELDGLLQESKNIGAVNTRINIANSTTRYTPMRQTGQPVSAGFEHVLEGHFHRPIANNRSVFTISPNELKVILQSNKVVSSPVSMTPDGQYMRTVDVGKVIGTTSIKEGGQPTTTIKVFTDKSGNLITTYPVKGN

SEQ ID NO: 21205 - protein, 566 aa, Neisseria meningitidis
MSVKIQTRSINTDVFNHLLTAGADPLIARLCASRGVQSPAELDDKLAALLPYQTLTNCEAAAGRLADAVGRKEKILIVADYDADGATACAVGLDGLAAMGAKVDFLVPNRFEHGYGLTPELAEIAAAQGVDLLITVDNGIASIAGVARAQALGLDVIVTDHHLPADTVPDCIIVNPNQKGCGFQSKSLAGVGVIFYVLTALRAELRRRNYFSDGLKEPNLGDLLDLVALGTVADVVPLDHNNRILVSQGLKRMRSGKMRPGIRALFEVARRDWRKAQPFDMGFALGPRINAAGRLDDMSVGIACLLARDDSEAQELAAQLNNLNIERREIEQSMLQDALNAFPETLPSGQTTLVAYRDDFHQGVVGIVASRLKDRFYRPTIVFAPADNGEVRGSGRSIPNLHLRDALDLVSKRHPDLILKFGGHAMAAGLSILEHNIPAFQTTFEEAVREMVCEDDLSQTFITDGSLPACDITLEQAQNLARHVWGQGFAPPSFTDEFHVVRQQPLGAEGKHKKVWLQKDGCEFEAMFWRCSEDIPEYIRTVYRPVANEWRNNLELQLYIDYWEAV

SEQ ID NO: 21206 - protein, 81 aa, Neisseria meningitidis; identical to SEQ ID NO: 2565

SEQ ID NO: 21207 - protein, 406 aa, Neisseria meningitidis
LIGFIYIVLKIFGIGIMATHGDEVKIQNRQEADSAKAKRKRRLTALTLLFALAAAAAGSAFFLWWQHEEETEDAYVAGRVVQVTPQKGGTVRKVLHDDTDAVKKGDVLAVLDDDNDVLAYERAKNELIQAVRQNRRQNAATSQAGAQVALRRADLARAQDDLRRRSALAESGAVSAEELAHARAAVSQAQAAVKAALAEESSARAALGGQVSLREQPAVQTAIGRLKDAWLNLQRTQIRAPADGQVAKRSVQVGQQVAAGAPLMAVVPLSDVWVDANFKETQLRHMKIGQPAELVSDLYGKQIVYRGRVAGFSAGTGSAFSLIPAQNATGNWIKVVQRVPVRIVLNREDVDRHPLRIGLSMTVKVDTSAAGAPVSKTPGAALPEMESTDWSEVDRTVDEILGQSAP

SEQ ID NO: 21208 - protein, 101 aa, Neisseria meningitidis
LITGTPGSGKTLKMVSMMANDEMFKPDENGIRRKVFTNIKGLKIPHTYIETDAKKLPKSTDEQLSAHDMYEWIKKPENIGSIVIVDEAQDVWPARSAVQNP

SEQ ID NO: 21209 - protein, 41 aa, Neisseria meningitidis; identical to SEQ ID NO: 6310

SEQ ID NO: 21210 - protein, 1080 aa, Neisseria meningitidis
MQNMKNQVRGSGMDARSNPANVSDGLQNSSSHIGTNTRYRLTKLGEQMARLPIDPKIARILLAAKKHDCMAEILVIASALSIQDPRERPLEARDAASKAHERFTDKQSDFLAYLNIWDSFQRERDKGLSNKQLVQWCRQYFLSHLRMREWRELHHQLAQTAIEMGLTTKEAAFRRSPEVRQLTSSENAGDQDLSAKLKQKQLDKKQHRAQIRAAKEAGYEQIHRALLTGLIANVGMKSPDGNDYTSTRGSRFHLFPASALFKAKPKWVMAAELVETTKLYARDVAAIQPEWIEQEAPHLVRYHYFEPHWEQKRGEVIASERVTLYGLTVLPRRPVSYGRIAPEEAREIFIRGALVAQECDLKADFFVHNKKLIKEITELEHKSRKQDVLVDDEALFAFYNERLPEMAWKDAQGSVWGSEDSVRIIESDKAERSSENERNEFRKNKRNGSRQNENHGNTVGWVENPTSAATAKTVGFDNPTYATQQPTPSPEREGRGEGKTVAAQTNFSATAANPLPQEREQSASASTFSDDLRPANLQQTAPSPVGEGWGESKTVATQTNFSATSTLSDDPKPKKQPAPQKGRLKPLPLADIRTFQAWLKTAECDNPRLLFLSRDDLMQHAAAHITEEQFPKFWQTADGKFKLSYRFEPHHPLDGVTMTVPLTVLNRLHAPSLEWLVPGMLREKIQLLIKALPKQIRRICVPVPDFITQFLSQNPDRNAPILPQLAQAIAKTAGDIRILEQINQDEWAAFRLPEHCYFNLRIIDDGGQELAGGRKLHELQQQLGQAAAVTFRDNTQEFERDNVTTWDIGTLPESIKFARGKQQLTGYLGLQKEKDGRIALRLCDTTEAAEQAHRQGVIELMKLQLKEQVKDLNKGIQGFTQAAMLLKHINADTLCDDLTQAVCDRAFIGEDELPRNEKAFKEQIKRARSRLPAVKEALSRYLQETAAAYAELNSKLGKHPLTHLLRQRLQTLLAAGFATRTPWAQWPRLPIYLKAMTLRLEKYSSNPARDAAREADIQELEQMWQEKTDSLIKQGLPISDGLAAFKWMIEELRVSLFAQELKTPYPVSVKRLLKMWEDLN

SEQ ID NO: 21211 - protein, 176 aa, Neisseria meningitidis
MKFVSDLLSVILFFATYTVTKNMIAATAVALVAGVVQAAFLYWKYKKLDTMQWVGLVLIVIFGGATIVLGDSRFIMWKPSVLFWLGALFLWGSHLAGKNGLKASIGREIQLPDAVWAKLTYMWVGFLIFMGIANWFVFTRFESQWVNYKMFGSTALMLVFFIIQGIYLSTCLKKED

SEQ ID NO: 21212 - protein, 96 aa, Neisseria meningitidis; identical to SEQ ID NO: 7969

SEQ ID NO: 21213 - protein, 185 aa, Neisseria meningitidis; identical to SEQ ID NO: 8215

SEQ ID NO: 21214 - protein, 318 aa, Neisseria meningitidis; identical to SEQ ID NO: 9251

SEQ ID NO: 21215 - protein, 292 aa, Neisseria meningitidis; identical to SEQ ID NO: 3715

SEQ ID NO: 21216 - protein, 107 aa, Neisseria meningitidis; identical to SEQ ID NO: 150

SEQ ID NO: 21217 - protein, 187 aa, Neisseria meningitidis; identical to SEQ ID NO: 2456

SEQ ID NO: 21218 - protein, 228 aa, Neisseria meningitidis; identical to SEQ ID NO: 8057

SEQ ID NO: 21219 - protein, 1082 aa, Neisseria meningitidis
LKCCQCGQANMNNETKIYITAETGGVVSGVEKAKQSIKSLGDVASSQGRRISDGLVHSGDGAEKSSTVVSAASKRTERSLASLENAIRRDIAVKIAGGKANREYYEELARQRGIDIARLNPLLSQLDRHNTQTNRATQSVKQFNNALRQTPAQITDIVTQLAGGQSPFLIMIQQGGQLRDMYGGFGGMLKGLATVISPMRLAVAGLGGGIAALGYAMYQGAEESCEYRKALILAGDAAGITADRMQEIAVSVGAATGGYADARAAITALVSSGKVATDNYEQFARSITLQSQATGQSIDDLVEKYTEIAKDPLKAVVSLSATYRTMTADVYQQVKALQAQGREQDAVALVQRKFSEESEDMAKRVLGNLGLIERAWKDIKESASEAWDAVKSIGRDKTKLDEIAALDSFISQIETSKKHPVTQLFWGEEGERKLQEAYARRARLRAEIDKEAAAAETLRQKQKQNQNRTEGIAELEAVSERYATREQQRQRELLKNDKARKKALDGITDAKKRQEIINKHAANAKLINESFAEKKHERQKEKTDKTSYPTVSNGLRIKPGAEAGGKALGGTYAFAHAMQQMLGDRLFRFGAFRDRYHIGKNSLHNSGLAFDATPSPGMGMKQKQEVVAQMTRYLESLGFKNGQDFNLKLELAGQRNKNGTVATGDHWHFNWRSREAAARFAGGVEGQVKNMAHLGLFKGVEKEPLSGYEKWHEDFNRRAAEAGAKRVLEILNGNRAIGEQLKLLSDPTFGDWTLKQQADARELAEKADAQDSLTAASKKYSDIVKQMTDDSKEKLDDRLFEISLIGKTREEIEKLTLARLWDRQIAKAREEGAPLESIDLLERGKAEGMSNLSQMQKARADSDNDWRGGIESGLKSYIDSFGTMRQAMENATVQTFDKMGDALADFVATGKLDFRSLTVSILQDLSKMLIKMAIVNAMKSALGYADGGIVGGGSTQFDALFSGGGYTGYGGKYEPAGIVHKGEVVFSQRDVRNHGGVAAVERLRLNGYAGGGAVGLPSVLTGVRSAGAGSMQVNITINRDGSTESDSSADTEMAKHLAAAIPGMVEQWYVKNVYRENGTYHK

SEQ ID NO: 21220 - protein, 462 aa, Neisseria meningitidis; identical to SEQ ID NO: 8923

SEQ ID NO: 21221 - protein, 444 aa, Neisseria meningitidis; identical to SEQ ID NO: 2522

SEQ ID NO: 21222 - protein, 265 aa, Neisseria meningitidis
MLKQRVITAMWLLPLMLGMLFYAPQWLWAAFCGLIALIALWEYARMSGLCKIKTNHYLAATLVFGVVAYAGGWMLPNLVWYVVLAFWLAIMPLWLRFKWRLNGGWQVYAVGWLLVMPFWFALVSLRPHPDDALPLLAVMGLVWVADVCAYFSGKAFGKHKIAPAISPGKSWEGAIGGAVCVAVYMTSVRSAGWLAFDTGWFDTVLIGLVLTVVSVCGDLLESWLKRAAGIKDSSKLLPGHGGVFDRTDSLIAVISVYAAMMSVLN

SEQ ID NO: 21223 - protein, 99 aa, Neisseria meningitidis; identical to SEQ ID NO: 7449

SEQ ID NO: 21224 - protein, 509 aa, Neisseria meningitidis
MQNIFITFSGKTMLSGLPIPKDIARPPETILVNITPQETRVAVLEENNICELHIERNSEHSLVGNIYLGVVRRVLPGMQSAFIDIDLERAAFLHIVDVLEQRRNPEETQRIEHMLFEGQSVLVQVIKDPINTKGARLSTQISLAGRFLVHLPQEDHIGVSQRIEDDAERSSLRERLDKLLPENACRGYIIRTNAENATDEQLQSDIDYLTKVWEHIQEQAKIRPPETLLYQDLPLSLRVLRDMVGCDTQKILVDSTVNHGRMTRFAEQYVHGALGRIELFKGERPLFETHNVEQEISRALQPRVNLNFGSYLIIESTEAMTTIDVNTGGFVGARNFDETIFRTNLEACHTIARELRLRNLGGIIIIDFIDMAQESHREAVLQELAKALAFDRTRVTLHGFTSLGLVELTRKRSRENLNQVLCEPCPSCQGRGRLKTPQTVCYEIQREIVREARRYDAESFRILAAPNVIDLFLDEESQSLAMLIDFIGKPISLAVETAYTQEQYDIVLM

SEQ ID NO: 21225 - protein, 461 aa, Neisseria meningitidis; identical to SEQ ID NO: 8177

SEQ ID NO: 21226 - protein, 95 aa, Neisseria meningitidis; identical to SEQ ID NO: 14433

SEQ ID NO: 21227 - protein, 92 aa, Neisseria meningitidis; identical to SEQ ID NO: 32

SEQ ID NO: 21228 - protein, 706 aa, Neisseria meningitidis; identical to SEQ ID NO: 9505

SEQ ID NO: 21229 - protein, 410 aa, Neisseria meningitidis; identical to SEQ ID NO: 257

SEQ ID NO: 21230 - protein, 245 aa, Neisseria meningitidis
MLSARYLHLHEALGLGPMWLKQAAAVLPPKNTPATPAQARPQTVRAAPIRPSQPHNGQARLETMKALETAAVPTRKPAPETETPPPGLSDGIAPVPAASGITKLAVVSLCPPIEDAVYGQLFYGKAGVLLDNILKAVGLDAAYVHKTCWVKTAAVGNPMPSEAAIETATVSVMQELDGCRAPAVLFLGQAFVQPERQTMIETLCGSRPFFIIDHPARLLRQPELKARAWQVLKQLKRALRQGGGS

SEQ ID NO: 21231 - protein, 478 aa, Neisseria meningitidis; identical to SEQ ID NO: 8016

SEQ ID NO: 21232 - protein, 426 aa, Neisseria meningitidis
LVKVGDGVHTLLLDRPIVRDGRKFDAPLLWMVVLMTAFSLLMIYSASVYLASKEGGDQFFYLTRQAGFVVAGLIASGFLWFLCRMRTWRRLVPWIFALSGLLLVVVLIAGREINGATRWIPLGPLNFQPTELFKLAVILYLASLFTRREEVLRSMESLGWQSIWRGTANLIMSATNPQARRETLEMYGRFRAIILPIMLVAFGLVLIMVQPDFGSFVVITVIAVGMLFLAGLPWKYFFVLVGSVLGGMVLMITAAPYRVQRVVAFLDPWKDPQGAGYQLTHSLMAIGRGEWFGMGLGASLSKRGFLPEAHTDFIFAIIAEEFGFFGMCVLIFCYGWLVVRAFSIGKQSRDLGLTFNAYIASGIGIWIGIQSFFNIGVNIGALPTKGLTLPLMSYGGSSVFFMLISMMLLLRIDYENRRKMRGYRVE

SEQ ID NO: 21233 - protein, 169 aa, Neisseria meningitidis; identical to SEQ ID NO: 219

SEQ ID NO: 21234 - protein, 823 aa, Neisseria meningitidis; identical to SEQ ID NO: 9407

SEQ ID NO: 21235 - protein, 147 aa, Neisseria meningitidis; identical to SEQ ID NO: 11481

SEQ ID NO: 21236 - protein, 470 aa, Neisseria meningitidis; identical to SEQ ID NO: 2364

SEQ ID NO: 21237 - protein, 657 aa, Neisseria meningitidis; identical to SEQ ID NO: 8874

SEQ ID NO: 21238 - protein, 334 aa, Neisseria meningitidis; identical to SEQ ID NO: 8259

SEQ ID NO: 21239 - protein, 703 aa, Neisseria meningitidis; identical to SEQ ID NO: 8764

SEQ ID NO: 21240 - protein, 213 aa, Neisseria meningitidis; identical to SEQ ID NO: 6185

SEQ ID NO: 21241 - protein, 214 aa, Neisseria meningitidis; identical to SEQ ID NO: 3176

SEQ ID NO: 21242 - protein, 391 aa, Neisseria meningitidis; identical to SEQ ID NO: 2276

SEQ ID NO: 21243 - protein, 652 aa, Neisseria meningitidis
MSERRQPHIYAIIHPDQTTDSGCRCSSRPTDMIEKLTFGLFKKEDARSFMRLMAYVRPYKIRIVAALIAIFGVAATESYLAAFIAPLINHGFSAPAAPPELSAAAGIISTLQNWREQFTYMVWGTENKIWTVPLFLIILVVIRGICRFTSTYLMTWVSVMTISKIRKDMFAKMLTLSSRYHQETPSGTVLMNMLNLTEQSVSNASDIFTVLTRDTMIVTGLTIVLLYLNWQLSLIVVLMFPLLSLLSRYYRDRLKHVISDSQKSIGTMNNVIAETHQGHRVVKLFNGQAQAANRFDAINRTIVRLSKKITQATAAHSPFSELIASIALAVVIFIALWQSQNGYTTIGEFMAFIVAMLQMYAPIKSLANISIPMQTMFLAADGVCAFLDTPPEQDKGTLAPQRVEGRISFRNVDVEYRSDGIKALDGFNLDIRQGERVALVGRSGSGKSTVVNLLPRFVEPSAGNICIDGIDIADIKLDCLRAQFALVSQDVFLFDDTLFENVRYSRPDAGEAEVLSALQAANLQSLIDASPLGLHQPIGSNGSNLSGGQRQRVAIARAILKDAPILLLDEATSALDNESERLVQQALERLMENRTGIIVAHRLTTIEGADRIIVMDDGKIIEQGTHEQLMSQNGYYTMLRNISNKDAAVRTA

SEQ ID NO: 21244 - protein, 451 aa, Neisseria meningitidis; identical to SEQ ID NO: 8048

SEQ ID NO: 21245 - protein, 217 aa, Neisseria meningitidis; identical to SEQ ID NO: 8188

SEQ ID NO: 21246 - protein, 240 aa, Neisseria meningitidis; identical to SEQ ID NO: 11697

SEQ ID NO: 21247 - protein, 594 aa, Neisseria meningitidis; identical to SEQ ID NO: 9182

SEQ ID NO: 21248 - protein, 119 aa, Neisseria meningitidis; identical to SEQ ID NO: 7953

SEQ ID NO: 21249 - protein, 76 aa, Neisseria meningitidis; identical to SEQ ID NO: 286

SEQ ID NO: 21250 - protein, 812 aa, Neisseria meningitidis; identical to SEQ ID NO: 8626

SEQ ID NO: 21251 - protein, 592 aa, Neisseria meningitidis; identical to SEQ ID NO: 9091

SEQ ID NO: 21252 - protein, 351 aa, Neisseria meningitidis; identical to SEQ ID NO: 10447

SEQ ID NO: 21253 - protein, 319 aa, Neisseria meningitidis; identical to SEQ ID NO: 3269

SEQ ID NO: 21254 - protein, 79 aa, Neisseria meningitidis; identical to SEQ ID NO: 831

SEQ ID NO: 21255 - protein, 83 aa, Neisseria meningitidis; identical to SEQ ID NO: 5347

SEQ ID NO: 21256 - protein, 672 aa, Neisseria meningitidis
MNKSLSGSVEEYRELTLRGMILGALITVIFTASNVYLGLKVGLTFASSIPAAVISMAVLKFFKGSNILENNMVQTQASAAGTLSTIIFVLPGLLMAGYWSGFPFWQTTLLCIAGGILGVIFTIPLRYAMVVKSDLPYPEGVAAAEILKVGGHEEGDNRQGGSGIKELAAGGALAGLMSFCAGGLRVIADSASYWFKSGTAIFQLPMGFSLALLGAGYLVGLTGGIAILLGISIAWGIAVPYFSSHIPQPSDMEMAAFAMKLWKEKVRFIGAGTIGIAAVWTLLMLLKPMVEGMKMSFKSFGGGAPATERAEQDLSPKAMIFWVLSMMFVLGVSFYHFIGDSHITGGMAWLLVVVCTLLASVIGFLVAAACGYMAGLVGSSSSPISGVGIVSVVVISLVLLLVGESGGLLADEANRKFLLALTLFCGSAVICVASISNDNLQDLKTGYLLKATPWRQQVALIIGCIVGALVISPVLELLYEAYGFTGAMPREGMDAAQALAAPQATLMTTIASGIFAHNLEWVYIFTGIVIGAVLIVVDLVLKKSSGGKLALPVLAVGMGIYLPPSVNMPIVAGAVLAAVLKHIIGKKAENREGRLKNAERIGTLFSAGLIVGESLIGVIMAFIIAFSVTNGGSDAPLALNLQNWDAAASWLGLAFFVTGMFFFAQRVLKAGK

SEQ ID NO: 21257 - protein, 331 aa, Neisseria meningitidis; identical to SEQ ID NO: 2336

SEQ ID NO: 21258 - protein, 371 aa, Neisseria meningitidis; identical to SEQ ID NO: 3159

SEQ ID NO: 21259 - protein, 469 aa, Neisseria meningitidis; identical to SEQ ID NO: 11523

SEQ ID NO: 21260 - protein, 436 aa, Neisseria meningitidis
MPSESKPVSRIVTDSRDIRAGDVFFALAGGRFDAHDFVEDVLAAGAAAVVVSREDCAAMDGALKVDDTLAALQTLAKAWRENVNPFVFGITGSGGKTTVKEMLAAVLRRRFGDDAVLATAGNFNNHIGLPLTLLKLNEKHRYAVIEMGMNHFGELAVLTQIAKPNAALVNNAMRAHVGCGFDGVGDIAKAKSEIYQGLCSDGIALIPQEDANMAVFKTATLNLNTRTFGIDSGDVHAENIVLKPLSCEFDLVCGDERAAVVLPVPGRHNVHNAAAAAALALAAGLSLNDVAEGLKGFSNIKGRLNVKSGIKGATLIDDTYNANPDSMKAAIDVLARMPAPRIFVMGDMGELGEDEAAAMHAEVGAYACDQGIEAAYFVGDNSVEAAEKFGADGLWFAAKDPLIQVLRHDLPERATVLVKGSRFMQMEEVVEALEDK

SEQ ID NO: 21261 - protein, 153 aa, Neisseria meningitidis; identical to SEQ ID NO: 5052

SEQ ID NO: 21262 - protein, 256 aa, Neisseria meningitidis; identical to SEQ ID NO: 975

SEQ ID NO: 21263 - protein, 77 aa, Neisseria meningitidis; identical to SEQ ID NO: 13021

SEQ ID NO: 21264 - protein, 289 aa, Neisseria meningitidis; identical to SEQ ID NO: 8203

SEQ ID NO: 21265 - protein, 179 aa, Neisseria meningitidis; identical to SEQ ID NO: 8483

SEQ ID NO: 21266 - protein, 61 aa, Neisseria meningitidis; identical to SEQ ID NO: 965

SEQ ID NO: 21267 - protein, 201 aa, Neisseria meningitidis; identical to SEQ ID NO: 291

SEQ ID NO: 21268 - protein, 274 aa, Neisseria meningitidis; identical to SEQ ID NO: 5218

SEQ ID NO: 21269 - protein, 204 aa, Neisseria meningitidis; identical to SEQ ID NO: 15732

SEQ ID NO: 21270 - protein, 426 aa, Neisseria meningitidis; identical to SEQ ID NO: 8666

SEQ ID NO: 21271 - protein, 197 aa, Neisseria meningitidis; identical to SEQ ID NO: 2035

SEQ ID NO: 21272 - protein, 61 aa, Neisseria meningitidis; identical to SEQ ID NO: 2615

SEQ ID NO: 21273 - protein, 333 aa, Neisseria meningitidis; identical to SEQ ID NO: 465

SEQ ID NO: 21274 - protein, 277 aa, Neisseria meningitidis; identical to SEQ ID NO: 3602

SEQ ID NO: 21275 - protein, 266 aa, Neisseria meningitidis; identical to SEQ ID NO: 2607

SEQ ID NO: 21276 - protein, 131 aa, Neisseria meningitidis; identical to SEQ ID NO: 7977

SEQ ID NO: 21277 - protein, 472 aa, Neisseria meningitidis; identical to SEQ ID NO: 8248

SEQ ID NO: 21278 - protein, 105 aa, Neisseria meningitidis; identical to SEQ ID NO: 2941

SEQ ID NO: 21279 - protein, 433 aa, Neisseria meningitidis; identical to SEQ ID NO: 8831

SEQ ID NO: 21280 - protein, 228 aa, Neisseria meningitidis; identical to SEQ ID NO: 9592

SEQ ID NO: 21281 - protein, 291 aa, Neisseria meningitidis; identical to SEQ ID NO: 9462

SEQ ID NO: 21282 - protein, 558 aa, Neisseria meningitidis; identical to SEQ ID NO: 8233

SEQ ID NO: 21283 - protein, 766 aa, Neisseria meningitidis; identical to SEQ ID NO: 8604

SEQ ID NO: 21284 - protein, 125 aa, Neisseria meningitidis; identical to SEQ ID NO: 1050

SEQ ID NO: 21285 - protein, 604 aa, Neisseria meningitidis; identical to SEQ ID NO: 8373

SEQ ID NO: 21286 - protein, 368 aa, Neisseria meningitidis; identical to SEQ ID NO: 5075

SEQ ID NO: 21287 - protein, 671 aa, Neisseria meningitidis; identical to SEQ ID NO: 3253

SEQ ID NO: 21288 - protein, 674 aa, Neisseria meningitidis
MNDMTLYLIIALVPLAGSLIAGLFGNKIGRAGAHTVTILGVAVSAVLSAYVLWGFIDGSRAKFDENVYTWLTMGGLDFSVGFLVDTMTAMMMVVVTGVSLMVHIYTIGYMHDEKIGYQRFFSYISLFTFSMLMLIMSNNFIQLFFGWEAVGLVSYLLIGFYFKRPSATFANLKAFLINRVGDFGFLLGIGLVLAYFGGSLRYQDVFAYLPNVQTATIQLFPSVEWSLITVTCLLLFVGAMGKSAQFPLHVWLPDSMEGPTPISALIHAATMVTAGLFMVSRMSPIYEMSSTALSVIMMIGAITALFMGFLGVIQNDIKRVVAYSTLSQLGYMTVALGASAYSVAMFHVMTHAFFKALLFLAAGSAIIGMHHDQDMRHMGNLKKYMPVTWLTMLIGNLSLIGTPFFSGFYSKDSIIEAAKYSTLPGSGFAYFAVLASVFVTAFYAFRQYFMVFHGEEKWRSLPEHHDDHHGEEHHGLGKNDNPHESPLVVTLPLILLAIPSVIIGYVAIEPMLYGDFFKDVIFVNTDAHPTMHIMKEEFHGALAMVSHSLHSPVLYLAIAGVLSAWLLYVKLPHLPAKIAQAFRPIYVLFESKYYLDALYFNVFAKGTRALGTFFWKVGDTAIIDNGIVNGSAKLVGVIAAQVRKAQTGFIYTYAAAMVFGVLVLLGMTFWGLFR

SEQ ID NO: 21289 - protein, 498 aa, Neisseria meningitidis
MFSNYLLSLAIWIPIAAGVLVLATGKDSRAPLARVLAFMGALAGFLVTLPLFTGFDRLSGGYQFTEFHEWIPLLKINYALGVDGISVLFIILNAFITLLVVLAGWEVIQKRPAQYMAAFLMMSGLINGAFAAQDAILFYVFFEGMLIPLYLIIGVWGGPRRVYASVKLFLYTLMGSLLMLVAMVYLYYQTGSFSIVDFQNIKQIPLGVQQLLFAAFFLSFAVKVPMFPVHTWLPDAHVEAPTGGSMVLAAITLKLGAYGFLRFILPIMPDAARYFAPVIIVLSLIAVIYIGMVALVQTDMKKLVAYSSISHMGFVTLGMFLFVDGQLDDWALKGAVIQMISHGFVSAAMFMCIGVMYDRLHTRNIADYGGVVNVMPKFAAFMMLFGMANAGLPATSGFVGEFMVIMGAVKVNFWVGALAAMTLIYGASYTLWMYKRVIFGAIHNPHVAEMKDINCREFAILAILAVVVLGMGLYPNAFIEVVHQAANDLIAHVAQSKI

SEQ ID NO: 21290 - protein, 160 aa, Neisseria meningitidis; identical to SEQ ID NO: 182

SEQ ID NO: 21291 - protein, 105 aa, Neisseria meningitidis; identical to SEQ ID NO: 3278

SEQ ID NO: 21292 - protein, 137 aa, Neisseria meningitidis; identical to SEQ ID NO: 9005

SEQ ID NO: 21293 - protein, 114 aa, Neisseria meningitidis
LIGSRSSKGTTIYADKGYDSAENRQHLKEHQLLDGIMRKACRNRPLSETQTKRNRYLSKTRYVVEQSFGTLHRKFRYARSTYFGLIKVSAQSHLKAMCLNLLKAANRLSAPAAA

SEQ ID NO: 21294 - protein, 718 aa, Neisseria meningitidis; identical to SEQ ID NO: 8836

SEQ ID NO: 21295 - protein, 659 aa, Neisseria meningitidis
MPKILQQTTLHRFFRANTHHPISPSVLQQAGDLIRWLCFSDGISDFRPCRLKPQNPIGGTVMNTVSNYLSALREAMKAQGLDALVIPSADPHLSEYLPEHWQARRELSGFTGSVGTFVVTADEAGVWVDSRYWEQAAKQLAGSGIELQKSGQVPPYNEWLAANLPENAAVGIPSDMVSLTGKRTLAQSLAAKNIRIEHPNDLLDQVWTSRPAIPAETVFIHDPAYVSETAAEKLARVRAVMAEKGADYHLVSSLDDIAWLTNLRGSDVPFNPVFVSFLLIGKDNAVLFTEQCRLNAEAAAALQTAGITVEPYAQVADKLAQIGGALLIEPNKTAVSTLVRLPESVCLIEGINPSTLFKSCKSEADIARIREAMEHDGAALCGFFAEFEDIIGNGGSLTEIDVDTMLYRHRSVRPGFISLSFDTIAGFNANGALPHYSATPESHSTISGNGLLLIDSGAQYKGGTTDITRVVPVGTPSAEQKSDNTLVLKAHIALAEAVFPENIPSPLIDAICRKPLWQAQCDYGHGTGHGVGYFLNVHEGPQRIAFAAPATPETAMKKGMVTSIEPGLYRPGKWGIRIENLAANQAVAAPQETEFGSFLCFETLTLCPIDTRLMDTALMTDGEIDWVNRYHAEVRRRLEPLTEGAAKAWLIKRTEPLAR

SEQ ID NO: 21296 - protein, 269 aa, Neisseria meningitidis; identical to SEQ ID NO: 9581

SEQ ID NO: 21297 - protein, 420 aa, Neisseria meningitidis; identical to SEQ ID NO: 2546

SEQ ID NO: 21298 - protein, 287 aa, Neisseria meningitidis; identical to SEQ ID NO: 2812

SEQ ID NO: 21299 - protein, 197 aa, Neisseria meningitidis; identical to SEQ ID NO: 2603

SEQ ID NO: 21300 - protein, 321 aa, Neisseria meningitidis; identical to SEQ ID NO: 4435

SEQ ID NO: 21301 - protein, 120 aa, Neisseria meningitidis; identical to SEQ ID NO: 2829

SEQ ID NO: 21302 - protein, 321 aa, Neisseria meningitidis; identical to SEQ ID NO: 4435

SEQ ID NO: 21303 - protein, 239 aa, Neisseria meningitidis; identical to SEQ ID NO: 434

SEQ ID NO: 21304 - protein, 321 aa, Neisseria meningitidis; identical to SEQ ID NO: 2168

SEQ ID NO: 21305 - protein, 262 aa, Neisseria meningitidis; identical to SEQ ID NO: 256

SEQ ID NO: 21306 - protein, 392 aa, Neisseria meningitidis; identical to SEQ ID NO: 2495

SEQ ID NO: 21307 - protein, 380 aa, Neisseria meningitidis; identical to SEQ ID NO: 2984

SEQ ID NO: 21308 - protein, 127 aa, Neisseria meningitidis; identical to SEQ ID NO: 1080

SEQ ID NO: 21309 - protein, 192 aa, Neisseria meningitidis; identical to SEQ ID NO: 2909

SEQ ID NO: 21310 - protein, 205 aa, Neisseria meningitidis; identical to SEQ ID NO: 8342

SEQ ID NO: 21311 - protein, 186 aa, Neisseria meningitidis; identical to SEQ ID NO: 9825

SEQ ID NO: 21312 - protein, 265 aa, Neisseria meningitidis; identical to SEQ ID NO: 8502

SEQ ID NO: 21313 - protein, 188 aa, Neisseria meningitidis
VSVGYDFGGWRIAADYAGYRKWNDNKYSVNTKEVLRNNSTGTENWQELKTENQENGSFHAASSLGLSAIYDFKLNDKFDKFKPYIGARVAYGHVKHQVHSVETETTTVFSKPKGTTVPGIISEKPISKPPYHESNSISSLGLGVIAGVGFDITPKLTLDTGYRYHNWGRLENTRFKTHEVSLGMRYRF

SEQ ID NO: 21314 - protein, 66 aa, Neisseria meningitidis; identical to SEQ ID NO: 3561

SEQ ID NO: 21315 - protein, 413 aa, Neisseria meningitidis; identical to SEQ ID NO: 10297

SEQ ID NO: 21316 - protein, 128 aa, Neisseria meningitidis; identical to SEQ ID NO: 1074

SEQ ID NO: 21317 - protein, 473 aa, Neisseria meningitidis; identical to SEQ ID NO: 1953

SEQ ID NO: 21318 - protein, 178 aa, Neisseria meningitidis; identical to SEQ ID NO: 5654

SEQ ID NO: 21319 - protein, 284 aa, Neisseria meningitidis; identical to SEQ ID NO: 506

SEQ ID NO: 21320 - protein, 208 aa, Neisseria meningitidis; identical to SEQ ID NO: 3590

SEQ ID NO: 21321 - protein, 56 aa, Neisseria meningitidis; identical to SEQ ID NO: 5635

SEQ ID NO: 21322 - protein, 186 aa, Neisseria meningitidis; identical to SEQ ID NO: 2604

SEQ ID NO: 21323 - protein, 558 aa, Neisseria meningitidis; identical to SEQ ID NO: 11199

SEQ ID NO: 21324 - protein, 318 aa, Neisseria meningitidis; identical to SEQ ID NO: 2723

SEQ ID NO: 21325 - protein, 119 aa, Neisseria meningitidis; identical to SEQ ID NO: 3189

SEQ ID NO: 21326 - protein, 204 aa, Neisseria meningitidis; identical to SEQ ID NO: 3086

SEQ ID NO: 21327 - protein, 100 aa, Neisseria meningitidis; identical to SEQ ID NO: 20779

SEQ ID NO: 21328 - protein, 377 aa, Neisseria meningitidis; identical to SEQ ID NO: 2272

SEQ ID NO: 21329 - protein, 214 aa, Neisseria meningitidis
VTRPAKINTYTRIIDASLALFNEEGERNISTNHIAAHLGISPGNLYYHFRNKDEIIVQLFKRYSEALLEYLNEAVLPSDVEDSINYMAGIYDVMWEYRFLFSDVNTLLARSAELLGEHNTFTQAKVSPLLVNLLTQLNGLNIIQADQTAMNDLAVNMWMITKYWFDFDSSLRGRTKLTEDSKARGIRRTLSLLRPYLLPEHREKYDRKIGNGNP

SEQ ID NO: 21330 - protein, 330 aa, Neisseria meningitidis; identical to SEQ ID NO: 9010

SEQ ID NO: 21331 - protein, 416 aa, Neisseria meningitidis; identical to SEQ ID NO: 11017

SEQ ID NO: 21332 - protein, 73 aa, Neisseria meningitidis; identical to SEQ ID NO: 9598

SEQ ID NO: 21333 - protein, 421 aa, Neisseria meningitidis; identical to SEQ ID NO: 8925

SEQ ID NO: 21334 - protein, 216 aa, Neisseria meningitidis; identical to SEQ ID NO: 2167

SEQ ID NO: 21335 - protein, 395 aa, Neisseria meningitidis
MTEDERFAWLQLAFTPYIGAESFLLLLHHFGSAQNALSAPAEQVAALIRHKQALEAWRNAEKRASARQAAEAALEWEMRDGCRLMLLQDEDFPEMLTQGLTAPPVLFLRGNVRLLHKPSAAIVGSRHATPQAMRIAKDFGKSLGGQNIPVVSGMASGIDTAAHQGALEAEGGTIAVWGTGIDRIYPPSNKNLAYEIAEKGLIVSEFPIGTRPYAGNFPRRNRLIAALSQVTLVVEAALESGSLITAGLAAEMGREVMAVPGSIDNPHSKGCHKLIKDGAKLVECLDDILNECPGLLQNTGASSYSINKDTPDTGRRAVQTAYAPPPAAKMPSEAAAGGTAHGGILDKMGFDPVHPDVLAEQLAMPAADLYAALLELELDGSVAAMPGGRYQRIRT

SEQ ID NO: 21336 - protein, 399 aa, Neisseria meningitidis; identical to SEQ ID NO: 8334

SEQ ID NO: 21337 - protein, 485 aa, Neisseria meningitidis; identical to SEQ ID NO: 2552

SEQ ID NO: 21338 - protein, 205 aa, Neisseria meningitidis
MLAKIPDGDTIKPIFHPNRTHMKKIIASALIATFALAACQDDTQARLEQQQKQIEALQQQLAQQADDTVYQLTPEAVKDTIPAEAQANGNNGQPVTGKDGQQYIYDQSTGSWLLQSLVGAAAGAFIGNALANKFTRAGNQDSPVARRARAAYHQSAHPNARTSRDLNTRSLRAKQQAAQAQRYRPTTRPPANYRRPAMRGFGRRR

SEQ ID NO: 21339 - protein, 780 aa, Neisseria meningitidis
MSKWRGFNRKGNTINMQPHAPHTDSNTLMLGRYAERAYLEYAMSVVKGRALPEVSDGQKPVQRRILFAMRDMGLTAGAKPVKSARVVGEILGKYHPHGDSSAYEAMVRMAQDFTLRYPLIDGIGNFGSRDGDGAAAMRYTEARLTPIAELLLSEINQGTVDFVPNYDGAFDEPLHLPARLPMVLLNGASGIAVGMATEIPSHNLNEVTQAAIALLKKPTLETADLMQYIPAPDFAGGGQIITPADELRRIYETGKGSVRVRARYEIEKLARGQWRVIVTELPPNANSSKILAEIEEQTNPKPKAGKKQLNQDQLNTKKLMLDLIDRVRDESDGEHPVRLVFEPKSSRIDTDTFINTLMAQTSLEGNVSMNLVMMGLDNRPAQKNLKTILQEWLDFRTVTVTRRLKFRLNQVEKRLHILEGRLKVFLHIDEVIKVIRESDDPKADLMAAFGLTEIQAEDILEIRLRQLARLEGFKLEKELNELREEQGRLNILLSDENEKRKLIIKEIQADMKQYGDARRTLVEEAGRAVLTQTTADEPITLILSEKGWIRSRAGHNLDLSQTTFKEGDRLKQTLEGRTVLPVVILDSSGRTYTLDAAEIPGGRGDGVPVSSLIELQNGAKPVAMLTGLPEQHYLLSSSGGYGFIAKLGDMVGRVKAGKVVMTADSGETVLPPVAVYASSFINPDCKIIAATNQNRALAFPIGELKIMAKGKGLQIIGLNAGESMTHTAVSSEPEILIESEGRRGAAHKDRIPISLLEAKRGKKGKLLPISGSLKQLSSPK

SEQ ID NO: 21340 - protein, 406 aa, Neisseria meningitidis
MAVNLTEKTAEQLPDIDGIALYTAQAGVKKPGHTDLTLIAVAAGSTVGAVFTTNRFCAAPVHIAKSHLFDEDGVRALIINTGNANAGTGAQGRIDALAVCAAAARQIGCKPNQVLPFSTGVILEPLPADKIIAALPKMQPAFWNEAARAIMTTDTVPKAASREGKVGDKHTVRATGIAKGSGMIHPNMATMLGFIATDAKVSQPVLQLMTQEIADETFNTITVDGDTSTNDSFVIIATGKNSQSEIDNIADPRYAQLKELLCSLALELAQAIVRDGEGATKFITVRVENAKTRDEARQAAYAVARSPLVKTAFFASDPNLGRLLAAIGYAGVADLDTDLVEMYLDDILVAEHGGRAASYTEAQGQAVMSKAEITVRIKLHRGQAAATVYTCDLSHGYVSINADYRS

SEQ ID NO: 21341 - protein, 727 aa, Neisseria meningitidis
  misc_feature 723, 724, 725: 'Xaa' is any amino acid
MNEGEVVLTPEQIQTLRGYASRGDTYGGWRYLANLGDRYADNAAAIVGKDTNLNGLNLWMKKGVENLWDDTVGKKTRLEKFDRVALQHFSQYVDLINKNNGRLPNTSEIERSYYKAVTYHGVSSSAAIDLVINRSLPDMADGYWALGLGIEAERIHNEQAVNNPNGSERDNRKQLISALDKGFDGSFKEKHFTFLQSVMMDLTKLGVEYTIDGWQKIGGWGNGIINDLYKSVVKREWTGIFEIVNNNIKQGNEAFKNEINSLVHDMKAAGKEFGDDLNTQWNNLTQAAEIIYNDIVDNTSQGIEKGVKAIKELSEKMKNAASDLADGSAEKAKQVVEDLAQAAKEAYENAKSTAEKAAQAAREFFKGLPSFKDLAEKFRDLFPNPEGWIDDGHQCFAPWVKETKKRNGKYHVYDPLALDLDGDGIETVATKGFSGSLFDHNRDGIRTATGWVSADDGLLVRDLNGNGIIDNGAELFGDNTKLADGSFAKHGYAALAELDSNGDNIINAADAAFQSLRVWQDLNQDGISQANELRTLEELGIQSLDLAYKDVNKNLGNGNTLAQQGSYTKTNGTTAKMGDLLLAADNLHSRFKDKVELTAEQAKAANLAGIGRLRDLREAAALSGDLANMLKAYSAAETKEAQLALLDNLIHKWAETDSNWGKKSPMRLSTDWTQTANGGVALTPSQVTRLKQNALVSLSDKAKAAIDAARDRIAVLDAYTGQXXXHT

SEQ ID NO: 21342 - protein, 196 aa, Neisseria meningitidis; identical to SEQ ID NO: 2946

SEQ ID NO: 21343 - protein, 488 aa, Neisseria meningitidis; identical to SEQ ID NO: 2117

SEQ ID NO: 21344 - protein, 92 aa, Neisseria meningitidis; identical to SEQ ID NO: 9238

SEQ ID NO: 21345 - protein, 90 aa, Neisseria meningitidis; identical to SEQ ID NO: 8272

SEQ ID NO: 21346 - protein, 238 aa, Neisseria meningitidis; identical to SEQ ID NO: 4111

SEQ ID NO: 21347 - protein, 371 aa, Neisseria meningitidis
MGLKKACLTVLCLIVFCFGIFYTFDRVNQGERNAVSLLKDKLFNEEGEPVNLIFCYTILQMKVAERIMAQHPGERFYVVLMSENRNEKYDYYFNQIKDKAERAYFFHLPYGLNKSFNFIPTMAELKVKSMLLPKVKRIYLASLEKVSIAAFLSTYPDAEIKTFDDGTGNLIQSSSYLGDEFSVNGTIKRNFARMMIGDWSIAKTRNASDEHYTIFKGLKNIMDDGRRKMTYLPLFDASELKTGDETGGTVRILLGSPDKEMKEISEKAAKDFNIQYVAPHPRQTYGLSGVTTLNSPYVIEDYILREIKKNPHTRYEIYTFFSGAALTMKDFPNVHVYALKPASLLEDYWLKPVYALFTQSGIPILTFDDKN

SEQ ID NO: 21348 - protein, 149 aa, Neisseria meningitidis; identical to SEQ ID NO: 2330

SEQ ID NO: 21349 - protein, 349 aa, Neisseria meningitidis; identical to SEQ ID NO: 261

SEQ ID NO: 21350 - protein, 176 aa, Neisseria meningitidis; identical to SEQ ID NO: 3131

SEQ ID NO: 21351 - protein, 43 aa, Neisseria meningitidis
LFDLGVFERGGVKGRGKWFSRVWRRSEVLCLMCGGIFSVKLIL

SEQ ID NO: 21352 - protein, 55 aa, Neisseria meningitidis; identical to SEQ ID NO: 2625

SEQ ID NO: 21353 - protein, 308 aa, Neisseria meningitidis; identical to SEQ ID NO: 1981

SEQ ID NO: 21354 - protein, 69 aa, Neisseria meningitidis; identical to SEQ ID NO: 9123

SEQ ID NO: 21355 - protein, 390 aa, Neisseria meningitidis; identical to SEQ ID NO: 8456

SEQ ID NO: 21356 - protein, 695 aa, Neisseria meningitidis; identical to SEQ ID NO: 10345

SEQ ID NO: 21357 - protein, 475 aa, Neisseria meningitidis; identical to SEQ ID NO: 2942

SEQ ID NO: 21358 - protein, 1144 aa, Neisseria meningitidis; identical to SEQ ID NO: 9231

SEQ ID NO: 21359 - protein, 162 aa, Neisseria meningitidis; identical to SEQ ID NO: 2816

SEQ ID NO: 21360 - protein, 389 aa, Neisseria meningitidis; identical to SEQ ID NO: 3300

SEQ ID NO: 21361 - protein, 228 aa, Neisseria meningitidis; identical to SEQ ID NO: 9344

SEQ ID NO: 21362 - protein, 671 aa, Neisseria meningitidis
VGSFHGFCLSDSIGFQMPSENAKRSCFFILNEKTGAFFMTTPKKTAKTSGNEARELADLSEDIGIRFKYPNSERVYLQGSRDDIRVPLREIRQDDTYTAQGAEANPPIPVYDTSGVYGDPAAHIDLKQGLPHIRTAWLNERGDTEILPKLSSEYGIERAHDPKTAHLRFNQITRPRRAKSGGNVTQLHYARRGIITPEMEFVAIRERLKLDELSQKSEYAKLLKQHAGQSFGANIPTHPDQITPEFVRREIAAGRAIIPANINHPELEPMIIGRNFRVKINGNLGNSAVTSSLTEEVEKMVWSLRWGADTIMDLSTGAHIHETREWIIRNAPVPIGTVPIYQALEKTGGIAEDLTWDLFRDTLIEQAEQGVDYFTIHAGVLLRYVPMTADRLTGIVSRGGSIMAKWCLAHHRENFLYTHFDEICEIMKAYDVSFSLGDGLRPGCIADANDESQFAELHTLGELTSKAWKHDVQVMIEGPGHVPLQRVKENMTEELQHCFEAPFYTLGPLVTDIAPGYDHITSGIGAANIGWYGTAMLCYVTPKEHLGLPDKEDVRTGIITYKLAAHAADLAKGWPGAQLRDNALSKARFEFRWRDQFRLSLDPERAESFHDETLPAEGAKIAHFCSMCGPKFCSMKITQEVRDYADKQKAQRQGMEEKAVEFVKKGAKIYS

SEQ ID NO: 21363 - protein, 71 aa, Neisseria meningitidis; identical to SEQ ID NO: 3925

SEQ ID NO: 21364 - protein, 476 aa, Neisseria meningitidis; identical to SEQ ID NO: 9630

SEQ ID NO: 21365 - protein, 135 aa, Neisseria meningitidis; identical to SEQ ID NO: 803

SEQ ID NO: 21366 - protein, 527 aa, Neisseria meningitidis; identical to SEQ ID NO: 8864

SEQ ID NO: 21367 - protein, 190 aa, Neisseria meningitidis; identical to SEQ ID NO: 11398

SEQ ID NO: 21368 - protein, 82 aa, Neisseria meningitidis; identical to SEQ ID NO: 2740

SEQ ID NO: 21369 - protein, 119 aa, Neisseria meningitidis; identical to SEQ ID NO: 8399

SEQ ID NO: 21370 - protein, 436 aa, Neisseria meningitidis
VLTLDAFEQCLKDCFPQGLNGKKTAVALSGGLDSVVLLHLLVRAGKRAGFVPEALHIHHGLSPRADDWADFCQNYCDMLGVGLETVKVCVEKNGLGIEAAARQKRYAAFAEKGFDILALAHHRDDQIETFMLAVARGGGLRALAAMPAVRPFGEKGIIWRPLLPFSRQDIWDYAQKHGLPNIEDESNTDTAYLRNRFRHRILPELSAQIPHFGRHVLNNVRALQEDLALLDEVVVQDCRWVCGAGYFDTARWLTFSPRRKTHILRHFLKENGIPVPNQNALADIARVLTEAKTGRWNLQGFELHHYAGRLFVFRQEKTDKLRFLKDRQISGNLREILTGQGFVLKRHPFGLPEHLLEQDGILRTVAVSDTLAVGGIHKDVKKILQGKRVLPVLRPIWPLVADSGNRPLALANCCADFQYSVSDGILPVHPDFPILF

SEQ ID NO: 21371 - protein, 228 aa, Neisseria meningitidis; identical to SEQ ID NO: 2819

SEQ ID NO: 21372 - protein, 278 aa, Neisseria meningitidis; identical to SEQ ID NO: 8269

SEQ ID NO: 21373 - protein, 411 aa, Neisseria meningitidis; identical to SEQ ID NO: 3347

SEQ ID NO: 21374 - protein, 252 aa, Neisseria meningitidis; identical to SEQ ID NO: 3275

SEQ ID NO: 21375 - protein, 548 aa, Neisseria meningitidis; identical to SEQ ID NO: 3866

SEQ ID NO: 21376 - protein, 135 aa, Neisseria meningitidis
MKIRAIKYTAMAALLAFTVAGCQLAGWYECSSLSGWCKPRKPAAIDFWDIGGESPPSLEDYEIPLSDGNRSVRANEYESAQQSYFYRKIGKFEACGLDWRTRDGKPLIETFKQEGFDCLEKQGLRRNGLSERVRW

SEQ ID NO: 21377 - protein, 182 aa, Neisseria meningitidis; identical to SEQ ID NO: 6504

SEQ ID NO: 21378 - protein, 398 aa, Neisseria meningitidis; identical to SEQ ID NO: 8296

SEQ ID NO: 21379 - protein, 367 aa, Neisseria meningitidis; identical to SEQ ID NO: 8122

SEQ ID NO: 21380 - protein, 214 aa, Neisseria meningitidis; identical to SEQ ID NO: 5138

SEQ ID NO: 21381 - protein, 118 aa, Neisseria meningitidis; identical to SEQ ID NO: 3785

SEQ ID NO: 21382 - protein, 66 aa, Neisseria meningitidis; identical to SEQ ID NO: 9323

SEQ ID NO: 21383 - protein, 139 aa, Neisseria meningitidis; identical to SEQ ID NO: 19334

SEQ ID NO: 21384 - protein, 213 aa, Neisseria meningitidis
MKITHCKLKKKVQKELLRFFVLEVTARSAADILGIHPNSAVLFYRKIRTVINHHLALAADEVFEGPVEPDESDFGGRRKGRRGRGAAGKVVVFGILKRNGRVYTVVVDNAKSETLLPVIKKKIMPDSIVYTDSLSSYDKLDVSGFIHYRINHSKEFADRQNHINGIENFWNQAKRVLRKYNGIDRKSFPLFLKECEFRFNFGTPSQQLKILQK

SEQ ID NO: 21385 - protein, 290 aa, Neisseria meningitidis; identical to SEQ ID NO: 1941

SEQ ID NO: 21386 - protein, 341 aa, Neisseria meningitidis; identical to SEQ ID NO: 3579

SEQ ID NO: 21387 - protein, 179 aa, Neisseria meningitidis; identical to SEQ ID NO: 8483

SEQ ID NO: 21388 - protein, 477 aa, Neisseria meningitidis; identical to SEQ ID NO: 8039

SEQ ID NO: 21389 - protein, 150 aa, Neisseria meningitidis; identical to SEQ ID NO: 3757

SEQ ID NO: 21390 - protein, 318 aa, Neisseria meningitidis; identical to SEQ ID NO: 3091

SEQ ID NO: 21391 - protein, 139 aa, Neisseria meningitidis; identical to SEQ ID NO: 8720

SEQ ID NO: 21392 - protein, 187 aa, Neisseria meningitidis; identical to SEQ ID NO: 508

SEQ ID NO: 21393 - protein, 472 aa, Neisseria meningitidis
MNIHALLSKQWTLPPFLPKRLLLSLLILLAPNAMFWVLALLTATARPIVNLDYLPAALLITLPWRFVKIAGVLAFWLAVLFDGLMMVIQLFPFMDLIGAINLVPFILTAPAPYQIMTGLLLLYMLAMPFVLQKAAAKTDFRHIAVCAAVVAAAGYFTGHLSYYDRGRMANIFGANNFYYAKSQAMLYTVSQNADFITAGLVDPVFLPLGNQQRAATHLNEPKSQKILFIVAESWGLPANPELQNATFAKLLAQKDRFSVWESGSFPFIGATVEGEMRELCAYGGLRGFALRRAPDEKFARCLPNRLKQEGYATFAMHGAGSSLYDRFSWYPRAGFQEIKTAENLIGKKTCAIFGGVCDSELFGEVSAFFKKHDKGLFYWMTLTSHADYPESDIFNHRLKCTEYGLPAETDLCRNFSLHTQFFDQLADLIQRPEMKGTEVIIVGDHPPPVGNLNETFRYLKQGHVAWLHFKIK

SEQ ID NO: 21394 - protein, 240 aa, Neisseria meningitidis; identical to SEQ ID NO: 8752

SEQ ID NO: 21395 - protein, 287 aa, Neisseria meningitidis
  misc_feature 282, 283: 'Xaa' is any amino acid
MLTFIGLLIIGVIVWLLLTEKVSPIIALILVPLFGALLAGFDVSQLKEFYSGGTKSVMQIVIMFMFSILFFGIMNDVGLFRPMIGGLIKLTRGNIVAVSVGTVLVSVVAQLDGAGATTFLLVVPALLPLYKRLHMNPYLLFLLLTSSAGLINLLPWGGPTGRVASVLGADVGELYKPLLTVQIIGVVFILALSLLLGVREKRRIVRELGALPAVADLIKPVPLSEEEQKLARPKLFWWNVLLFLAAMSLLFSGIFPPGYVFMLAATAALLLNYRSPQEQMEXXHTLN

SEQ ID NO: 21396 - protein, 74 aa, Neisseria meningitidis; identical to SEQ ID NO: 8496

SEQ ID NO: 21397 - protein, 202 aa, Neisseria meningitidis; identical to SEQ ID NO: 597

SEQ ID NO: 21398 - protein, 170 aa, Neisseria meningitidis; identical to SEQ ID NO: 1571

SEQ ID NO: 21399 - protein, 794 aa, Neisseria meningitidis; identical to SEQ ID NO: 2564

SEQ ID NO: 21400 - protein, 413 aa, Neisseria meningitidis; identical to SEQ ID NO: 9853

SEQ ID NO: 21401 - protein, 307 aa, Neisseria meningitidis; identical to SEQ ID NO: 9941

SEQ ID NO: 21402 - protein, 335 aa, Neisseria meningitidis
MSTFFRQTAQAMIAKHIDRFPLLKLDQVIDWQPIEQYLNRQKTRYLRDHRGRPAYPLLSMFKAVLLGQWNSLSDPELEHSLITRIDFNLFCRFDELIIPDYSTLCRYRNWLAQDDTLSELLKLINCQLTEKGLKIEKASAAVVDATIIQTAGSKQRQAIEVDEEGQISGQTTPSKDSDARWIKKNGLYKLGYKQHTRTDAEGYIEKLHITPANAHECKHLSPLLEGLPKGTTVYADKGYDSAENRQHLEEHQLQDGIMRKACRNRPLTETQTKRNRYLSKTRYVVEQSFGTLHRKFRYARSTYFGLIKVSAQSHLKAMCLNLLKAANRLSAPAAA

SEQ ID NO: 21403 - protein, 480 aa, Neisseria meningitidis; identical to SEQ ID NO: 3560

SEQ ID NO: 21404 - protein, 135 aa, Neisseria meningitidis; identical to SEQ ID NO: 2191

SEQ ID NO: 21405 - protein, 78 aa, Neisseria meningitidis; identical to SEQ ID NO: 8727

SEQ ID NO: 21406 - protein, 154 aa, Neisseria meningitidis; identical to SEQ ID NO: 3531

SEQ ID NO: 21407 - protein, 924 aa, Neisseria meningitidis; identical to SEQ ID NO: 2343

SEQ ID NO: 21408 - protein, 371 aa, Neisseria meningitidis; identical to SEQ ID NO: 8192

SEQ ID NO: 21409 - protein, 114 aa, Neisseria meningitidis; identical to SEQ ID NO: 2177

SEQ ID NO: 21410 - protein, 258 aa, Neisseria meningitidis; identical to SEQ ID NO: 2774

SEQ ID NO: 21411 - protein, 521 aa, Neisseria meningitidis
MEKFRMNLFTRNFLIATPILMCCSLSFAEPARIDDRIIKFRPSKSKFFESTGYRKINNEFSKFTEAANVEHIPTGAKARINAKITASVSRAAVLSGVGKLVRQGAKFSTRAVPYVGTALLAHDVYETFKEDIQARGYQYDTETDKFVKGYEYSNCLWYEDERRINRTYGCYGVDSSIMRLMSDYSRFPEVKELMESQMERLARPYWEKLRNRPDMYYFKNYNFKRCYFGLNGGDCLVAKGDDGRTFISFSLQGNSKYKEEMDAKKLEEILSLKVDANPDKYIKATGYPGYSEKVEVAPGTKVNMGPVTDRNGNPVQVVATFGRDSQGNTTVDVQVIPRPDLTPGSAEAPNAQPLPEVSPAENPANNPAPNENPGTRPNPEPDPDLNPDANPDTDGQPGTSPDSPAVPDRPNGRDGKDGGLLCKFFPDILACDRLPEPNPAEDLNLPSETVNVEFKKSGIFQDSAQCPAPVTFTITVLDSSKQFAFSFENACTIAERLRYMLLALAWAVAAFFCIRTVSREV

SEQ ID NO: 21412 - protein, 134 aa, Neisseria meningitidis; identical to SEQ ID NO: 2143

SEQ ID NO: 21413 - protein, 260 aa, Neisseria meningitidis; identical to SEQ ID NO: 8293

SEQ ID NO: 21414 - protein, 181 aa, Neisseria meningitidis; identical to SEQ ID NO: 3765

SEQ ID NO: 21415 - protein, 383 aa, Neisseria meningitidis; identical to SEQ ID NO: 8491

SEQ ID NO: 21416 - protein, 258 aa, Neisseria meningitidis; identical to SEQ ID NO: 9376

SEQ ID NO: 21417 - protein, 106 aa, Neisseria meningitidis; identical to SEQ ID NO: 853

SEQ ID NO: 21418 - protein, 266 aa, Neisseria meningitidis; identical to SEQ ID NO: 8298

SEQ ID NO: 21419 - protein, 233 aa, Neisseria meningitidis; identical to SEQ ID NO: 8595

SEQ ID NO: 21420 - protein, 334 aa, Neisseria meningitidis; identical to SEQ ID NO: 20464

SEQ ID NO: 21421 - protein, 87 aa, Neisseria meningitidis; identical to SEQ ID NO: 1364

SEQ ID NO: 21422 - protein, 92 aa, Neisseria meningitidis; identical to SEQ ID NO: 2038

SEQ ID NO: 21423 - protein, 179 aa, Neisseria meningitidis; identical to SEQ ID NO: 403

SEQ ID NO: 21424 - protein, 138 aa, Neisseria meningitidis; identical to SEQ ID NO: 9645

SEQ ID NO: 21425 - protein, 314 aa, Neisseria meningitidis; identical to SEQ ID NO: 3488

SEQ ID NO: 21426 - protein, 546 aa, Neisseria meningitidis
MTDNSPPPNGHAQAHVRKNNTFLSAVWLVPLIALIAGGWLWIKEIRNRGPVVTLLMDSAEGIEVNNTVIKVLSIDVGRVTRIKLRDDQKGVEVTAQLNADVSGLIRSDTQFWVVKPRIDQSGVTGLGTLLSGSYIAFTPGKSDEAKDVFQVQDIPPVTAIGQSGLRLNLIGKNDRILNVNSPVLYENFMVGQVESAHFDPSDQSVHYTIFIQSPNDKLIHSASRFWLESGINIETTGSGIKLNSAPLPALLSGAISFDSPKTKNSKNVKSEDSFTLYDSRSEVANLPDDRSLYYTAFFKQSVRGLTVGSPVEYKGLNVGVVSDVPYFDRNDSLHLFENGWIPVRIRIEPSRLEINADEQSKEHWKQQFQTALNKGLTATISSNNLLTGSKMIELNDQPSSSPKLRPHTVYAGDTVIATQGGGLDDLQVKLADLLDKFGKLPLDKTVSGLNASLAELKSTLKSINTLSNNPQTQNIPNELNQTLKELRTTLQGVSPQSPIYGDVQNTLQSLDKTLKDVQPVINTLKEKPNALIFNSSSKDPIPKGSR

SEQ ID NO: 21427 - protein, 395 aa, Neisseria meningitidis; identical to SEQ ID NO: 13319

SEQ ID NO: 21428 - protein, 299 aa, Neisseria meningitidis
  misc_feature 295, 296, 297: 'Xaa' is any amino acid
MIAKHIDRFPLLKLDQVIDWQPIEQYLNRQKTRYLRDHRGRPAYPLLSMFKAILPGQWHSLSDPELEHSLITRIDFNLFCRFDELSIPDYSTLCRYRNWLAQDDTLSELLELINRQLTEKGLKIEKASAVVGATIIQTAGSKQRQAIEVDEEGQVSGQTTPSKDSDARWIKKNGLYKLGYKQHTRTDAEGYIEKLHITPANAHECKHLPPLLEGIAEGTTVYADKGYDSAENRQHLEEHQLQDGIMRKACRNRPLSETQTKRNRYLSKTRYVVEQSFGTLHRKFRYARSTYFGLXXXHT

SEQ ID NO: 21429 - protein, 46 aa, Neisseria meningitidis; identical to SEQ ID NO: 8701

SEQ ID NO: 21430 - protein, 104 aa, Neisseria meningitidis; identical to SEQ ID NO: 2048

SEQ ID NO: 21431 - protein, 165 aa, Neisseria meningitidis; identical to SEQ ID NO: 3578

SEQ ID NO: 21432 - protein, 268 aa, Neisseria meningitidis
MNPAPKKPSLLFSSLLFSSLLFSSLLFSSAAQAASEDSGHGPYYVQADLAYAAERITHDYPKATGANNTSTVSDYFRNIRAHSIHPRVSVGYDFGDWRIAADYASYRKWNNNKYSVNTKELENKHNNKKDLKTENQENGTFHAASSLGLSAIYDFKLNDKFKPYIGARVAYGHVRHSIDSTKKTTEVVTSTHGGADTKPTIYNGESTQNAYHESHSIRRLGLGVVAGVGFDITPKLTLDTGYRYHNWGRLENTRFKTHEVSLGMRYHF

SEQ ID NO: 21433 - protein, 284 aa, Neisseria meningitidis; identical to SEQ ID NO: 10102

SEQ ID NO: 21434 - protein, 357 aa, Neisseria meningitidis
  misc_feature 3, 4: 'Xaa' is any amino acid
VCXXGGLIKLTRGNIVAVSVGTVLVSVVAQLDGAGATTFLLVVPALLPLYKRLHMNPYLLFLLLTSSAGLINLLPWGGPTGRVASVLGADVGELYKPLLTVQIIGVVFILALSLLLGVREKRRIVRELGALPAVADLIKPVPLSEEEQKLARPKLFWWNVLLFLAAMSLLFSGIFPPGYVFMLAATAALLLNYRSPQEQMERIYAHAGGAVMMASIILAAGTFLGILKGAGMLDAISKDLVHILPDALLPYLHIAIGVLGIPLELVLSTDAYYFGLFPIVEQITSQAGVAPEAAGYAMLIGSIVGTFVTPLSPALWMGLGLAKLSMGKHIRYSFFWAWGLSLAILASSIAAGIVPLP

SEQ ID NO: 21435 - protein, 1003 aa, Neisseria meningitidis
MNEQNQLKVKQKGSYSTLREKDRERKFIYNKGWQGGGSVFFDNTDTLVSRQSGTAVFGTATYLPPYGKVSGFDANALKERNNAVDWIHTTRAGLAGYAYTNVICRSHQCPQLVYKTRFSFDNPDLAKRGGGLDRHTEPSRDNSLIYKLKDHPWLGVSFNLGSENTVKNSQSSSRLISSFSEDNNNQTIVSTTENHPISLGDRQREHTAVAYYLNAKLHLLDKKGIKDITGKTVRLGVLKPSIDVKTQRTGLGGLLGFHAKWDIKDTGQIPVELGLPQIKAGRCINKPNPNPKAQALSPALTAPALWFGPVQNGKVQMYSASVSTYPDSSSSQIFLQNLSRKDDTSKPGRYSLKPLSTSEIKSKEPTFTGRQTVIRLDGGVQQIKLQGNEVTSFNVNNGNNTFGIVKDLGVDPDASEWKKVLLPWTVRASNDDNQFKTINQQLNQQKIQYSQRYRIRDNGNRDLGDIVNSPIVAVGEYLATSANDGMVHIFKQSGGDKRSYNLKLSYIPGTMPRQYFDNDTSALKDSTLAKELRTFAEKGYVGDRYGVDGGFVLRRITDDQDKQKHFFMFGAMGLGGRGAYALDLTKADSNNPTAVSLFDVKNGNNGNNGNNSNNSNNSVQLGYTVGTPQIGKTHNGKYAAFLASGYATKDINNGDNKTALYVYDLESNNGTPIAKIEVPNGKGGLSSPTLVDKDLDGTVDIAYAGDRGGSMYRFDLSGNNPTSWSAHAIFSGNKPITSAPAISQLKDKRVVIFGTGSDLSEEDVDSKEIQHVYGIFDNDTDTGTAQDGQGKGLLEQKLEKDKDGKTLFLSDYKRSDGSGDKGWVVKLEAGQRVTVKPTVVLRTAFVTIHKYTGNDKCGAETAILGINTADGGKLTKKSARPIVPADNTAVAQYSGHKQTAKGKSIPIGCMEKNNGIVCPNGYVYDKPVNVRYLDEKKTDGFSTTADGDAGGSGTFKEGKKPARNNRCFSGKGVRTLLMNDLDSLDITGPTCGMKRISWREVFY

SEQ ID NO: 21436 - protein, 152 aa, Neisseria meningitidis; identical to SEQ ID NO: 9291

SEQ ID NO: 21437 - protein, 668 aa, Neisseria meningitidis; identical to SEQ ID NO: 9269

SEQ ID NO: 21438 - protein, 199 aa, Neisseria meningitidis; identical to SEQ ID NO: 3649

SEQ ID NO: 21439 - protein, 389 aa, Neisseria meningitidis; identical to SEQ ID NO: 1971

SEQ ID NO: 21440 - protein, 121 aa, Neisseria meningitidis; identical to SEQ ID NO: 4117

SEQ ID NO: 21441 - protein, 202 aa, Neisseria meningitidis; identical to SEQ ID NO: 8932

SEQ ID NO: 21442 - protein, 427 aa, Neisseria meningitidis; identical to SEQ ID NO: 9028

SEQ ID NO: 21443 - protein, 188 aa, Neisseria meningitidis; identical to SEQ ID NO: 8617

SEQ ID NO: 21444 - protein, 160 aa, Neisseria meningitidis
MKYLNLATIALAATFAAHTASADELAGWKDGTAQSLQSLKAPVRIVNLWATWCGPCRKEMPAMSKWYKAQKKGSVDMVGIALDTSDNIGNFLKQTPVSYPIWRYTGANSRNFMKTYGNTVGVLPFTVVEAPKCGYRQTITGEVNEKSLTEAVKLAHSKCR

SEQ ID NO: 21445 - protein, 94 aa, Neisseria meningitidis; identical to SEQ ID NO: 1124

SEQ ID NO: 21446 - protein, 62 aa, Neisseria meningitidis; identical to SEQ ID NO: 9696

SEQ ID NO: 21447 - protein, 203 aa, Neisseria meningitidis; identical to SEQ ID NO: 3558

SEQ ID NO: 21448 - protein, 375 aa, Neisseria meningitidis; identical to SEQ ID NO: 8635

SEQ ID NO: 21449 - protein, 671 aa, Neisseria meningitidis; identical to SEQ ID NO: 11106

SEQ ID NO: 21450 - protein, 320 aa, Neisseria meningitidis; identical to SEQ ID NO: 913

SEQ ID NO: 21451 - protein, 219 aa, Neisseria meningitidis; identical to SEQ ID NO: 8378

SEQ ID NO: 21452 - protein, 210 aa, Neisseria meningitidis; identical to SEQ ID NO: 9272

SEQ ID NO: 21453 - protein, 132 aa, Neisseria meningitidis; identical to SEQ ID NO: 1178

SEQ ID NO: 21454 - protein, 157 aa, Neisseria meningitidis; identical to SEQ ID NO: 8174

SEQ ID NO: 21455 - protein, 219 aa, Neisseria meningitidis; identical to SEQ ID NO: 8152

SEQ ID NO: 21456 - protein, 185 aa, Neisseria meningitidis; identical to SEQ ID NO: 3675

SEQ ID NO: 21457 - protein, 269 aa, Neisseria meningitidis; identical to SEQ ID NO: 9247

SEQ ID NO: 21458 - protein, 483 aa, Neisseria meningitidis; identical to SEQ ID NO: 9412

SEQ ID NO: 21459 - protein, 496 aa, Neisseria meningitidis
VNIQDADSDGIQTASENNNGTRMGYNRSMEKNTLSARAPSPWLPLLLAIAIFMQMLDATILNTALPEIAADLNESPLNMQLAVISYTLTVALLIPLSGYLADRFGTKKVFFGSIAVFMLGSALCAASGSLFELTLSRVVQGIGGSMLVPIPRLTILRVYDKSKLLNAINYAVMPALIGPVLGPLAGGYLVEYASWHWIFLLNLPIGLLGFILGRNIMPDIKGSNISLDFKGYLIFSAAACLLLLSAESLSHALPPYFALLPLCGGLLFARRYFRHMKTASKPIYSADLFLIRTFRLGLAGNLFSRLGISSIPFLMPLMFQVAFGFGASLSGWLVAPVALSSLLVKPLIAPLMKRFGYRTVLLWNTKLLAAFIMLLALPDGNSPLWIWIFLSLAIGACNSLQFSAMNTLTLADLRPQQTGSGNSLMAVNQQLAISMGIVVGALILKNWTFLIPASSGLHSAFRMTLLSIGGITLASSLVFKRLHVSDGANLTRNTPS

SEQ ID NO: 21460 - protein, 306 aa, Neisseria meningitidis; identical to SEQ ID NO: 4339

SEQ ID NO: 21461 - protein, 473 aa, Neisseria meningitidis; identical to SEQ ID NO: 9090

SEQ ID NO: 21462 - protein, 508 aa, Neisseria meningitidis; identical to SEQ ID NO: 8621

SEQ ID NO: 21463 - protein, 408 aa, Neisseria meningitidis; identical to SEQ ID NO: 2386

SEQ ID NO: 21464 - protein, 126 aa, Neisseria meningitidis; identical to SEQ ID NO: 8788

SEQ ID NO: 21465 - protein, 196 aa, Neisseria meningitidis; identical to SEQ ID NO: 2662

SEQ ID NO: 21466 - protein, 758 aa, Neisseria meningitidis; identical to SEQ ID NO: 2629

SEQ ID NO: 21467 - protein, 144 aa, Neisseria meningitidis; identical to SEQ ID NO: 6120

SEQ ID NO: 21468 - protein, 336 aa, Neisseria meningitidis; identical to SEQ ID NO: 9366

SEQ ID NO: 21469 - protein, 128 aa, Neisseria meningitidis; identical to SEQ ID NO: 8714

SEQ ID NO: 21470 - protein, 704 aa, Neisseria meningitidis
MDLLSVFHKYRLKYAVAVLTILLLAAVGLHASVYRTFTPENIRSRLQQSIAHTHRKISFDADIQRRLLPRPTVILKNLTITEPGGDQTAVSVQETKIGLSWKNLWSDQIQIEKWVVSSAELALTRDGKGVWNIQDLIDSQKRQASVNRIIVENSTVRLNFLQEQLILKEINLNLQSPDSSGQPFESSGILVWGKLSVPWKSRGLFLSDGIGTPKISPFHFEASTSLDGHGITISTTGSPSVRFNAGGADAAGLGLRADTSFRNLHLTAQIPTLALRNNSIKIETVNGAFTAGGEYAQWDGSFKLDKANLHSGIANIGNAEISGSFKTPRHQTNFSLNSPLVWTENKGLDAPRLYVSTLQDTVNRLPQPRFISRLDGSLSVPNLQNWNAELNGTFDRQTVAAKFRYTHEDAPHLEAAVALQKLNLTPYLDDVRQQNGKIFPDTLAKLSGDIEAHLKIGKVQLPGLQLDDMETYLHADKGHIALSRFKSGLYGGHTEGGISIANTRPATYRLQQNASNIQIQPLLQDLFGFHSFSGNGDAVIDLTAGGETRKELIRSLQGSLSLNISNGAWHGIDMDNILKNGISGKTADNAAPSTPFHRFTLNSEISDGISRHIDTELFSDSLYVTSNGYTNLDTQELSEDVLIRNAVHPKNKPIPLKITGTVDKPSITVDYGRLTGGINSRKEKQKILEDTLLEQWQWLKPKEP

SEQ ID NO: 21471 - protein, 158 aa, Neisseria meningitidis; identical to SEQ ID NO: 9372

SEQ ID NO: 21472 - protein, 309 aa, Neisseria meningitidis; identical to SEQ ID NO: 8314

SEQ ID NO: 21473 - protein, 129 aa, Neisseria meningitidis; identical to SEQ ID NO: 322

SEQ ID NO: 21474 - protein, 356 aa, Neisseria meningitidis; identical to SEQ ID NO: 9015

SEQ ID NO: 21475 - protein, 216 aa, Neisseria meningitidis; identical to SEQ ID NO: 8316

SEQ ID NO: 21476 - protein, 44 aa, Neisseria meningitidis; identical to SEQ ID NO: 6328

SEQ ID NO: 21477 - protein, 320 aa, Neisseria meningitidis; identical to SEQ ID NO: 8264

SEQ ID NO: 21478 - protein, 101 aa, Neisseria meningitidis; identical to SEQ ID NO: 1118

SEQ ID NO: 21479 - protein, 265 aa, Neisseria meningitidis; identical to SEQ ID NO: 376

SEQ ID NO: 21480 - protein, 103 aa, Neisseria meningitidis
MFNQNQTVTYPATFLGAKKFKGEIDGSNIDTCSVLVATSLPAQSGNAVGFTAAQMKFGDSSNFARLENLKYPCGVMVTVEMTSTGKGMVPSLIDFQVAEKPKG

SEQ ID NO: 21481 - protein, 365 aa, Neisseria meningitidis; identical to SEQ ID NO: 3268

SEQ ID NO: 21482 - protein, 242 aa, Neisseria meningitidis; identical to SEQ ID NO: 107

SEQ ID NO: 21483 - protein, 478 aa, Neisseria meningitidis; identical to SEQ ID NO: 9742

SEQ ID NO: 21484 - protein, 123 aa, Neisseria meningitidis; identical to SEQ ID NO: 3099

SEQ ID NO: 21485 - protein, 111 aa, Neisseria meningitidis; identical to SEQ ID NO: 233

SEQ ID NO: 21486 - protein, 612 aa, Neisseria meningitidis; identical to SEQ ID NO: 3627

SEQ ID NO: 21487 - protein, 125 aa, Neisseria meningitidis; identical to SEQ ID NO: 535

SEQ ID NO: 21488 - protein, 79 aa, Neisseria meningitidis; identical to SEQ ID NO: 5337

SEQ ID NO: 21489 - protein, 111 aa, Neisseria meningitidis; identical to SEQ ID NO: 7069

SEQ ID NO: 21490 - protein, 107 aa, Neisseria meningitidis; identical to SEQ ID NO: 2236

SEQ ID NO: 21491 - protein, 204 aa, Neisseria meningitidis; identical to SEQ ID NO: 504

SEQ ID NO: 21492 - protein, 231 aa, Neisseria meningitidis; identical to SEQ ID NO: 8762

SEQ ID NO: 21493 - protein, 306 aa, Neisseria meningitidis; identical to SEQ ID NO: 9111

SEQ ID NO: 21494 - protein, 230 aa, Neisseria meningitidis; identical to SEQ ID NO: 11329

SEQ ID NO: 21495 - protein, 231 aa, Neisseria meningitidis; identical to SEQ ID NO: 2520

SEQ ID NO: 21496 - protein, 46 aa, Neisseria meningitidis; identical to SEQ ID NO: 9631

SEQ ID NO: 21497 - protein, 249 aa, Neisseria meningitidis; identical to SEQ ID NO: 467

SEQ ID NO: 21498 - protein, 335 aa, Neisseria meningitidis
MSTFFQQTAQAMIAKHIDRFPLLKLDQVIDWQPIEQYLNRQKTRYLRDHRGRPAYPLLSMFKAILPGQWHSLSDPELEHSLITRIDFNLFCRFDELSIPDYSTLCRYRNWLAQDDTLSELLELINCQLTEKGLKIEKASAAVIDATIIQTAGSEQRQAIEVDEEGQVSGQTTLSKDKNARWTKKNSLYKLGYKQHTRTDAEGYIEKLYITPTNAHECTHLSPLLEGLPKGTTVYADKGYDSKENRQHLKEHQLQDGIMRKACRNRPLTEAQTKRNRYLSKTRYVVEQSFGTLHRKFRYARAAYFGLIKVSAQSHLKAMCLNLLKAANRLSAPAAA

SEQ ID NO: 21499 - protein, 315 aa, Neisseria meningitidis; identical to SEQ ID NO: 4592

SEQ ID NO: 21500 - protein, 190 aa, Neisseria meningitidis
LLKLHLWNQSIYGVDAVIVTHTHEDHWGETAARSIPKNLPVYVQHQADAAKIRSQGFTDVRVLNGSTVFNGVTISKTGGVHGTEAMYANPQLAEILGDAMGVVFQSSGHKTAYIMGDTVWTADVNKALNRYKPDYLIMNTGYALISGITVHMDTVNHTAVSRTDMRKFIRGQGIESRVNVPEDGEILKLD

SEQ ID NO: 21501 - protein, 95 aa, Neisseria meningitidis; identical to SEQ ID NO: 4938

SEQ ID NO: 21502 - protein, 443 aa, Neisseria meningitidis; identical to SEQ ID NO: 279

SEQ ID NO: 21503 - protein, 275 aa, Neisseria meningitidis; identical to SEQ ID NO: 8986

SEQ ID NO: 21504 - protein, 157 aa, Neisseria meningitidis; identical to SEQ ID NO: 2553

SEQ ID NO: 21505 - protein, 506 aa, Neisseria meningitidis; identical to SEQ ID NO: 19126

SEQ ID NO: 21506 - protein, 394 aa, Neisseria meningitidis; identical to SEQ ID NO: 277

SEQ ID NO: 21507 - protein, 136 aa, Neisseria meningitidis; identical to SEQ ID NO: 8545

SEQ ID NO: 21508 - protein, 236 aa, Neisseria meningitidis; identical to SEQ ID NO: 8610

SEQ ID NO: 21509 - protein, 459 aa, Neisseria meningitidis; identical to SEQ ID NO: 9603

SEQ ID NO: 21510 - protein, 102 aa, Neisseria meningitidis; identical to SEQ ID NO: 1826

SEQ ID NO: 21511 - protein, 401 aa, Neisseria meningitidis; identical to SEQ ID NO: 2387

SEQ ID NO: 21512 - protein, 354 aa, Neisseria meningitidis; identical to SEQ ID NO: 2527

SEQ ID NO: 21513 - protein, 425 aa, Neisseria meningitidis; identical to SEQ ID NO: 8158

SEQ ID NO: 21514 - protein, 573 aa, Neisseria meningitidis; identical to SEQ ID NO: 9653

SEQ ID NO: 21515 - protein, 100 aa, Neisseria meningitidis; identical to SEQ ID NO: 10117

SEQ ID NO: 21516 - protein, 457 aa, Neisseria meningitidis; identical to SEQ ID NO: 2036

SEQ ID NO: 21517 - protein, 197 aa, Neisseria meningitidis; identical to SEQ ID NO: 763

SEQ ID NO: 21518 - protein, 131 aa, Neisseria meningitidis; identical to SEQ ID NO: 3391

SEQ ID NO: 21519 - protein, 155 aa, Neisseria meningitidis; identical to SEQ ID NO: 8967

SEQ ID NO: 21520 - protein, 308 aa, Neisseria meningitidis; identical to SEQ ID NO: 13102

SEQ ID NO: 21521 - protein, 376 aa, Neisseria meningitidis; identical to SEQ ID NO: 8696

SEQ ID NO: 21522 - protein, 217 aa, Neisseria meningitidis
MKITHCKLKKKVQKELLRFFVLEVTARSAADILGIHPNSAALFYRKIRTVINHHLALAADEVFEGPVEPDESDFGGRRKGRRGRGAAGKVVVFGILKRNGRVYTVVVDNAKSETLLPVIKKKIMPDSIVYTNSLSSCDKLDVSGFIHYRINHSKEFADRQNHINGIENFWNQAKRVLRKYNGIDRKSFPLFLKECEFRFNFGTPSRQLKILQDWCGI

SEQ ID NO: 21523 - protein, 97 aa, Neisseria meningitidis; identical to SEQ ID NO: 2609

SEQ ID NO: 21524 - protein, 283 aa, Neisseria meningitidis
MARHGWQAGRFEIGLDKPKIMGIVNLTPDSFSDGGAYSQNAKTALAHAERLLKEGADILDIGGESTRPGADYVSSEEEWARVEPVLVEVAGWGVPVSLDTRRTVVMEKALALGGIDIINDVAALTDEGAVELLARQTDTGICLMHMQGLPETMQINPKYQDVVGEVARYLKARAAECIAAGIAPQRITLDPGFGFGKTLQHNIALMRHLPELMAETGFPLLIGVSRKRMIGELTGEADAAARVHGSVAAALASVARGAQIVRVHDVKATADALKAWEALGINL

SEQ ID NO: 21525 - protein, 399 aa, Neisseria meningitidis; identical to SEQ ID NO: 19002

SEQ ID NO: 21526 - protein, 442 aa, Neisseria meningitidis
MAETIPAALNMKGMMMFERSVIAMACIFALSACGGGGGGSPDVKSADTLSKPAAPVVAEKETEVKEDAPQAGSQGQGAPSTQGSQDMAAVSAENTGNGGAATTDKPKNEDEGPQNDMPQNSAESANQTGNNQPADSSDSAPASNPAPANGGSNFGRVDLANGVLIDGPSQNITLTHCKGDSCNGDNLLDEEAPSKSEFENLNESERIEKYKKDGKSDKFTNLVATAVQANGTNKYVIIYKDKSASSSSARFRRSARSRRSLPAEMPLIPVNQADTLIVDGEAVSLTGHSGNIFAPEGNYRYLTYGAEKLPGGSYALRVQGEPAKGEMLAGTAVYNGEVLHFHTENGRPYPTRGRFAAKVDFGSKSVDGIIDSGDDLHMGTQKFKAAIDGNGFKGTWTENGGGDVSGRFYGPAGEEVAGKYSYRPTDAEKGGFGVFAGKKEQD

SEQ ID NO: 21527 - protein, 347 aa, Neisseria meningitidis; identical to SEQ ID NO: 8276

SEQ ID NO: 21528 - protein, 219 aa, Neisseria meningitidis; identical to SEQ ID NO: 8069

SEQ ID NO: 21529 - protein, 402 aa, Neisseria meningitidis
MSEAEYFSHFISNGNGKLLEIPQRRGRQDGVFIDWLSFTMHEDSLLKVSGCPLVSDAEYMFVLSKKLEEILGFGITSRCKSKGNKFYDSMFRLGSEEVDYGEVHYGGQRNTVLIELKGVGCNIANPGWELRLKQFLEDSLRPRITRVDLALDFFDGEYTPEQALLDHDNGFFDNSNMRPKSEMIGTAWRREDGSGKTFYVGRKKNSRFVRVYEKGRQLGDKESKWVRFEIQFNHGDMEIPLDILINQGSYFSGAFPICQKFKNMPNPERFDYRKKVANLTFQHKLRYAKNAVGKLINFMFDMGFDTDEIVKYLKADAGYPKGLEPEKYSLAGLKESLKFGFIHEQQDVDLEIELEELGIIKFKQSDKFDPDKRLFDPHHDAESEGQYQLYLDRMYDLHANQN

SEQ ID NO: 21530 - protein, 191 aa, Neisseria meningitidis; identical to SEQ ID NO: 9646

SEQ ID NO: 21531 - protein, 458 aa, Neisseria meningitidis; identical to SEQ ID NO: 8830

SEQ ID NO: 21532 - protein, 102 aa, Neisseria meningitidis
MEYCEPEEASDPYATYRRASLMAMLPLFVVILVLLNIVFPLLAHPLAWLVPAGFMVLVGGFPLSLPLVALLVLTCCILAHCPPLSRLLCCPCPNHPMSKNSA

SEQ ID NO: 21533 - protein, 152 aa, Neisseria meningitidis
  misc_feature 2, 3: 'Xaa' is any amino acid
VXXNRDNAKNYVKIETKHQGNGSFHAASSLGLSAIYDFKLNDKFKPYIGARVAYGHVKHQVHSVETKTTTVTSKPTATSPQGGPIIQTDPSKPPYHESHSISSLGLGVIAGVGFDITPKLTLDTGYRYHNWGRLENTRFKTHEVSLGMRYHF

SEQ ID NO: 21534 - protein, 384 aa, Neisseria meningitidis; identical to SEQ ID NO: 9041

SEQ ID NO: 21535 - protein, 358 aa, Neisseria meningitidis
VCRMFDGISVKMTAFPSEAESPVMYPLARRILFALDAEKAHHFTLDALYTVYKLGLIPVTGNRTKPVKLMGMDLPNPVGLAAGLDKNGEYIDALGALGFGFIEIGTVTPKPQPGNPQPRLFRVPEHQGIINRMGFNNHGIDTMIRNIEKSKFSGVLGINIGKNAVTPIENAADDYLICLEKAYAHASYITVNISSPNTKNLRALQGGDELSALLEALKNKQAQLASVYGKYVPLAVKIAPDLDEAQIEDIAHVVKSVEMDGIIATNTTIDKSSLGSHPLAGEQGGLSGRPVHEKSNRVLKLLADHIDGKLPIIGVGGIMEGRDAADKIRLGATAVQVYSGLIYKGPALVKECLKALAR

SEQ ID NO: 21536 - protein, 360 aa, Neisseria meningitidis; identical to SEQ ID NO: 9549

SEQ ID NO: 21537 - protein, 52 aa, Neisseria meningitidis; identical to SEQ ID NO: 12591

SEQ ID NO: 21538 - protein, 297 aa, Neisseria meningitidis; identical to SEQ ID NO: 8538

SEQ ID NO: 21539 - protein, 1320 aa, Neisseria meningitidis
MSVVLPLRGVTALSDFRVEKLLQKAAALGLPEVKLSSEFWYFAGSEKALDAATVEKLQALLAAQSVEQTPKAREGLHLFLVTPRLGTISPWASKATNIAENCGLAGIERIERGMAVWLEGALTDEQKQQWAALLHDRMTESVLPDFQTASKLFHHLESETFSTVDVLGGGKEALVKANTEMGLALSADEIDYLVENYQALQRNPSDVELMMFAQANSEHCRHKIFNADFILNGEKQPKSLFGMIRDTHNAHPEGTVVAYKDNSSVIEGAKIERFYPNAAENQGYRFHEEDTHIIMKVETHNHPTAIAPFAGAATGAGGEIRDEGATGKGSRPKAGLTGFTVSNLNIPGLKQPWEQDYGKPEHISSPLDIMIEGPIGGAAFNNEFGRPNLLGYFRTFEEKFDGQVRGYHKPIMIAGGLGSIQAQQTHKDEIPEGALLIQLGGPGMLIGLGGGAASSMDTGTNDASLDFNSVQRGNPEIERRAQEVIDRCWQLGDKNPIISIHDVGAGGLSNAFPELVNDAGRGAVFELREVPLEEHGLTPLQIWCNESQERYVLSILEKDLDTFRAICERERCPFAVVGTATDDGHLKVRDDLFANNPIDLPLNVLLGKPPKTTRTDKTVTPSKKPFHADDIDITEAAYRVLHLPAVAAKNFLITIGDRSVGGMTHRDQMVGKYQTPVADCAVTMMGFNTYRGEAMSMGEKPTVALFDAPASGRMCVGEAITNIAAVNIGDIGNIKLSANWMAACGNEGEDEKLYRTVEAVSKACQALDLSIPVGKDSLSMKTVWQDGEEKKSVVSPLSLIISAFAPVQDVRKTVTPELKNVEDSVLLFVDLGFGKARMGGSAFGQVYNNMSGDAPDLDDTGRLKAFYNVIQQLVAEDKLLAYHDRSDGGLFAVLVEMAFAGRCGLDIDLNLLLAQTFITNHTALSQSLRTEEVKALAEWQETIARTLFNEELGAVIQVRKQDVADIINLFYQQQLHHNVFEIGTLTDENTLIIRDGQTHLISDNLIKLQQTWQETSHQIQRLRDNPACADSEFALIGDNDRSALFANLKFDVNEDIAAPFINSGAKPKIAILREQGVNGQIEMAAAFTRAGFDAYDVHMSDLMAGRFRLADFKMLAACGGFSYGDVLGAGEGWAKSILFHPALRDQFAAFFADPDTLTLGVCNGCQMVSNLAEIIPGAEAWPKFKRNLSEQFEARLSMVHVPKSASLILNEMQGSSLPVVVSHGEGRADFALHGGNISADLGIALQYVDGQNQVTQTYPLNPNGSPQGIAGVTNADGRVTIMMPHPERVYRAAQMSWKPEDWTELSGWYRLFAGARKALG

SEQ ID NO: 21540 - protein, 107 aa, Neisseria meningitidis; identical to SEQ ID NO: 2314

SEQ ID NO: 21541 - protein, 250 aa, Neisseria meningitidis; identical to SEQ ID NO: 11088

SEQ ID NO: 21542 - protein, 321 aa, Neisseria meningitidis; identical to SEQ ID NO: 4435

SEQ ID NO: 21543 - protein, 371 aa, Neisseria meningitidis; identical to SEQ ID NO: 2339

SEQ ID NO: 21544 - protein, 328 aa, Neisseria meningitidis; identical to SEQ ID NO: 991

SEQ ID NO: 21545 - protein, 209 aa, Neisseria meningitidis; identical to SEQ ID NO: 1305

SEQ ID NO: 21546 - protein, 282 aa, Neisseria meningitidis; identical to SEQ ID NO: 1323

SEQ ID NO: 21547 - protein, 280 aa, Neisseria meningitidis; identical to SEQ ID NO: 9982

SEQ ID NO: 21548 - protein, 369 aa, Neisseria meningitidis; identical to SEQ ID NO: 9667

SEQ ID NO: 21549 - protein, 135 aa, Neisseria meningitidis; identical to SEQ ID NO: 9106

SEQ ID NO: 21550 - protein, 116 aa, Neisseria meningitidis; identical to SEQ ID NO: 3501

SEQ ID NO: 21551 - protein, 114 aa, Neisseria meningitidis; identical to SEQ ID NO: 9878

SEQ ID NO: 21552 - protein, 248 aa, Neisseria meningitidis; identical to SEQ ID NO: 8534

SEQ ID NO: 21553 - protein, 266 aa, Neisseria meningitidis; identical to SEQ ID NO: 8747

SEQ ID NO: 21554 - protein, 275 aa, Neisseria meningitidis
MDGEGMSVGHYENFPVGSLILPRRLRKPVHAVYAFARTADDMADEGSMPSEARLAGLEGLQRELDVLASGGRSAHPLIARLDAEAVVPFGLDLQPFYDLLSAFSQDVVKTRYAHFGELADYCRRSANPVGRIMLALYGKTDAVCVAQSDGICTALQLVNFWQDVAVDWQKGRVYIPQDDLLKFGVSEGQIAEGRADEAFQRLMAYECRRAFRMLKAGSPLARELKGRIGLELRMIVLGAQLILQKLDACRYDVFAQRPVLDKKDWLIMLKRALWK

SEQ ID NO: 21555 - protein, 269 aa, Neisseria meningitidis
MIDFDKPAEEDAIYQSRLKKIVSDDLVLYNENSLNVMRKILEKYPNGCFDMIFSDPPYFLSNDGFSCQNGQMVSVNKGNWDKSKGMAADLEFYEEWLRLCYALLKPNGTIWVCGTFHNIYLIGYLMQTIGYHILNNITWEKPNPPPNLSCRFFTHSTETILWAKKNKKAKHTFHYEMMKAQNDGKQMKCVWTFPPPNKAEKTFGKHPTQKPLSLLERCILSASNIGDLIFDPFMGSGTTGVAALKHGRKFCGCELEEDFFELAKKRLEK

SEQ ID NO: 21556 - protein, 380 aa, Neisseria meningitidis; identical to SEQ ID NO: 2973

SEQ ID NO: 21557 - protein, 351 aa, Neisseria meningitidis; identical to SEQ ID NO: 1414

SEQ ID NO: 21558 - protein, 431 aa, Neisseria meningitidis; identical to SEQ ID NO: 8313

SEQ ID NO: 21559 - protein, 136 aa, Neisseria meningitidis; identical to SEQ ID NO: 1274

SEQ ID NO: 21560 - protein, 738 aa, Neisseria meningitidis
VLEYAARSRRSDGIPTHRQKHHDRNQEKNMAYQVLARKWRPKTFSDLVGQEHVVKALQNALDEGRLHHAYLLTGTRGVGKTTIARILAKSLNCENAQHGEPCGVCESCTQIDAGRYVDLLEIDAASNTGIDNIREVLENAQYAPTAGKYKVYIIDEVHMLSKSAFNAMLKTLEEPPEHVKFILATTDPHKVPVTVLSRCLQFVLHNMTSQQVADHLAHVLDSEKIAYEPPALQLLGRAAAGSMRDALSLLDQAIAMGSGSVAEQDVRQMIGAVDKQYLYELLTGIINQDGAALTAKAQEMAACAVGFDNALGELAILLQHLALIQAVPSALAHDDPDSDILHRLAQTISGEQIQLYYQIAVHGKRDLSLAPDEYAGFMMTLLRMLAFAPLAAASCDTNAVIENTELKSPSAQTAEKETAVKKPQPRPEAETAQTPVQTASAAAMPSEGKTAGPVSNQENNDVPPWEDAPDEAQAAAGTAQTSAKSIQTASEAETPPENQVSKNKAADNVTDAPLSEVPSENPIQATPNDEAVETETFAHEAPAEPFYGYGFPDNDCPVEDGAEIPPPDWEHAAPADTAGGGADEEAEAGGIGGNNTPSAPPPEFSTENWAAIVRHFARKLGAAQMPAQHSAWTEYHPDTGLMVLAMTAEARATADKKRLDKIRDTLAQAYGLQLTLQTQDWRDEAGRETPAMQDKRVQAEDRQKAQALLEADPAAQKILQAFGAQWQPESLELAANRP

SEQ ID NO: 21561 - protein, 274 aa, Neisseria meningitidis; identical to SEQ ID NO: 9480

SEQ ID NO: 21562 - protein, 166 aa, Neisseria meningitidis; identical to SEQ ID NO: 8644

SEQ ID NO: 21563 - protein, 324 aa, Neisseria meningitidis; identical to SEQ ID NO: 8254

SEQ ID NO: 21564 - protein, 159 aa, Neisseria meningitidis; identical to SEQ ID NO: 7978

SEQ ID NO: 21565 - protein, 414 aa, Neisseria meningitidis; identical to SEQ ID NO: 9411

SEQ ID NO: 21566 - protein, 61 aa, Neisseria meningitidis; identical to SEQ ID NO: 9566

SEQ ID NO: 21567 - protein, 436 aa, Neisseria meningitidis; identical to SEQ ID NO: 1523

SEQ ID NO: 21568 - protein, 250 aa, Neisseria meningitidis; identical to SEQ ID NO: 3444

SEQ ID NO: 21569 - protein, 423 aa, Neisseria meningitidis; identical to SEQ ID NO: 3402

SEQ ID NO: 21570 - protein, 701 aa, Neisseria meningitidis
MSIYLSRLSFGFSRRLLVVLQTEAAECGLACLVSVLGFHGFYTDLRHLRARFSLSLKGATLADLVRFANSMNLTARAVRLDLDELVNLRLPCILHWDLNHFVVLHEVHRNHIVIMNPASGWQKVRMEEVSRCFTGIALELFPNTQFEEKHETRKIRILPMLRGVVGLKRSLFQLLLLAAVLQVFALASPFFMQWVIDHAIVSADRDLLLTLALGFGLLMIVQQLVSLLQTWAGMYLSTSLNIQWKANVFRRLMDLPVSYFTKRHLGDVVSRFGSVDSIQSTLTSTFFVLVLNSIMAVFTLGLMYLYSPSLTAVVLVVLLIYIGIRWVAYYPLRHATEENIVHAAKQSSYFMETIRGIQTVKLFDKNAQRHAAWLNLFVDTINTGLTTQKLSAMFGFANSLLFGIANILIVYFGAVSVLDGVFTVGALMALMAFMSYKSQFESKAGSLIDQFVQIKMLGLHAERLADIVLEKTENEQNNDFRLPKNLEHFDIKIENLSFRYAENEPYILQDFSLIIKQGTAIAFAGHSGCGKSTLIQILTGSLKPESGHVLLGENDIHAFPPAFIRKWSASVMQDDVLFAGSIAENISFFDDTPNMEKIAFCAQMANIHHEIVAMPMAYETLIGDMGSALSGGQKQRIVLARALYREPKILFLDEASSHLDINNERVINDNLRQLNITKIMVAHRQETLNTADSVVYLDKVA

SEQ ID NO: 21571 - protein, 88 aa, Neisseria meningitidis; identical to SEQ ID NO: 2853

SEQ ID NO: 21572 - protein, 505 aa, Neisseria meningitidis; identical to SEQ ID NO: 2005

SEQ ID NO: 21573 - protein, 183 aa, Neisseria meningitidis
MGIAHGRRSDFIRLRIQPFVQIGFARIQCLRNHKRFDCRTGFDHIGYGTVAPLFAVCPAGPVGIVGGRIGQGEDFPRAGIQNHHRSGFCLMVFDRLVQLFIGQGLNPLIEGKDDVFAVFRGFIARGVQAVHNIALPVPQNDFRAVFAMQAVFKRKFQTFLTFAVNIGKSDDVCKQVAHRVMAF

SEQ ID NO: 21574 - protein, 405 aa, Neisseria meningitidis; identical to SEQ ID NO: 9801

SEQ ID NO: 21575 - protein, 325 aa, Neisseria meningitidis; identical to SEQ ID NO: 8068

SEQ ID NO: 21576 - protein, 405 aa, Neisseria meningitidis; identical to SEQ ID NO: 163

SEQ ID NO: 21577 - protein, 72 aa, Neisseria meningitidis; identical to SEQ ID NO: 8274

SEQ ID NO: 21578 - protein, 391 aa, Neisseria meningitidis; identical to SEQ ID NO: 7218

SEQ ID NO: 21579 - protein, 172 aa, Neisseria meningitidis; identical to SEQ ID NO: 1304

SEQ ID NO: 21580 - protein, 227 aa, Neisseria meningitidis; identical to SEQ ID NO: 8089

SEQ ID NO: 21581 - protein, 289 aa, Neisseria meningitidis; identical to SEQ ID NO: 8166

SEQ ID NO: 21582 - protein, 119 aa, Neisseria meningitidis; identical to SEQ ID NO: 8332

SEQ ID NO: 21583 - protein, 480 aa, Neisseria meningitidis
MKQLAMYINGRFENDFNGEWRDVLNPSTEETIAREPKGGKADVDRAVAAARAAQPAWERLPAVERGAYLRKIAQGIRERADELTDTIVAEGGKTKDLARVEVMFTADYLDYQAEWARRYEGEIIQSDRPRENILLFKRPLGVIAGILPWNFPFFLIARKMGPALVTGNTIVVKPSSVTPINCHIFAEIVDAVGLPAGVFNVVNGPGAEIGNALSAHPQVDMVSLTGSVEAGRQVMEAASANITKVSLELGGKAPAIVLKDADLDLAVKSILASRVGNTGQICNCAERVYVHSSLKDAFIEKMTAAMKGVRYGNPAEAEAGALEMGPLIEERAVKAVAEKVERAVKQGAKLVCGGKRAEGRGYFFEPTLLTDTDNSMDIMKEETFGPVLPVSAFDTLDQVIALANDCEFGLTSSVYTTNLNEAFYVTRRLQFGETYINRENFEAMQGFHAGWKKSGIGGADGKHGLEEYLQTQVVYLETDI

SEQ ID NO: 21584 - protein, 103 aa, Neisseria meningitidis; identical to SEQ ID NO: 392

SEQ ID NO: 21585 - protein, 380 aa, Neisseria meningitidis; identical to SEQ ID NO: 8943

SEQ ID NO: 21586 - protein, 172 aa, Neisseria meningitidis
  misc_feature 168, 169, 170: 'Xaa' is any amino acid
MNTIADVQSSRDLRNLPINQVGIKDLRFPITLQTAEGIQSTVARLTMTVYLPAEQKGTHMSRFVALMEQHAEALDFAQLRRLTAEMVALLDSRAGKISVSFPFFRKKTAPVSGIQSLLDYDVSLTGEMKDGAYGHSMKVMIPVTSLCPCSKEISQYGAHNQRSHVTVXXXHT

SEQ ID NO: 21587 - protein, 179 aa, Neisseria meningitidis; identical to SEQ ID NO: 8483

SEQ ID NO: 21588 - protein, 459 aa, Neisseria meningitidis
MAKTLKTLYQCTECGGTSPKWQGKCPHCGEWNTLQESLAAPEPKNARFQSWAADTSTVQSLSSVTATEVPRNPTGMGELDRVLGGGLVDGAVILLGGDPGIGKSTLLLQTIAKMAQSRKVLYVSGEESAQQVALRAQRLELPTEGVNLLAEIRMEAIQAALKQHQPEVVVIDSIQTMYSDQITSAPGSVSQVRECAAQLTRMAKQMGIAMILVGHVTKDGAIAGPRVLEHMVDTVLYFEGDQHSNYRMIRAIKNRFGAANELGVFAMTENGLKGVSNPSAIFLASYRDDTPGSCVLVTQEGSRPLLVEIQALVDDAHGFTPKRLTVGLEQNRLAMLLAVLNRHGGIACFDQDVFLNAVGGVKIGEPAADLAVILAMLSSFRNRPMPEKTVVFGEIGLSGEVRPVARGQERLKEAEKLGFKRAIVPKANMPRNAKEFPNLKIYGVSSLQEAIDICRDSRE

SEQ ID NO: 21589 - protein, 59 aa, Neisseria meningitidis; identical to SEQ ID NO: 642

SEQ ID NO: 21590 - protein, 72 aa, Neisseria meningitidis; identical to SEQ ID NO: 113

SEQ ID NO: 21591 - protein, 121 aa, Neisseria meningitidis; identical to SEQ ID NO: 1070

SEQ ID NO: 21592 - protein, 572 aa, Neisseria meningitidis; identical to SEQ ID NO: 9024

SEQ ID NO: 21593 - protein, 238 aa, Neisseria meningitidis
LVKCCLKIISDGIFIWGESEVASVFLEGEAVEVGNIFCIGRNYAAHIEELKNEIPSEPVVFMKPSGSILNSGGTILLPEFSRDVQFECELVLLVGKDSDGMGEGEDILGCVAGYGVGLDLTARDIQCHLKAQGLPWLKAKGFRHSACVSDFAAADRIGNPEKVLFSLKQNGVLKQRGDTGLMIYPIREILHKLAADYGLGKGDLVFTGTPSGVGAIGAGDNLALELDGLVRASFTVGC

SEQ ID NO: 21594 - protein, 841 aa, Neisseria meningitidis; identical to SEQ ID NO: 9156

SEQ ID NO: 21595 - protein, 203 aa, Neisseria meningitidis; identical to SEQ ID NO: 2845

SEQ ID NO: 21596 - protein, 60 aa, Neisseria meningitidis; identical to SEQ ID NO: 2815

SEQ ID NO: 21597 - protein, 259 aa, Neisseria meningitidis; identical to SEQ ID NO: 2605

SEQ ID NO: 21598 - protein, 382 aa, Neisseria meningitidis; identical to SEQ ID NO: 2860

SEQ ID NO: 21599 - protein, 107 aa, Neisseria meningitidis; identical to SEQ ID NO: 9249

SEQ ID NO: 21600 - protein, 133 aa, Neisseria meningitidis
  misc_feature 127, 128: 'Xaa' is any amino acid
MKKTLTLLAVSALFATSAHAHRVWVETAHTHGGEYLKADLGYGEFPELEPIAKDRLHIFSKPMQLVTEKGKENMIQRGTYNYQYRSNRPVKDGSYLVIAEYQPTFWSKNKAGWKQAGIKEMPDASYXXTHLIN

SEQ ID NO: 21601 - protein, 68 aa, Neisseria meningitidis; identical to SEQ ID NO: 2429

SEQ ID NO: 21602 - protein, 465 aa, Neisseria meningitidis; identical to SEQ ID NO: 1096

SEQ ID NO: 21603 - protein, 1568 aa, Neisseria meningitidis; identical to SEQ ID NO: 9504

SEQ ID NO: 21604 - protein, 240 aa, Neisseria meningitidis
MPETGFRAFLRQMPSETTKQRFRRHPFQKRTIMKNIVILISGRGSNMQAIVNAAIPNVRIAAVLSNSETAAGLQWAAERGIPTDSLHHKNFESRLAFDTAMMEKIDAYQPDLVVLAGFMRILTPEFCAHYEGRLMNIHPSILPSFTGLHTHERALEAGCRVAGCTIHFVTAELDCGPIVSQGVVPILDGDTADDVAARVLAVEHKLYPKAVADFAAGRLIIEGNRVRNSENADAARFLTA

SEQ ID NO: 21605 - protein, 367 aa, Neisseria meningitidis; identical to SEQ ID NO: 8481

SEQ ID NO: 21606 - protein, 236 aa, Neisseria meningitidis
MSPVLYLIPTPLGTPDTPCLLPHEQQAIVGLTDFVVEAEKTARAHLKHLGVTTPIRELNLQTLNEHTDLKTLPELLKPLQEGRSMGIVSEAGCPAVADPGANLVALAHKHGFEVRPLVGPSSLLLALMASGANGQSFAFKGYLPSEKNERIQAFRALEQRSRQCGETQIFIETPYRNDALLADAVENLHPETRLCTATDLTLPTQEIISQTIVQWRKRKEMPNLKKRPTIFVMYAG

SEQ ID NO: 21607 - protein, 442 aa, Neisseria meningitidis; identical to SEQ ID NO: 4352

SEQ ID NO: 21608 - protein, 193 aa, Neisseria meningitidis; identical to SEQ ID NO: 1378

SEQ ID NO: 21609 - protein, 269 aa, Neisseria meningitidis; identical to SEQ ID NO: 3572

SEQ ID NO: 21610 - protein, 348 aa, Neisseria meningitidis; identical to SEQ ID NO: 9601

SEQ ID NO: 21611 - protein, 384 aa, Neisseria meningitidis; identical to SEQ ID NO: 4652

SEQ ID NO: 21612 - protein, 208 aa, Neisseria meningitidis; identical to SEQ ID NO: 1448

SEQ ID NO: 21613 - protein, 147 aa, Neisseria meningitidis; identical to SEQ ID NO: 1095

SEQ ID NO: 21614 - protein, 163 aa, Neisseria meningitidis; identical to SEQ ID NO: 3739

SEQ ID NO: 21615 - protein, 432 aa, Neisseria meningitidis; identical to SEQ ID NO: 8301

SEQ ID NO: 21616 - protein, 406 aa, Neisseria meningitidis
LDKWEITIMAKIITPLSANQVKNAKPRDKLYKLSDGGGLALWVYPTGGRSWKLSFVQDGRQQTISLGRYPDFSLADAREWREEVRRKRAHGENVVNKKVRADFAFEKVARDWFVRWSKGRSEKYAGQVMRNFERWVFPAIGNLDIRQVRTADVVGCLRVMEARGIVDTLRKTKNSLKMVFAFAVGSGMMEINPVAQIGSGVFERAKTGNMAALSPSELPRLIDFLEQRNEFAVYAGRVRIHPVTRLCIYWLLLTMTRIQEAALMEWSELDGEVWRIPAERKKERRGHDVPLSRAMQWVLDQARALNVNGRFVFESVNFQGHINKESPRVAMQRAGLDTTAHGLRLLARTYLREVLKVDNDVAEKLLAHSLGTRTQTAYNRSELWEERKDALERWGNDVLRLAKNGK

SEQ ID NO: 21617 - protein, 206 aa, Neisseria meningitidis; identical to SEQ ID NO: 1193

SEQ ID NO: 21618 - protein, 361 aa, Neisseria meningitidis; identical to SEQ ID NO: 10800

SEQ ID NO: 21619 - protein, 375 aa, Neisseria meningitidis; identical to SEQ ID NO: 777

SEQ ID NO: 21620 - protein, 354 aa, Neisseria meningitidis
MALVSMRQLLDHAAENSYGLPAFNVNNLEQMRAIMEAADQVGAPVIVQASAGARKYAGAPFLRHLILAAVEEFPHIPVVMHQDHGASPDVCQRSIQLGFSSVMMDGSLMEDGKTPSSYEYNVNATRTVVNFSHACGVSVEGEIGVLGNLETGEAGEEDGVGAVGKLSHDQMLTSVEDAVRFVKDTGVDALAIAVGTSHGAYKFTRPPTGDVLRIDRIKEIHQALPNTHIVMHGSSSVPQEWLKVINEYGGNIGETYGVPVEEIVEGIKHGVRKVNIDTDLRLASTGAVRRYLAENPSDFDPRKYLSKTIEAMKQICLDRYFAFGCEGQAGKIKPVSLEKMASRYAKGELNQIVK

SEQ ID NO: 21621 - protein, 343 aa, Neisseria meningitidis; identical to SEQ ID NO: 614

SEQ ID NO: 21622 - protein, 448 aa, Neisseria meningitidis; identical to SEQ ID NO: 2224

SEQ ID NO: 21623 - protein, 93 aa, Neisseria meningitidis; identical to SEQ ID NO: 9009

SEQ ID NO: 21624 - protein, 79 aa, Neisseria meningitidis; identical to SEQ ID NO: 8059

SEQ ID NO: 21625 - protein, 133 aa, Neisseria meningitidis; identical to SEQ ID NO: 2967

SEQ ID NO: 21626 - protein, 245 aa, Neisseria meningitidis; identical to SEQ ID NO: 9622

SEQ ID NO: 21627 - protein, 221 aa, Neisseria meningitidis; identical to SEQ ID NO: 9751

SEQ ID NO: 21628 - protein, 112 aa, Neisseria meningitidis; identical to SEQ ID NO: 8651

SEQ ID NO: 21629 - protein, 150 aa, Neisseria meningitidis; identical to SEQ ID NO: 9439

SEQ ID NO: 21630 - protein, 99 aa, Neisseria meningitidis; identical to SEQ ID NO: 1110

SEQ ID NO: 21631 - protein, 468 aa, Neisseria meningitidis; identical to SEQ ID NO: 3129

SEQ ID NO: 21632 - protein, 329 aa, Neisseria meningitidis; identical to SEQ ID NO: 247

SEQ ID NO: 21633 - protein, 264 aa, Neisseria meningitidis; identical to SEQ ID NO: 9656

SEQ ID NO: 21634 - protein, 62 aa, Neisseria meningitidis; identical to SEQ ID NO: 3927

SEQ ID NO: 21635 - protein, 351 aa, Neisseria meningitidis; identical to SEQ ID NO: 2371

SEQ ID NO: 21636 - protein, 158 aa, Neisseria meningitidis; identical to SEQ ID NO: 6684

SEQ ID NO: 21637 - protein, 223 aa, Neisseria meningitidis; identical to SEQ ID NO: 8598

SEQ ID NO: 21638 - protein, 78 aa, Neisseria meningitidis
VPTIRKTMKAIHPYACPRCCRLPANTFRTGMANSASKFCIAKGGRREVKKDESGGGYALCHLPDSRIVEEWEYFRSQH

SEQ ID NO: 21639 - protein, 233 aa, Neisseria meningitidis; identical to SEQ ID NO: 6431

SEQ ID NO: 21640 - protein, 215 aa, Neisseria meningitidis
  misc_feature 3, 4: 'Xaa' is any amino acid
VCXXAAVSLTGCATESSRSLEVEKVASYNTQYHGVRTPISVGTFDNRSSFQKGIFSDGEDRLGSQAKTILVTHLQQTNRFNVLNRTNLNALKQESGISGKAHNLKGADYVVTGDVTEFGRRDVGDHQLFGILGRGKSQIAYAKVALNIVNVNTSEIVYSAQGAGEYALSNREIIGFGGTSGYDATLNGKVLDLAIREAVNSLVQAVDNGAWQPNR

SEQ ID NO: 21641 - protein, 385 aa, Neisseria meningitidis
MRKKLTALVLSALPLAAVADVSLYGEIKAGVEGRNIQLQLTEPLQNIQPQVTKRKSRIRTKISDFGSFIGFKGSEDLGEGLKAVWQLEQDVSVAGGGATQWGNRESFIGLAGEFGTLRAGRVANQFDDASQAIDPWDSNNDVASQLGIFKRHDDMPVSVRYDSPEFSGFSGSVQFVPAQNSKSAYTPAHFVQQTPKSQPNLVPAVVGKPGSDVYYAGLNYKNGGFAGNYAFKYAKHANVGRDAFELFLLGSGSDEAKGTDPLKNHQVHRLTGGYEEGGLNLALAAQLDLSENGDKTKNSTTEIAATASYRFGNAVPRISYAHGFDFIERGKKGENTSYDQIIAGVDYDFSKRTSAIVSGAWLKRNTGIGNYTQINAASVGLRHKF

SEQ ID NO: 21642 - protein, 103 aa, Neisseria meningitidis; identical to SEQ ID NO: 2548

SEQ ID NO: 21643 - protein, 245 aa, Neisseria meningitidis; identical to SEQ ID NO: 4611

SEQ ID NO: 21644 - protein, 979 aa, Neisseria meningitidis; identical to SEQ ID NO: 9381

SEQ ID NO: 21645 - protein, 93 aa, Neisseria meningitidis; identical to SEQ ID NO: 8307

SEQ ID NO: 21646 - protein, 367 aa, Neisseria meningitidis; identical to SEQ ID NO: 8122

SEQ ID NO: 21647 - protein, 1421 aa, Neisseria meningitidis; identical to SEQ ID NO: 8590

SEQ ID NO: 21648 - protein, 465 aa, Neisseria meningitidis; identical to SEQ ID NO: 9615

SEQ ID NO: 21649 - protein, 431 aa, Neisseria meningitidis
LAGVGKLARLGAKFSTRAVPYVGTALLAHDVYETFKEDIQAQGYQYDPETDKFVKGYEYSNCLWYEDERRINRTYGCYGVDSSIMRLMSDYSRFPEVKELMESQMYRLARPFWNWHKEELNKLSSLDWNNFVLNRCTFDWNGGDCVVNKGDDYRNGANFSLIRNSKYKEEMDAKKLEEILSLKVDANPDKYIKATGYPGYSEKVEVAPGTKVNMGPVTDRNGNPVQVVATFGRDSQGNTTVDVQVIPRPDLTPGSAEAPNAQPLPEVSPAENPANNPAPNENPGTRPNPEPDPDLNPDANPDTDGQPGTSPDSPAVPDRPNGRDGKDGGLLCKFFPDILACDRLPEPNPAEDLNLPSETVNVEFKKSGIFQDSAQCPAPVTFTITVLDSSKQFAFSFENACTIAERLRYMLLALAWAVAAFFCIRTVSREV

SEQ ID NO: 21650 - protein, 331 aa, Neisseria meningitidis
MLRKLLKWSAVFLTVSAAVFAALLFVPKDNGRAYRIKIAKNQGISSVGRKLAEDRIVFSRHVLTAAAYVLGVHNRLHTGTYRLPSEVSAWDILQKMRGGRPDSVTVQIIEGSRFSHMRKVIDATPDIEHDTKGWSNEKLMAEVAPDAFSGNPEGQFFPDSYEIDAGGSDLRIYQTAYKAMQRRLNEAWESRQDGLPYKNPYEMLIMASLVEKETGHEADRDHVASVFVNRLKIGMRLQTDPSVIYGMGAAYKGKIRKADLRRDTPYNTYTRGGLPPTPIALPGKAALDAAAHPSGEKYLYFVSKMDGTGLSQFSHDLTEHNAAVRKYILKK

SEQ ID NO: 21651 - protein, 81 aa, Neisseria meningitidis; identical to SEQ ID NO: 8766

SEQ ID NO: 21652 - protein, 211 aa, Neisseria meningitidis
  misc_feature 207, 208, 209: 'Xaa' is any amino acid
MICRKPIGHTPYFDMNKTICRTAALLISGFSYANTVIPDVSPVAQGQHVFINIPQQRLFLYTDGKLTKVYPVAVGRAMTQTNLGEHKIGAKAYNPVWYIPKSIQKERGDGVKTIAAGPDNPLGPVFVRLGDPKLGLGIHGTNAPASVPGVRSHGCVRMKSPDALEFAKTIASGSPASVIYQMAGLNEDADRNLWLAAFRDPYGKNNXXXHT

SEQ ID NO: 21653 - protein, 348 aa, Neisseria meningitidis; identical to SEQ ID NO: 9769

SEQ ID NO: 21654 - protein, 220 aa, Neisseria meningitidis; identical to SEQ ID NO: 2583

SEQ ID NO: 21655 - protein, 50 aa, Neisseria meningitidis; identical to SEQ ID NO: 2715

SEQ ID NO: 21656 - protein, 130 aa, Neisseria meningitidis
MYSFEANANAVKISETVSVDTGQGAKIHKFVPKNSKTYSSDLIKTVDLTHIPTGAKARINAKITASISRAGVLAGGGKLARLGAKFSTRAVPYVGTALLAHDVYETFKEDIQARGYQYDTETDKFVKVSG

SEQ ID NO: 21657 - protein, 121 aa, Neisseria meningitidis; identical to SEQ ID NO: 1865

SEQ ID NO: 21658 - protein, 758 aa, Neisseria meningitidis; identical to SEQ ID NO: 7983

SEQ ID NO: 21659 - protein, 233 aa, Neisseria meningitidis; identical to SEQ ID NO: 8026

SEQ ID NO: 21660 - protein, 279 aa, Neisseria meningitidis; identical to SEQ ID NO: 343

SEQ ID NO: 21661 - protein, 96 aa, Neisseria meningitidis; identical to SEQ ID NO: 8277

SEQ ID NO: 21662 - protein, 693 aa, Neisseria meningitidis; identical to SEQ ID NO: 8128

SEQ ID NO: 21663 - protein, 172 aa, Neisseria meningitidis
MPSETPFSLSESRHYEFEGNSTIIRHSDLQTASRPSDRTQTKRKYMFRTMLGGKIHRATVTEADLNYVGSITVDQDLLDAAGIYPNEKVAIVNNNNGERFETYTISGKRGSGVVCLNGAAARLVQKGDIVIIMSYVQLSEPEIAAHEPKVVLVDGNNKIRDIISYEPPHTVL

SEQ ID NO: 21664 - protein, 141 aa, Neisseria meningitidis; identical to SEQ ID NO: 7

SEQ ID NO: 21665 - protein, 149 aa, Neisseria meningitidis; identical to SEQ ID NO: 4552

SEQ ID NO: 21666 - protein, 218 aa, Neisseria meningitidis; identical to SEQ ID NO: 9359

SEQ ID NO: 21667 - protein, 83 aa, Neisseria meningitidis; identical to SEQ ID NO: 8382

SEQ ID NO: 21668 - protein, 428 aa, Neisseria meningitidis; identical to SEQ ID NO: 3581

SEQ ID NO: 21669 - protein, 77 aa, Neisseria meningitidis; identical to SEQ ID NO: 3979

SEQ ID NO: 21670 - protein, 171 aa, Neisseria meningitidis; identical to SEQ ID NO: 2512

SEQ ID NO: 21671 - protein, 273 aa, Neisseria meningitidis; identical to SEQ ID NO: 8755

SEQ ID NO: 21672 - protein, 268 aa, Neisseria meningitidis; identical to SEQ ID NO: 8566

SEQ ID NO: 21673 - protein, 242 aa, Neisseria meningitidis; identical to SEQ ID NO: 2996

SEQ ID NO: 21674 - protein, 64 aa, Neisseria meningitidis; identical to SEQ ID NO: 7996

SEQ ID NO: 21675 - protein, 198 aa, Neisseria meningitidis; identical to SEQ ID NO: 12496

SEQ ID NO: 21676 - protein, 680 aa, Neisseria meningitidis; identical to SEQ ID NO: 8404

SEQ ID NO: 21677 - protein, 384 aa, Neisseria meningitidis; identical to SEQ ID NO: 9078

SEQ ID NO: 21678 - protein, 286 aa, Neisseria meningitidis; identical to SEQ ID NO: 8210

SEQ ID NO: 21679 - protein, 230 aa, Neisseria meningitidis
MPSETASDGIVSTRRKPMKAFTKITAIVAPLDRSNVDTDAIIPKQFLKSIKRSGFGPNAFDEWRYLDHGEPGMDNSKRPLNPDFSLNQPRYQGAQILLTRKNFGCGSSREHAPWALDDYGFRAVIAPSFADIFFNNCYKNGLLPIVLTEEQVDRLFKEVEANEGYQLSIDLAEQTLTTPGGETFTFDITEHRKHCLLNGLDEIGLTLQHADEIHAFEEKRRQSQPWLFNG

SEQ ID NO: 21680 - protein, 138 aa, Neisseria meningitidis; identical to SEQ ID NO: 774

SEQ ID NO: 21681 - protein, 199 aa, Neisseria meningitidis; identical to SEQ ID NO: 9118

SEQ ID NO: 21682 - protein, 163 aa, Neisseria meningitidis; identical to SEQ ID NO: 8718

SEQ ID NO: 21683 - protein, 194 aa, Neisseria meningitidis
MHILTAGVDEAGRGPLVGSVFAAAVILPETFDLPGLTDSKKLSEKKRDALAEMIKNQAAAWHVAAATPEEIASLNILHATMLAMKRAVDGLAVRPERIFIDGNRIPEHLGIPAEAVVKGDSKIIEISAASVLAKTARDAEMYALAQRHPQYGFDKHKGYGTKQHLEALKQYGVLPEHRRDFAPVRNLLAQQTLF

SEQ ID NO: 21684 - protein, 390 aa, Neisseria meningitidis; identical to SEQ ID NO: 7103

SEQ ID NO: 21685 - protein, 421 aa, Neisseria meningitidis
MFSFFRRKKKQETPALEEAQIQETAAKAESETDQVIENIKEDAESLAESVKGQVESAVETVSGAVEQVKETVAEMLSEAEEAAEKAAEQVEAAKEAIAETVGEAVGQVQEAVATTEEHKLGWAARLKQGLTKSRDKMAKSLAGVFGGGQIDEDLYEELETVLITSDMGMEATEYLMKDVRDRVSLKGLKDGNELRGALKEALYDLIKPLEKPLVLPETKEPFVIMLAGINGAGKTTSIGKLAKYFQAQGKSVLLAAGDTFRAAAREQLQAWGERNNVTVISQTTGDSAAVCFDAVQAAKARGIDIVLADTAGRLPTQLHLMEEIKKVKRVLQKAMPDAPHEIIVVLDANIGQNAVNQVKAFDDALGLTGLIVTKLDGTAKGGILAALASDRPVPVRYIGVGEGIDDLRPFDARAFVDALLD

SEQ ID NO: 21686 - protein, 488 aa, Neisseria meningitidis; identical to SEQ ID NO: 3695

SEQ ID NO: 21687 - protein, 245 aa, Neisseria meningitidis; identical to SEQ ID NO: 4045

SEQ ID NO: 21688 - protein, 255 aa, Neisseria meningitidis; identical to SEQ ID NO: 8663

SEQ ID NO: 21689 - protein, 456 aa, Neisseria meningitidis; identical to SEQ ID NO: 8567

SEQ ID NO: 21690 - protein, 381 aa, Neisseria meningitidis; identical to SEQ ID NO: 8412

SEQ ID NO: 21691 - protein, 74 aa, Neisseria meningitidis; identical to SEQ ID NO: 2464

SEQ ID NO: 21692 - protein, 277 aa, Neisseria meningitidis; identical to SEQ ID NO: 2920

SEQ ID NO: 21693 - protein, 248 aa, Neisseria meningitidis; identical to SEQ ID NO: 639

SEQ ID NO: 21694 - protein, 66 aa, Neisseria meningitidis; identical to SEQ ID NO: 2062

SEQ ID NO: 21695 - protein, 944 aa, Neisseria meningitidis; identical to SEQ ID NO: 8761

SEQ ID NO: 21696 - protein, 311 aa, Neisseria meningitidis; identical to SEQ ID NO: 8181

SEQ ID NO: 21697 - protein, 289 aa, Neisseria meningitidis; identical to SEQ ID NO: 2681

SEQ ID NO: 21698 - protein, 218 aa, Neisseria meningitidis; identical to SEQ ID NO: 3206

SEQ ID NO: 21699 - protein, 163 aa, Neisseria meningitidis; identical to SEQ ID NO: 9470

SEQ ID NO: 21700 - protein, 166 aa, Neisseria meningitidis; identical to SEQ ID NO: 8979

SEQ ID NO: 21701 - protein, 144 aa, Neisseria meningitidis; identical to SEQ ID NO: 6

SEQ ID NO: 21702 - protein, 225 aa, Neisseria meningitidis; identical to SEQ ID NO: 8438

SEQ ID NO: 21703 - protein, 194 aa, Neisseria meningitidis; identical to SEQ ID NO: 666

SEQ ID NO: 21704 - protein, 189 aa, Neisseria meningitidis
MAAGKHTKHSNRVRIIGGQCRGRKLSFTSADGLRPTPDSVREKLFNWLGQDLTGKTVLDLFGGSGALGMEAASRHAKRIVIADNNRQTVQTLEKNSRELGLGQVQIVFSDGIAYLKTASEQFDVVFLDPPFAWQDWQILFDALKPCLNPRAFVYLEAGTLPDIPDWLTEYREGKSGQSTFELRVFQVAE

SEQ ID NO: 21705 - protein, 418 aa, Neisseria meningitidis; identical to SEQ ID NO: 8075

SEQ ID NO: 21706 - protein, 216 aa, Neisseria meningitidis; identical to SEQ ID NO: 8961

SEQ ID NO: 21707 - protein, 199 aa, Neisseria meningitidis; identical to SEQ ID NO: 1276

SEQ ID NO: 21708 - protein, 149 aa, Neisseria meningitidis; identical to SEQ ID NO: 5576

SEQ ID NO: 21709 - protein, 91 aa, Neisseria meningitidis; identical to SEQ ID NO: 4054

SEQ ID NO: 21710 - protein, 713 aa, Neisseria meningitidis
MCKPNYGGIVLLPLLLASCIGGNFGVQPVVESTPTAYPVTFKSKDVPTSPPAKPSIETTPVNQPAVGAAMRLPRRNIATFDKNGNEIPDSKQAEEYLPLKEEDILFLDGTPQEQADKLKKKINERYPDVKVITSTNEDAKYNYRFVRAGYVFTRGGGYDNEKEKTPDGKEFVNRFSYDGFVYYSGEHPSQSLPRTETVQYSGNWQFVTDAKRWRTQNDGGGINLGFSHFYGNDIGATSYAARDVDDREKHPAKYTVDFGNKTLTGELIKNQYVKPNEQQKPLIIYNITAKLDGNRFTGSASVNPKLKTNYSDKEYLFFHADADQRLEGGFFGDNGEELAGRFISNDNSVFGVFAGKQKTDASNASDTKPALSSGKHTKILDSLKISVDEASDNNARPFAISPMPDFGHPDKLLVEGREIPLVNKEQTIELADGRKMIVRACCDFLTYVKLGRIKTERPASKPKAEDKGEDEEGAGVDNGEEGEDEAVEDEGSEEDEVSEGDNGENEEEIAEEETEEEVEEPEEEVEEPEEELPAEEGNGGSGSILPTPEASKGRDIDLFLKGIRTAEADIPKNGTAHYTGTWEARIGVSDSGTSIQKDSYANQGAKAEFTVDFEAKTVSGMLTEKNDTTPAFYIEKGVIDGNGFHALAHTRENGIDLSGQGSTNPKNFKADNLLVTGGFYGPQAAELGGNIIDSDRKFGAVFGAKKDDKEATR

SEQ ID NO: 21711 - protein, 599 aa, Neisseria meningitidis
LEVGAKPAFFALQSAPDLLLNLPVWKNIFMKASQFFISTLKEAPAEAALASHKLMIRAGLIKANASGLYTWMPMGLRVLRKVENVVREEMARAGSVELLMPVVQPAELWQESGRWEFYGKELLRLKDRHDRDFCMGPTCEEVIADIVRKEINSYKQLPKNFYHIQTKFRDEVRPRFGVMRAREFVMKDAYSFHADYASLQTTYDAMYDAYCRIFTRLGLAFRPVAADTGSIGGTGSHEFQVLAESGEDVIAYSDTSDYAANIELAPTLPLKGERTAAQAELTKVHTPNVKTIESLVEFLNIPVEQTLKSIVVESENEGEIVLLLLRGDHEFNDIKAEKLAGVKSPLTMASSAAIVEQFGANGGSLGPVGFKGKVYADFATEKGADWVIGANEDGYHYTGFNFGRDAAEPEFVDLRNVVEGDESPDGQGRLKLARGIEVGHVFQLRDKYTQAMNVSFLDNNGKSQIMEMGCYGIGITRVVAAAIEQNNDEKGIIWTKAMAPFEVVIVPMNYKKSDAVREAADKIYAELLAAGADVLLDDRDERAGVLLNDSELLGIPHRIVIGDRALKEGNVEYAERRNNEAQAVAIGEIVARVTASLNG

SEQ ID NO: 21712 - protein, 716 aa, Neisseria meningitidis; identical to SEQ ID NO: 11127

SEQ ID NO: 21713 - protein, 321 aa, Neisseria meningitidis; identical to SEQ ID NO: 2168

SEQ ID NO: 21714 - protein, 76 aa, Neisseria meningitidis; identical to SEQ ID NO: 841

SEQ ID NO: 21715 - protein, 68 aa, Neisseria meningitidis; identical to SEQ ID NO: 3446

SEQ ID NO: 21716 - protein, 160 aa, Neisseria meningitidis; identical to SEQ ID NO: 1377

SEQ ID NO: 21717 - protein, 436 aa, Neisseria meningitidis; identical to SEQ ID NO: 8005

SEQ ID NO: 21718 - protein, 544 aa, Neisseria meningitidis; identical to SEQ ID NO: 3972

SEQ ID NO: 21719 - protein, 106 aa, Neisseria meningitidis
MTESEFIRASEALFEHIEDQIDENGWDFDCRFAGNVLTIEAGDGTQIIVNRHTPNQELWIAAKSGGYHFAEQNGKWLATRDSRDFYDVLNEALSAASGEAVEIEEL

SEQ ID NO: 21720 - protein, 174 aa, Neisseria meningitidis; identical to SEQ ID NO: 3281

SEQ ID NO: 21721 - protein, 113 aa, Neisseria meningitidis; identical to SEQ ID NO: 995

SEQ ID NO: 21722 - protein, 125 aa, Neisseria meningitidis; identical to SEQ ID NO: 2523

SEQ ID NO: 21723 - protein, 929 aa, Neisseria meningitidis; identical to SEQ ID NO: 11659

SEQ ID NO: 21724 - protein, 197 aa, Neisseria meningitidis; identical to SEQ ID NO: 1551

SEQ ID NO: 21725 - protein, 311 aa, Neisseria meningitidis; identical to SEQ ID NO: 8738

SEQ ID NO: 21726 - protein, 84 aa, Neisseria meningitidis; identical to SEQ ID NO: 3171

SEQ ID NO: 21727 - protein, 270 aa, Neisseria meningitidis; identical to SEQ ID NO: 2943

SEQ ID NO: 21728 - protein, 284 aa, Neisseria meningitidis; identical to SEQ ID NO: 8130

SEQ ID NO: 21729 - protein, 259 aa, Neisseria meningitidis; identical to SEQ ID NO: 3194

SEQ ID NO: 21730 - protein, 291 aa, Neisseria meningitidis; identical to SEQ ID NO: 2469

SEQ ID NO: 21731 - protein, 92 aa, Neisseria meningitidis; identical to SEQ ID NO: 752

SEQ ID NO: 21732 - protein, 95 aa, Neisseria meningitidis; identical to SEQ ID NO: 3586

SEQ ID NO: 21733 - protein, 1232 aa, Neisseria meningitidis
MTYPIPKPREKSRWPNLSQGSLPLALARYLPHKRLKVVLTQDAEQALRLQTAWRFFRPHDTAVFLPDWETLPYERFSPHQDLVSERLSALWQIKSGAADVLFVPVATAMQKLPPVPFLAGRTFWLKTGQTLDIGRLKTDLVDAGYNHVSHVVAAGEFAVRGGIVDLFPMGSEMPYRIDLFDDEIDSIKTFDTDTQRTISPVSEIRLLPAHEFPTDSEAQKIFRSRFREEVDGNPNDAAVYKAVSNGHFGAGVEYYLPLFFENELETLFDYIGEDALFVSLGDVHAEANRFWSDVKSRYAMAQGDETYPPLLPQHLYLSADVFAGRLKNYGQVLPDVSGKEHALPDLAVNRQSDEPLQALKDFQTAFEGRILLCAESLGRRETMLGFLQQNGLKAKSVSDWQGFLSAHEPLMITVAPLAYGFKLGGLQSPNQQQTTSASEGEGDAVTDQTEFSASATNPLPSPLPQEREQSAAVVSDSLKAAAVSTESSLPPGKSNLHGQIQQQPAPSPVGEGWGEGKAVAAQSAIAVITESDLYQYVARSRVHNRRKKHAAVSDGLLRDLAEINIGDPVVHEEHGIGRYMGLITMDLGGETNEMMLLEYAGEAQLYVPVSQLHLISRYSGQAHENVALHKLGSGAWNKAKRKAAEKARDTAAELLNLYAQRAAQSGHKFEINELDYQAFADGFGYEETEDQAAAIAAVIKDLTQAKPMDRLVCGDVGFGKTEVALRAAFVAVMGGKQVAVLAPTTLLVEQHAQNFADRFADFPVKVASLSRFNNSKATKAALEGLADGTVDIVIGTHKLVQDNIRFKSLGLVIIDEEHRFGVRQKEQLKRLRANVDILTMTATPIPRTLSMALEGLRDFSLITTAPSRRLAVKTFVKPFSEGSVREAVLRELKRGGQVFFLHNEVDTIENMRERLETLLPEARIGVAHGQLRERELEQVMRDFLQQRFNVLLCSTIIETGIDIPNANTIIINRADKFGLAQLHQLRGRVGRSHHQAYAYLLTPEYITKDAEKRLDAIAAADELGAGFTLAMQDLEIRGAGEILGEGQSGEMIQVGFTLYTEMLKQAVRDLKKGRQPDLDAPLGITTEIKLHSPALLPESYCPDIHERLVLYKRLAVCETVQQINAIHEELVDRFGLPEQPVKTLIESHHLRLMAKELGIDAIDAAGEAVTVTFGKNNNVDPTEIILLIQNDKKYRLAGADKLRFTAEMENIEVRINTVKNVLKTLQNRCLPK

SEQ ID NO: 21734 - protein, 94 aa, Neisseria meningitidis; identical to SEQ ID NO: 9607

SEQ ID NO: 21735 - protein, 233 aa, Neisseria meningitidis; identical to SEQ ID NO: 8818

SEQ ID NO: 21736 - protein, 389 aa, Neisseria meningitidis; identical to SEQ ID NO: 7991

SEQ ID NO: 21737 - protein, 156 aa, Neisseria meningitidis; identical to SEQ ID NO: 955

SEQ ID NO: 21738 - protein, 260 aa, Neisseria meningitidis; identical to SEQ ID NO: 2560

SEQ ID NO: 21739 - protein, 195 aa, Neisseria meningitidis; identical to SEQ ID NO: 2216

SEQ ID NO: 21740 - protein, 270 aa, Neisseria meningitidis; identical to SEQ ID NO: 14312

SEQ ID NO: 21741 - protein, 77 aa, Neisseria meningitidis; identical to SEQ ID NO: 760

SEQ ID NO: 21742 - protein, 207 aa, Neisseria meningitidis; identical to SEQ ID NO: 8402

SEQ ID NO: 21743 - protein, 87 aa, Neisseria meningitidis; identical to SEQ ID NO: 932

SEQ ID NO: 21744 - protein, 329 aa, Neisseria meningitidis; identical to SEQ ID NO: 8499

SEQ ID NO: 21745 - protein, 316 aa, Neisseria meningitidis; identical to SEQ ID NO: 5301

SEQ ID NO: 21746 - protein, 175 aa, Neisseria meningitidis; identical to SEQ ID NO: 5

SEQ ID NO: 21747 - protein, 477 aa, Neisseria meningitidis
MNEYSQLIKHPDISLSPISDGIGVGNPATGEILAYVRKTDSDKLKNLIQKAAAAQKLWAAKTALERADILWCWYFLVKENKEALARLMTMEQGKSLTESRGEIDYAASFVRWFAEEARRIDGDVLTSVKASQKLVVLKQPVGVTAAITPWNFPSAMIARKAAPALAVGCAMIIKPASLTPLSAYALASLAYEAGVPQDLLPVVSGRASEIGREFATNPIIRKISFTGSTEVGAKIFADSAADIKKLSLELGGNAPFIVFDDADLDKAVEGALASKFRNSGQTCVCTNRVYAQSGIYDAFCRKLSEKAAALKLGNGLEDGVNQGPLIEEKAVEKVEQHIADALSKGAICLTGGKRSALGGTFFEPTVLSGITAQMAVAREETFGPLCPVFRFETEAEVIEAANNTEYGLAAYLFTADTARQWRVGEALEYGMVGINTGLISNEAAPFGGVKRSGLGREGSKYGADEYLELKYLCMDVG

SEQ ID NO: 21748 - protein, 306 aa, Neisseria meningitidis; identical to SEQ ID NO: 1708

SEQ ID NO: 21749 - protein, 326 aa, Neisseria meningitidis; identical to SEQ ID NO: 8539

SEQ ID NO: 21750 - protein, 123 aa, Neisseria meningitidis; identical to SEQ ID NO: 130

SEQ ID NO: 21751 - protein, 313 aa, Neisseria meningitidis
MKTLLLLIPLVLTACGTLTGIPAHGGGKRFAVEQELVAASSRAAVKEMDLSALKGRKAALYVSVMGDQGSGNISGGRYSIDALIRGGYQNNPESATQYSYPAYDTTATTKSDALSSVTTSTSLLNAPAAALTRNSGRKGERSAGLSVNGTGDYRNETLLANPRDVSFLTNLIQTVFYLRGIEVVPPEYADTDVFVTVDVFGTVRSRTELHLYNAETLKAQTKLEYFAVDRDSRKLLIAPKTAAYESQYQEQYALWTGPYKVSKTVKASDRLMVDFSDITPYGDTTAQNRPDFKQNNGKKPDVGNEVIRRRKGG

SEQ ID NO: 21752 - protein, 461 aa, Neisseria meningitidis; identical to SEQ ID NO: 264

SEQ ID NO: 21753 - protein, 131 aa, Neisseria meningitidis; identical to SEQ ID NO: 1281

SEQ ID NO: 21754 - protein, 144 aa, Neisseria meningitidis; identical to SEQ ID NO: 9512

SEQ ID NO: 21755 - protein, 256 aa, Neisseria meningitidis; identical to SEQ ID NO: 9022

SEQ ID NO: 21756 - protein, 360 aa, Neisseria meningitidis; identical to SEQ ID NO: 2503

SEQ ID NO: 21757 - protein, 587 aa, Neisseria meningitidis; identical to SEQ ID NO: 9279

SEQ ID NO: 21758 - protein, 358 aa, Neisseria meningitidis; identical to SEQ ID NO: 9712

SEQ ID NO: 21759 - protein, 318 aa, Neisseria meningitidis; identical to SEQ ID NO: 8997

SEQ ID NO: 21760 - protein, 359 aa, Neisseria meningitidis
MASAFGETALQCAALTDNVTRLACYDRIFAAQLPSSAGQEGQESKAVLNLTETVRSSLDKGEAVIVVEKGGDALPADSAGETADIYTPLSLMYDLDKNDLRGLLGVREHNPMYLMPLWYNNSPNYAPGSPTRGTTVQEKFGQQKRAETKLQVSFKSKIAEDLFKTRADLWFGYTQRSDWQIYNQGRKSAPFRNTDYKPEIFLTQPVKADLPFGGRLRMLGAGFVHQSNGQSRPESRSWNRIYAMAGMEWGKLTVIPRVWVRAFDQSGDKNDNPDIADYMGYGDVKLQYRLNDRQNVYSVLRYNPKTGYGAIEAAYTFPIKGKLKGVVRGFHGYGESLIDYNHKQNGIGIGLMFNDLDGI

SEQ ID NO: 21761 - protein, 613 aa, Neisseria meningitidis; identical to SEQ ID NO: 8132

SEQ ID NO: 21762 - protein, 77 aa, Neisseria meningitidis; identical to SEQ ID NO: 707

SEQ ID NO: 21763 - protein, 98 aa, Neisseria meningitidis; identical to SEQ ID NO: 2571

SEQ ID NO: 21764 - protein, 630 aa, Neisseria meningitidis; identical to SEQ ID NO: 1381

SEQ ID NO: 21765 - protein, 352 aa, Neisseria meningitidis; identical to SEQ ID NO: 327

SEQ ID NO: 21766 - protein, 367 aa, Neisseria meningitidis; identical to SEQ ID NO: 8481

SEQ ID NO: 21767 - protein, 462 aa, Neisseria meningitidis; identical to SEQ ID NO: 9246

SEQ ID NO: 21768 - protein, 173 aa, Neisseria meningitidis; identical to SEQ ID NO: 19359

SEQ ID NO: 21769 - protein, 485 aa, Neisseria meningitidis; identical to SEQ ID NO: 8505

SEQ ID NO: 21770 - protein, 335 aa, Neisseria meningitidis; identical to SEQ ID NO: 8305

SEQ ID NO: 21771 - protein, 297 aa, Neisseria meningitidis; identical to SEQ ID NO: 2644

SEQ ID NO: 21772 - protein, 158 aa, Neisseria meningitidis; identical to SEQ ID NO: 8318

SEQ ID NO: 21773 - protein, 642 aa, Neisseria meningitidis; identical to SEQ ID NO: 269

SEQ ID NO: 21774 - protein, 198 aa, Neisseria meningitidis; identical to SEQ ID NO: 1998

SEQ ID NO: 21775 - protein, 225 aa, Neisseria meningitidis; identical to SEQ ID NO: 8386

SEQ ID NO: 21776 - protein, 502 aa, Neisseria meningitidis; identical to SEQ ID NO: 2442

SEQ ID NO: 21777 - protein, 127 aa, Neisseria meningitidis; identical to SEQ ID NO: 430

SEQ ID NO: 21778 - protein, 47 aa, Neisseria meningitidis; identical to SEQ ID NO: 3740

SEQ ID NO: 21779 - protein, 332 aa, Neisseria meningitidis; identical to SEQ ID NO: 9380

SEQ ID NO: 21780 - protein, 61 aa, Neisseria meningitidis; identical to SEQ ID NO: 2069

SEQ ID NO: 21781 - protein, 144 aa, Neisseria meningitidis; identical to SEQ ID NO: 3188

SEQ ID NO: 21782 - protein, 94 aa, Neisseria meningitidis; identical to SEQ ID NO: 387

SEQ ID NO: 21783 - protein, 460 aa, Neisseria meningitidis; identical to SEQ ID NO: 9764

SEQ ID NO: 21784 - protein, 136 aa, Neisseria meningitidis; identical to SEQ ID NO: 8184

SEQ ID NO: 21785 - protein, 382 aa, Neisseria meningitidis; identical to SEQ ID NO: 7944

SEQ ID NO: 21786 - protein, 797 aa, Neisseria meningitidis; identical to SEQ ID NO: 8667

SEQ ID NO: 21787 - protein, 171 aa, Neisseria meningitidis; identical to SEQ ID NO: 2424

SEQ ID NO: 21788 - protein, 141 aa, Neisseria meningitidis; identical to SEQ ID NO: 3635

SEQ ID NO: 21789 - protein, 619 aa, Neisseria meningitidis; identical to SEQ ID NO: 1938

SEQ ID NO: 21790 - protein, 70 aa, Neisseria meningitidis; identical to SEQ ID NO: 232

SEQ ID NO: 21791 - protein, 87 aa, Neisseria meningitidis; identical to SEQ ID NO: 205

SEQ ID NO: 21792 - protein, 178 aa, Neisseria meningitidis; identical to SEQ ID NO: 8890

SEQ ID NO: 21793 - protein, 278 aa, Neisseria meningitidis; identical to SEQ ID NO: 7961

SEQ ID NO: 21794 - protein, 187 aa, Neisseria meningitidis; identical to SEQ ID NO: 2230

SEQ ID NO: 21795 - protein, 89 aa, Neisseria meningitidis; identical to SEQ ID NO: 2412

SEQ ID NO: 21796 - protein, 315 aa, Neisseria meningitidis; identical to SEQ ID NO: 5319

SEQ ID NO: 21797 - protein, 66 aa, Neisseria meningitidis; identical to SEQ ID NO: 421

SEQ ID NO: 21798 - protein, 145 aa, Neisseria meningitidis; identical to SEQ ID NO: 8226

SEQ ID NO: 21799 - protein, 392 aa, Neisseria meningitidis; identical to SEQ ID NO: 276

SEQ ID NO: 21800 - protein, 392 aa, Neisseria meningitidis; identical to SEQ ID NO: 8593

SEQ ID NO: 21801 - protein, 156 aa, Neisseria meningitidis; identical to SEQ ID NO: 681

SEQ ID NO: 21802 - protein, 240 aa, Neisseria meningitidis; identical to SEQ ID NO: 3202

SEQ ID NO: 21803 - protein, 230 aa, Neisseria meningitidis; identical to SEQ ID NO: 675

SEQ ID NO: 21804 - protein, 1201 aa, Neisseria meningitidis; identical to SEQ ID NO: 8622

SEQ ID NO: 21805 - protein, 471 aa, Neisseria meningitidis; identical to SEQ ID NO: 7980

SEQ ID NO: 21806 - protein, 117 aa, Neisseria meningitidis; identical to SEQ ID NO: 3386

SEQ ID NO: 21807 - protein, 168 aa, Neisseria meningitidis; identical to SEQ ID NO: 8894

SEQ ID NO: 21808 - protein, 286 aa, Neisseria meningitidis; identical to SEQ ID NO: 2687

SEQ ID NO: 21809 - protein, 79 aa, Neisseria meningitidis; identical to SEQ ID NO: 3404

SEQ ID NO: 21810 - protein, 528 aa, Neisseria meningitidis; identical to SEQ ID NO: 4033

SEQ ID NO: 21811 - protein, 142 aa, Neisseria meningitidis; identical to SEQ ID NO: 2751

SEQ ID NO: 21812 - protein, 328 aa, Neisseria meningitidis; identical to SEQ ID NO: 372

SEQ ID NO: 21813 - protein, 553 aa, Neisseria meningitidis; identical to SEQ ID NO: 9001

SEQ ID NO: 21814 - protein, 102 aa, Neisseria meningitidis; identical to SEQ ID NO: 3844

SEQ ID NO: 21815 - protein, 414 aa, Neisseria meningitidis; identical to SEQ ID NO: 9499

SEQ ID NO: 21816 - protein, 163 aa, Neisseria meningitidis; identical to SEQ ID NO: 3672

SEQ ID NO: 21817 - protein, 66 aa, Neisseria meningitidis; identical to SEQ ID NO: 2062

SEQ ID NO: 21818 - protein, 877 aa, Neisseria meningitidis
LQKTPLYICSNSTFLMKNQYSKSLHGVFYLAFYDKIHAFFAEQLFQLIINMNKKPTYISLFSSAGVGCYGFKTNGFECVATNELLEKRLKIQKYNQKCRFDSGYIAGDITLPETQAKLFAEIRRWNTEIDVVIATPPCQGMSVANHKKNNEMARNSLVVESIKIVREVQPKFFIFENVKAFLKTPCTDTDYQEKPIEEAIWSNLGGHYNILSNVLNFKDYGANSSRTRTLVIGVRKDIHHITPYDIFPKQTPPKTLRTLLADLPPLMQMGEISDDDIYHSYREFDRRMLPWIAQLKEGESAFQNTDSARIPHQIKNGEIIYNQNKNGDKYARWFLDREGPCIHTRNDILASQNTIHPTENRVFSVRELMRMMSIPPSFKWTAQDEKQLNALSFDEKKTFLKKEELNIRHCIGESVPTAVLANVAQNIQAALQQSELSMTEIQNLIKRENLSLADNLYRFIEQHFDAYPFSRLLQIAEYANAARSETAAYFTRIDIAFGLVNALPDFKKKKNLRILEPSVGIGNFIPLLAKKYADKEKVIFDLVDIDSNSLNLLSLLLKKLNLGSKFEFNIIHQDFLTATLPENYDLVIGNPPYGKVKASDKNLALYRKNATNKDTQNIFSFFIDKALTLSKTVALVVPKSVINAPEFQITRQQLITANINRIIDYGEKAFKGVKIETIAFIADQTDKDNQHITIESHIQETLIQNCKNYFFSDNFPYWLIYRNSEFDQIAQKLEFNVFQSFRDRQITKAHTQNSGNVRVLKSRNIGNNEIIDIEGYDSYVDSVAPFSVGKFINRKNVVMIPNLTYKPRAAFLPENSIADGSVALLTMKKHEKILTQRDLAYYATPEFEQFYRVARNYGSRSMNIDNHSVFFFGLLKD

SEQ ID NO: 21819 - protein, 252 aa, Neisseria meningitidis; identical to SEQ ID NO: 2885

SEQ ID NO: 21820 - protein, 40 aa, Neisseria meningitidis; identical to SEQ ID NO: 2556

SEQ ID NO: 21821 - protein, 612 aa, Neisseria meningitidis; identical to SEQ ID NO: 5263

SEQ ID NO: 21822 - protein, 109 aa, Neisseria meningitidis; identical to SEQ ID NO: 8939

SEQ ID NO: 21823 - protein, 222 aa, Neisseria meningitidis
LPSASDGILSHWERQTAIMKTSNFSKRTSAMKTFALILADGQASRMGGEDKGLALLGGKALIDHVIDRVRPQVSHIAISTNRNLEEYARRSPHIFPDARQWQHFGPLSALCTAANDLQLATADWLLVVPCDMPYLPGDLVARFETVSKRTPLCNAYYVETPITMHYNIMYIRPQILQSAIPYLFSGMKTLRSWLQQQRARPVRFEFDGHFADLNTQIDLQEG

SEQ ID NO: 21824 - protein, 237 aa, Neisseria meningitidis; identical to SEQ ID NO: 2588

SEQ ID NO: 21825 - protein, 296 aa, Neisseria meningitidis; identical to SEQ ID NO: 72

SEQ ID NO: 21826 - protein, 675 aa, Neisseria meningitidis; identical to SEQ ID NO: 3019

SEQ ID NO: 21827 - protein, 321 aa, Neisseria meningitidis; identical to SEQ ID NO: 4435

SEQ ID NO: 21828 - protein, 96 aa, Neisseria meningitidis; identical to SEQ ID NO: 7969

SEQ ID NO: 21829 - protein, 140 aa, Neisseria meningitidis; identical to SEQ ID NO: 2533

SEQ ID NO: 21830 - protein, 609 aa, Neisseria meningitidis
MMIKPTALLLPALFFFPHAYAPAADLSENKAAGFALFKNKSPDTESVKLKPKFPVRIDTQDSEIKDMVEEHLPLITQQQEEVLDKEQTGFLAEEAPDNVKTMLRSKGYFSSKVSLTEKGGAYTVHITPGPRTKITNVGVTILGDILSDGNLAEYYRNALENWQQPVGSDFDQDSWENSKTSVLGAVTRKAYPLAKLGNTRAAVNPDTATADLNVVVDSGRPIAFGDFEITGTQRYPEQIVSGLARFQPGTPYDLDLLLDFQQALEQNGHYSGASVQADFDRLQGDRVPVKVSVTEVKRHKLETGIRLDSEYGLGGKIAYDYYNLFNKGYIGSVVWDMDKYETTLAAGISQPRNYRGNYWTSNVSYNRSTTQNLEKRAFSGGIWYVRDRAGIDARLGAEFLAEGRKIPGSDVDLGNSHATMLTASWKRQLLNNVLHPENGHYLDGKIGTTLGTFLSSTALIRTSARAGYFFTPENKKLGTFIIRGQAGYTVARDNADVPSGLMFRSGGASSVRGYELDSIGLAGPNGSVLPERALLTGSLEYQLPFTRTLSGAVFHDMGDAAANFKRMELKHGSGLGVRWFSPLAPFSFDIAYGHSDKKIRWHISLGTRF

SEQ ID NO: 21831 - protein, 412 aa, Neisseria meningitidis; identical to SEQ ID NO: 10802

SEQ ID NO: 21832 - protein, 206 aa, Neisseria meningitidis; identical to SEQ ID NO: 10097

SEQ ID NO: 21833 - protein, 275 aa, Neisseria meningitidis; identical to SEQ ID NO: 12889

SEQ ID NO: 21834 - protein, 94 aa, Neisseria meningitidis; identical to SEQ ID NO: 20520

SEQ ID NO: 21835 - protein, 512 aa, Neisseria meningitidis; identical to SEQ ID NO: 9162

SEQ ID NO: 21836 - protein, 317 aa, Neisseria meningitidis; identical to SEQ ID NO: 9092

SEQ ID NO: 21837 - protein, 133 aa, Neisseria meningitidis; identical to SEQ ID NO: 9643

SEQ ID NO: 21838 - protein, 359 aa, Neisseria meningitidis; identical to SEQ ID NO: 2157

SEQ ID NO: 21839 - protein, 311 aa, Neisseria meningitidis; identical to SEQ ID NO: 9342

SEQ ID NO: 21840 - protein, 725 aa, Neisseria meningitidis
MFRKPSEMPAPQLSAPYDPLTAEARALLFHTASYLKPEEQAELEKAVAYAFRAHDGQTRKSGEPYITHPIAVATQLALWHMDIQGLCAGVMHDVLEDTGVTKGEMAAVFGNTVAEMVDGLSKLEKLKFEDHAEHQAESFRKLILAMTKDVRVIVVKLADRLHNMRTLGSMRPDKRRRIARETLEIYAQIANRIGLNNAYQELQDLSFQNLHPNRYETLKKAMDKSRKNRQDVVGKVLRAFGQRLVGANIEAKIKGREKNLYGIHQKMMAKKLRFAEVMDIYGFRVIVNSIPACYAALGALHTLYQPKPGRFKDYIAIPKSNGYQSLHTTLVGPYGLPIEVQIRTKEMDAVAEGGIAGHWSYKSYSKTVDQAVLHTNRWLKNILDLQASSANAIEFLEHVKVDLFPNEIYILTPKGKILTLPKGATPVDFAYAVHTDIGHKTVAARINNIMMPLRTKLKTGDSVEIITSEHAKPNPAWLNFAVSGRARSAIRQYIKNLNRHDAVVLGESLLQKALSSLLPKDVLLSDGIKEKYLADLNDKQTSFEEVLYNVGMGHTLPVYVAMHIAELAGEHFGSEVRLSSIKVDGQESGHIHFAECCHPVPGDSIRLLLVKGKGMIIHRDSCPTLLKSDPEQQLDADWENMNGQNYRVGLQVQSEDSHGLLALMAQAISDSGADIESVETPSKSQSGTEGFVEFKFLLKVKNLDQLNQIIQNLHSIPYIRKVIRS

SEQ ID NO: 21841 - protein, 133 aa, Neisseria meningitidis; identical to SEQ ID NO: 19847

SEQ ID NO: 21842 - protein, 81 aa, Neisseria meningitidis; identical to SEQ ID NO: 9542

SEQ ID NO: 21843 - protein, 215 aa, Neisseria meningitidis; identical to SEQ ID NO: 8063

SEQ ID NO: 21844 - protein, 494 aa, Neisseria meningitidis; identical to SEQ ID NO: 10326

SEQ ID NO: 21845 - protein, 133 aa, Neisseria meningitidis; identical to SEQ ID NO: 8

SEQ ID NO: 21846 - protein, 167 aa, Neisseria meningitidis; identical to SEQ ID NO: 2196

SEQ ID NO: 21847 - protein, 385 aa, Neisseria meningitidis; identical to SEQ ID NO: 8326

SEQ ID NO: 21848 - protein, 314 aa, Neisseria meningitidis
VSIPTATPLPTGEVKLSDDNSKIENINTADTGSTSGISIQQRKYEVESYGIKREEKAFIFQTPGGAQYALSSYADPITVSYSSPDFKIPDRHAGQRLADGSRIFICCSESGATSYAEITKQDYMKFGAWIGPNGEIDLFAGGFPVGKTPKPKYSWGNTEPETKGKGKITYQVWGIRVRNRQFVTSSYTPPKSGSYYGTLANTPVLSFITANFNSNKLAGEIRGNSDYGPSVKIENATINSLSFSGTATSGGKTGNLEGKFFGKFNGSYGNTETSIGGKITFKDDRSLDTVFGGVSYVKKLDETANRDTEHLTKQ

SEQ ID NO: 21849 - protein, 128 aa, Neisseria meningitidis; identical to SEQ ID NO: 605

SEQ ID NO: 21850 - protein, 161 aa, Neisseria meningitidis; identical to SEQ ID NO: 3482

SEQ ID NO: 21851 - protein, 500 aa, Neisseria meningitidis; identical to SEQ ID NO: 9448

SEQ ID NO: 21852 - protein, 156 aa, Neisseria meningitidis; identical to SEQ ID NO: 8202

SEQ ID NO: 21853 - protein, 151 aa, Neisseria meningitidis; identical to SEQ ID NO: 4206

SEQ ID NO: 21854 - protein, 181 aa, Neisseria meningitidis
MIIVEHLEHYLGEIESGIKCLDRRYHLSVSVFPSQPYKGVTTFSTLGLNRYDLNYKSRFELIFTCSEEWNKENIAAFLSGVAEYLIDNRQPILRGEIIQLPRVIIEGSKMDALYVSAPFYFDDDFQVCYGEHYNTVFPLLVPLYKQEAELVEKKGWNAFEQFLLDNEVDNLSDMNRKPFVW

SEQ ID NO: 21855 - protein, 487 aa, Neisseria meningitidis; identical to SEQ ID NO: 9402

SEQ ID NO: 21856 - protein, 64 aa, Neisseria meningitidis; identical to SEQ ID NO: 3483

SEQ ID NO: 21857 - protein, 103 aa, Neisseria meningitidis; identical to SEQ ID NO: 1510

SEQ ID NO: 21858 - protein, 117 aa, Neisseria meningitidis; identical to SEQ ID NO: 8268

SEQ ID NO: 21859 - protein, 182 aa, Neisseria meningitidis; identical to SEQ ID NO: 3686

SEQ ID NO: 21860 - protein, 500 aa, Neisseria meningitidis; identical to SEQ ID NO: 8952

SEQ ID NO: 21861 - protein, 346 aa, Neisseria meningitidis; identical to SEQ ID NO: 8343

SEQ ID NO: 21862 - protein, 96 aa, Neisseria meningitidis; identical to SEQ ID NO: 2105

SEQ ID NO: 21863 - protein, 259 aa, Neisseria meningitidis; identical to SEQ ID NO: 2706

SEQ ID NO: 21864 - protein, 273 aa, Neisseria meningitidis; identical to SEQ ID NO: 8820

SEQ ID NO: 21865 - protein, 177 aa, Neisseria meningitidis; identical to SEQ ID NO: 1513

SEQ ID NO: 21866 - protein, 117 aa, Neisseria meningitidis; identical to SEQ ID NO: 1331

SEQ ID NO: 21867 - protein, 90 aa, Neisseria meningitidis; identical to SEQ ID NO: 3546

SEQ ID NO: 21868 - protein, 195 aa, Neisseria meningitidis; identical to SEQ ID NO: 1987

SEQ ID NO: 21869 - protein, 965 aa, Neisseria meningitidis
VLQYRFSFIFQAASIMCNHHPQHSHDNDTIRIRGARTHNLKNVDLDIPRHKLVVVTGLSGSGKSSLAFDTLYAEGQRRYVESLSAYARQFLQMMDKPDVDLIEGLSPAISIEQKSTSHNPRSTVGTVTEIHDYLRLLYARVGTPYCPEHKLPLSSQTVSQMVDAVLKLPEDTRVMILAPAVRERKGEFVDFFADLQAQGFARVRVDGEVYQLDEVPKLEKNIKHNIDVVIDRVKVKADIKQRLAESFETALRHGNERALAMEMESGEEHWFSARFACPVCSYSLPELEPRLFSFNNPMGSCPTCDGLGNTNFFDPEKVVAHPELSLATGAIDGWDKRNQFYFQMIQSLARHYGFDVQAAWETLPEKVKKVVLHGSGKEVIDFTYLSERGTTFNRSHAFEGIIPNLERRYRETDSETVREKLREYQNHRACPSCGGARLRKEARYVYVSGEPLHEVSAWPLTKTHQFFETLDLDGNKKQIAEKILKEITERLGFLINVGLDYLNLSRSAETLSGGEAQRIRLASQIGSGLTGVMYVLDEPSIGLHQRDNDRLLATLKRLRDLGNSVIVVEHDEDAIREADFVVDMGPGAGEHGGNVLIADTPENVAKCENSVTGQYLSGKKSIAVPSERTPVNPERMLVLKGARGNNLKNVTLELPLGLITCITGVSGSGKSTLINDTLAKITARELNRAQEEPAPYDDIRGLEHLDKVINVDQSPIGRTPRSNPATYTGLFTPIRELFAGVPLSRERGYNVGRFSFNVKGGRCEACQGDGVIKVEMHFLPDVYVPCEVCHGKRYNRETLEIQYKGKNISQVLDMTVEEAREFFDAVPTVSRKLQTLMDVGLGYIRLGQSATTLSGGEAQRVKLALELSKRDTGRTLYILDEPTTGLHFADIALLLEVIDRLKGKGNSIVIIEHNLDVIKTADYIVDLGPEGGDGGGRIIAEGSPEQVAKVKGSYTGKYLEVMLKY

SEQ ID NO: 21870 - protein, 539 aa, Neisseria meningitidis; identical to SEQ ID NO: 8183

SEQ ID NO: 21871 - protein, 291 aa, Neisseria meningitidis; identical to SEQ ID NO: 9353

SEQ ID NO: 21872 - protein, 219 aa, Neisseria meningitidis; identical to SEQ ID NO: 2874

SEQ ID NO: 21873 - protein, 313 aa, Neisseria meningitidis; identical to SEQ ID NO: 8154

SEQ ID NO: 21874 - protein, 138 aa, Neisseria meningitidis; identical to SEQ ID NO: 8310

SEQ ID NO: 21875 - protein, 183 aa, Neisseria meningitidis
MPSERRPFQTAFLSNRKTVGKLAERVQSRYDGLHKFKHICSAAMALIKEPLDKAKQRNEELEAAEEAAAQEALGREQEVDRVSEWEERYKLSRSEFEQLWKGLPQTVQNKLQASQKTWKSGMDKICANNAKAEGETPNGIKVSELACKTVETEARLEELYNRKKALIDEMVREADKKELPKRL

SEQ ID NO: 21876 - protein, 548 aa, Neisseria meningitidis; identical to SEQ ID NO: 3181

SEQ ID NO: 21877 - protein, 312 aa, Neisseria meningitidis; identical to SEQ ID NO: 8892

SEQ ID NO: 21878 - protein, 259 aa, Neisseria meningitidis; identical to SEQ ID NO: 8690

SEQ ID NO: 21879 - protein, 374 aa, Neisseria meningitidis; identical to SEQ ID NO: 9205

SEQ ID NO: 21880 - protein, 119 aa, Neisseria meningitidis; identical to SEQ ID NO: 2176

SEQ ID NO: 21881 - protein, 617 aa, Neisseria meningitidis; identical to SEQ ID NO: 9013

SEQ ID NO: 21882 - protein, 43 aa, Neisseria meningitidis; identical to SEQ ID NO: 2679

SEQ ID NO: 21883 - protein, 405 aa, Neisseria meningitidis
MKTVVWIVVLFAAAVGLALASGIYTGDVYIVLGQTMLRINLHAFVLGSLIAVVVWYFLFKFIIGVFNIPEKMQRFGSARKGRKAALALNKAGLAYFEGRFEKAELEASRVLGNKEAGDNRTLALMLGAHAAGQMENIELRDRYLAEIAKLPEKQQLSRYLLLAESALNRRDYEVSEANLHAAAKMNANLTRLVRLQLRYAFDRGDALQVLAKTEKLSKAGALGKSEMERYQNWAYRRQLADAADAAALKTCLKRIPDSLKNGELSVSVAEKYERLGLYADAVKWVKQHYPQSRRPELLEAFVESVRFLGERDQQKAIDFADAWLKEQPDNALLLMYLGRLAYGRKLWGKAKGYLEASIALKPSISARLVLAKVFDETGEPQKAEAQRNLVLASVAEENRPSAETC

SEQ ID NO: 21884 - protein, 172 aa, Neisseria meningitidis; identical to SEQ ID NO: 601

SEQ ID NO: 21885 - protein, 900 aa, Neisseria meningitidis; identical to SEQ ID NO: 8958

SEQ ID NO: 21886 - protein, 852 aa, Neisseria meningitidis; identical to SEQ ID NO: 7998

SEQ ID NO: 21887 - protein, 261 aa, Neisseria meningitidis; identical to SEQ ID NO: 9510

SEQ ID NO: 21888 - protein, 484 aa, Neisseria meningitidis; identical to SEQ ID NO: 8676

SEQ ID NO: 21889 - protein, 580 aa, Neisseria meningitidis; identical to SEQ ID NO: 11195

SEQ ID NO: 21890 - protein, 100 aa, Neisseria meningitidis; identical to SEQ ID NO: 3521

SEQ ID NO: 21891 - protein, 89 aa, Neisseria meningitidis; identical to SEQ ID NO: 4489

SEQ ID NO: 21892 - protein, 262 aa, Neisseria meningitidis; identical to SEQ ID NO: 8401

SEQ ID NO: 21893 - protein, 602 aa, Neisseria meningitidis; identical to SEQ ID NO: 9493

SEQ ID NO: 21894 - protein, 142 aa, Neisseria meningitidis; identical to SEQ ID NO: 5523

SEQ ID NO: 21895 - protein, 103 aa, Neisseria meningitidis; identical to SEQ ID NO: 3787

SEQ ID NO: 21896 - protein, 291 aa, Neisseria meningitidis; identical to SEQ ID NO: 8367

SEQ ID NO: 21897 - protein, 303 aa, Neisseria meningitidis; identical to SEQ ID NO: 7939

SEQ ID NO: 21898 - protein, 85 aa, Neisseria meningitidis; identical to SEQ ID NO: 539

SEQ ID NO: 21899 - protein, 107 aa, Neisseria meningitidis; identical to SEQ ID NO: 1793

SEQ ID NO: 21900 - protein, 131 aa, Neisseria meningitidis; identical to SEQ ID NO: 9635

SEQ ID NO: 21901 - protein, 140 aa, Neisseria meningitidis; identical to SEQ ID NO: 8443

SEQ ID NO: 21902 - protein, 145 aa, Neisseria meningitidis; identical to SEQ ID NO: 2247

SEQ ID NO: 21903 - protein, 133 aa, Neisseria meningitidis; identical to SEQ ID NO: 2156

SEQ ID NO: 21904 - protein, 423 aa, Neisseria meningitidis; identical to SEQ ID NO: 2704

SEQ ID NO: 21905 - protein, 174 aa, Neisseria meningitidis; identical to SEQ ID NO: 9770

SEQ ID NO: 21906 - protein, 456 aa, Neisseria meningitidis; identical to SEQ ID NO: 9489

SEQ ID NO: 21907 - protein, 167 aa, Neisseria meningitidis; identical to SEQ ID NO: 189

SEQ ID NO: 21908 - protein, 105 aa, Neisseria meningitidis; identical to SEQ ID NO: 3792

SEQ ID NO: 21909 - protein, 430 aa, Neisseria meningitidis; identical to SEQ ID NO: 8969

SEQ ID NO: 21910 - protein, 394 aa, Neisseria meningitidis; identical to SEQ ID NO: 8125

SEQ ID NO: 21911 - protein, 326 aa, Neisseria meningitidis; identical to SEQ ID NO: 9789

SEQ ID NO: 21912 - protein, 206 aa, Neisseria meningitidis; identical to SEQ ID NO: 8529

SEQ ID NO: 21913 - protein, 302 aa, Neisseria meningitidis; identical to SEQ ID NO: 1790

SEQ ID NO: 21914 - protein, 100 aa, Neisseria meningitidis; identical to SEQ ID NO: 1675

SEQ ID NO: 21915 - protein, 442 aa, Neisseria meningitidis; identical to SEQ ID NO: 3795

SEQ ID NO: 21916 - protein, 105 aa, Neisseria meningitidis; identical to SEQ ID NO: 87

SEQ ID NO: 21917 - protein, 273 aa, Neisseria meningitidis; identical to SEQ ID NO: 9791

SEQ ID NO: 21918 - protein, 124 aa, Neisseria meningitidis; identical to SEQ ID NO: 3797

SEQ ID NO: 21919 - protein, 207 aa, Neisseria meningitidis; identical to SEQ ID NO: 9793

SEQ ID NO: 21920 - protein, 99 aa, Neisseria meningitidis; identical to SEQ ID NO: 9794

SEQ ID NO: 21921 - protein, 179 aa, Neisseria meningitidis; identical to SEQ ID NO: 2726

SEQ ID NO: 21922 - protein, 288 aa, Neisseria meningitidis
MKGIILAGGSGTRLYPITRGVSKQLLPVYDKPMIYYPLSVLMLAGIRDILVITAPEDNASFKRLLGDGSDFGISISYAVQPSPDGLAQAFIIGEEFIGNDNVCLVLGDNIFYGQSFTQTLKQAAAQTHGATVFAYQVKNPERFGVVEFNENFRAVSIEEKPQRPKSDWAVTGLYFYDNRAVEFAKQIKPSARGELEITDLNRMYLEDGSLSVQILGRGFAWLDTGTHESLHEAASFVQTVQNIQDLQIACLEEIAWRNGWLSDEKLEELARPMAKNQYGQYLLRLLKK

SEQ ID NO: 21923 - protein, 205 aa, Neisseria meningitidis; identical to SEQ ID NO: 9382

SEQ ID NO: 21924 - protein, 185 aa, Neisseria meningitidis; identical to SEQ ID NO: 9800

SEQ ID NO: 21925 - protein, 221 aa, Neisseria meningitidis; identical to SEQ ID NO: 9745

SEQ ID NO: 21926 - protein, 308 aa, Neisseria meningitidis; identical to SEQ ID NO: 9802

SEQ ID NO: 21927 - protein, 106 aa, Neisseria meningitidis; identical to SEQ ID NO: 3805

SEQ ID NO: 21928 - protein, 237 aa, Neisseria meningitidis; identical to SEQ ID NO: 1707

SEQ ID NO: 21929 - protein, 166 aa, Neisseria meningitidis; identical to SEQ ID NO: 987

SEQ ID NO: 21930 - protein, 394 aa, Neisseria meningitidis; identical to SEQ ID NO: 9057

SEQ ID NO: 21931 - protein, 375 aa, Neisseria meningitidis; identical to SEQ ID NO: 7942

SEQ ID NO: 21932 - protein, 160 aa, Neisseria meningitidis; identical to SEQ ID NO: 3806

SEQ ID NO: 21933 - protein, 628 aa, Neisseria meningitidis; identical to SEQ ID NO: 9068

SEQ ID NO: 21934 - protein, 658 aa, Neisseria meningitidis; identical to SEQ ID NO: 8975

SEQ ID NO: 21935 - protein, 796 aa, Neisseria meningitidis; identical to SEQ ID NO: 7975

SEQ ID NO: 21936 - protein, 96 aa, Neisseria meningitidis; identical to SEQ ID NO: 3731

SEQ ID NO: 21937 - protein, 307 aa, Neisseria meningitidis; identical to SEQ ID NO: 3808

SEQ ID NO: 21938 - protein, 290 aa, Neisseria meningitidis; identical to SEQ ID NO: 9806

SEQ ID NO: 21939 - protein, 283 aa, Neisseria meningitidis; identical to SEQ ID NO: 9234

SEQ ID NO: 21940 - protein, 483 aa, Neisseria meningitidis; identical to SEQ ID NO: 5802

SEQ ID NO: 21941 - protein, 113 aa, Neisseria meningitidis; identical to SEQ ID NO: 9778

SEQ ID NO: 21942 - protein, 618 aa, Neisseria meningitidis; identical to SEQ ID NO: 1958

SEQ ID NO: 21943 - protein, 792 aa, Neisseria meningitidis; identical to SEQ ID NO: 9809

SEQ ID NO: 21944 - protein, 473 aa, Neisseria meningitidis; identical to SEQ ID NO: 2148

SEQ ID NO: 21945 - protein, 464 aa, Neisseria meningitidis; identical to SEQ ID NO: 9179

SEQ ID NO: 21946 - protein, 441 aa, Neisseria meningitidis; identical to SEQ ID NO: 8312

SEQ ID NO: 21947 - protein, 185 aa, Neisseria meningitidis; identical to SEQ ID NO: 7784

SEQ ID NO: 21948 - protein, 288 aa, Neisseria meningitidis; identical to SEQ ID NO: 21922

SEQ ID NO: 21949 - protein, 466 aa, Neisseria meningitidis; identical to SEQ ID NO: 8157

SEQ ID NO: 21950 - protein, 96 aa, Neisseria meningitidis; identical to SEQ ID NO: 5810

SEQ ID NO: 21951 - protein, 322 aa, Neisseria meningitidis; identical to SEQ ID NO: 8639

SEQ ID NO: 21952 - protein, 68 aa, Neisseria meningitidis; identical to SEQ ID NO: 3821

SEQ ID NO: 21953 - protein, 135 aa, Neisseria meningitidis; identical to SEQ ID NO: 9818

SEQ ID NO: 21954 - protein, 369 aa, Neisseria meningitidis; identical to SEQ ID NO: 9819

SEQ ID NO: 21955 - protein, 180 aa, Neisseria meningitidis; identical to SEQ ID NO: 9821

SEQ ID NO: 21956 - protein, 310 aa, Neisseria meningitidis; identical to SEQ ID NO: 9784

SEQ ID NO: 21957 - protein, 143 aa, Neisseria meningitidis; identical to SEQ ID NO: 362

SEQ ID NO: 21958 - protein, 399 aa, Neisseria meningitidis; identical to SEQ ID NO: 7800

SEQ ID NO: 21959 - protein, 86 aa, Neisseria meningitidis; identical to SEQ ID NO: 9827

SEQ ID NO: 21960 - protein, 500 aa, Neisseria meningitidis; identical to SEQ ID NO: 11804

SEQ ID NO: 21961 - protein, 511 aa, Neisseria meningitidis; identical to SEQ ID NO: 3843

SEQ ID NO: 21962 - protein, 65 aa, Neisseria meningitidis; identical to SEQ ID NO: 9839

SEQ ID NO: 21963 - protein, 117 aa, Neisseria meningitidis; identical to SEQ ID NO: 9841

SEQ ID NO: 21964 - protein, 71 aa, Neisseria meningitidis; identical to SEQ ID NO: 1785

SEQ ID NO: 21965 - protein, 242 aa, Neisseria meningitidis; identical to SEQ ID NO: 3849

SEQ ID NO: 21966 - protein, 295 aa, Neisseria meningitidis; identical to SEQ ID NO: 10507

SEQ ID NO: 21967 - protein, 451 aa, Neisseria meningitidis; identical to SEQ ID NO: 9848

SEQ ID NO: 21968 - protein, 117 aa, Neisseria meningitidis; identical to SEQ ID NO: 3854

SEQ ID NO: 21969 - protein, 90 aa, Neisseria meningitidis; identical to SEQ ID NO: 7807

SEQ ID NO: 21970 - protein, 37 aa, Neisseria meningitidis; identical to SEQ ID NO: 970

SEQ ID NO: 21971 - protein, 92 aa, Neisseria meningitidis; identical to SEQ ID NO: 3856

SEQ ID NO: 21972 - protein, 168 aa, Neisseria meningitidis; identical to SEQ ID NO: 11207

SEQ ID NO: 21973 - protein, 75 aa, Neisseria meningitidis; identical to SEQ ID NO: 8304

SEQ ID NO: 21974 - protein, 274 aa, Neisseria meningitidis
VNRTTFCCLSLTAALILTACSSGGGGVAADIGAGLADALTAPLDHKDKGLQSLTLDQSVRKNEKLKLAAQGAEKTYGNGDSLNTGKLKNDKVSRFDFIRQIEVNGQLITLESGEFQVYKQSHSALTALQTEQVQDSEHSRKMVAKRQFRIGDIAGEHTSFDKLPKGDSATYRGTAFGSDDAGGKLTYTIDFAAKQGYGKIEHLKSPELNVDLAAAYIKPDEKHHAVISGSVLYNQDEKGSYSLGIFGGQAQEVAGSAEVKTANGIRHIGLAAKQ

SEQ ID NO: 21975 - protein, 463 aa, Neisseria meningitidis; identical to SEQ ID NO: 19954

SEQ ID NO: 21976 - protein, 214 aa, Neisseria meningitidis; identical to SEQ ID NO: 9854

SEQ ID NO: 21977 - protein, 421 aa, Neisseria meningitidis; identical to SEQ ID NO: 3863

SEQ ID NO: 21978 - protein, 1066 aa, Neisseria meningitidis
MRTTPTFPTKTFKPAAMALAVATTLSACLGGGGTSAPDFNAGGTGIGSNSRATTAKSAAVSYAGIKNEMCKDRSMLCAGRDDVAVTDRDAKINAPPPNLHTGDFTNPNDAYKNLINLKPAIEAGYTGRGVEVGIVDTGESVGSISFPELYGRKEHGYNENYKNYTAYMRKEAPEDGGGKDIKASFDDEAVIETEAKPTDIRHVKEIGHIDVVSHIIGGRSVDGRPAGGIAPDATLHIMNTHDGTKNEIMSAAIRNAWVKLGERGVRIVNNSFGTTSRAGTADHFQIANSEEQYRQALLAYSGGDKTDEGIRLMQQSDYGNLSYHIRNKNMLFIFSASNDAQAQPNTLTLLPFYEKDAQKGIITVAGVDRSGEKFNGSNHCGITAMWCLSAPYEASVRFTRTNPIQIAGTSFSAPIVTGTAALLLQKYPWMSNDNLRTTLLTTAQDIGAVGVDSKFGWGLLDAGKAMNGPASFPFGDFTADTKGTSDIAYSFRNDISGTGGLIKKGGSQLQLHGNNTYTGKTIIEGGSLVLYGNNKSDMRVETKGALIYNGAASGGSLNSDGIVYLADTDRSGANETVHIKGDLQLGGEGTLYTRLGKLLKVDGTAMTGGKLYMSARGKGAGYLNRTGQRVPFLSAAKIGRDYSFFTNIETDGGLLASLDSVEKTAGSEGDTLSYYVRRGNAARTASAAAHSAPAGLKHAVEQGGSNLENLMVELDASESSATPETVETAAADRTDMPGIRPYGATFRAAAAVQHANAADGVRIFNSLAATVYADSTAAHADMQGRRLKAVSDGLDHNATGLRVIAQTQQDGGTWEQGGVEGKMRGSTQTVGIAAKTGENTTAAATLGMGHSTWSENSANAKTDSISLFAGIRHDAGDIGYLKGLFSYGRYKNSISRSTGADEHAEGSVNGTLMQLGALGGVNVPFAATGDLTVEGGLRYDLLKQDAFAEKGSALGWSGNSLTEGTLVGLAGLKLSQPLSDKAVLFATAGVERDLNGRDYTVTGGFTGATAATGKTGARNMPHTRLVAGLGADVEFGNGWNGLARYSYAGSKQYGNHSGRVGVGYRF

SEQ ID NO: 21979 - protein, 356 aa, Neisseria meningitidis
MKIILTTSMSGLGGTETATVRLGRLLKRRGHDIILASSDGPFVGEAQASGIRWQPVDFYRGGLAGYLKSTFAYARMLRREQPDIIDCQMARVVPACALAAKIVSPKTKIIYHSHGLDAATYPKIAKLFDKLGVYIIGNCKHEREKLIRHGFPAGRIAYAYNAPPPPEFHFRKTKKECAVLGTLSRLDTVRAVHLMLDILKKMVDRGMPVRLNVAGIGEEMDNLKAQAKRLGIEDKVTFLGGVRDLTGYFKEVDILVNTPHCVGDHGAGVGNNILEAGLYDTPVVTYNMAGISEMVITGQTGYCIPFGDDEAFIEAFDTLIKHPELRSQMGKALHKHVETLCSDDEIYRTTMAAYEM

SEQ ID NO: 21980 - protein, 258 aa, Neisseria meningitidis; identical to SEQ ID NO: 15877

SEQ ID NO: 21981 - protein, 321 aa, Neisseria meningitidis; identical to SEQ ID NO: 3871

SEQ ID NO: 21982 - protein, 524 aa, Neisseria meningitidis; identical to SEQ ID NO: 19965

SEQ ID NO: 21983 - protein, 327 aa, Neisseria meningitidis; identical to SEQ ID NO: 294

SEQ ID NO: 21984 - protein, 162 aa, Neisseria meningitidis
MLKITLIAACAENLCIGAGNAMPWHIPEDFAFFKAYTLGKPVIMGRKTWESLHVKPLPGRRNIVISRQADYCAAGAETAASLEAALALCAGAEEAVIMGGAQIYGQAMPLATDLRITEVDLSVEGDAFFPAIDRTHWKEAERTERRVSSKGTSYAFVHYLRY

SEQ ID NO: 21985 - protein, 547 aa, Neisseria meningitidis; identical to SEQ ID NO: 7959

SEQ ID NO: 21986 - protein, 209 aa, Neisseria meningitidis; identical to SEQ ID NO: 9868

SEQ ID NO: 21987 - protein, 380 aa, Neisseria meningitidis; identical to SEQ ID NO: 314

SEQ ID NO: 21988 - protein, 453 aa, Neisseria meningitidis; identical to SEQ ID NO: 3877

SEQ ID NO: 21989 - protein, 1491 aa, Neisseria meningitidis; identical to SEQ ID NO: 9870

SEQ ID NO: 21990 - protein, 625 aa, Neisseria meningitidis
MSQALPYRPDIDTLRAAAVLSVIVFHIEKNWLPGGFLGVDIFFVISGFLMTMILHREMSGGGGFSLKAFYIRRIKRILPAFFAVLAATLIGGFFLFTKDDFFLLWKSALTALGFASNLYFARGKDYFDPAQEEKPLLHIWSLSVEEQFYFVFPILLLLVARKSPRVQFGFLAALCALSLAASFMPSAFDKYYLPHLRACEMLVGSLTAVWMRYRQQRNLAVGRCCAAAGALFSACILSACLFAYSKQTAYFPGPAALIPCLAVAALIYFNHYEHPLKKFFQWKITVAAGLISYSLYLWHWPILAFMRYIGPDNLPPYSTAAAIVLILLLSLISYHCIEKPFKKWKGSFAQSVLWIYALPMLILGAGSFFAMRLPFMAQYDRLGLTRSNTSCHNNTGKQCLWGDTEKQPELLVLGDSHADHYKTFFDAVGKKEKWSATMVSADACAYVEGYASRVFQNWAACRAVYRYAEEHLPLYSKVVLAMRWGSQMPENSRSLAYDAGFFQKFDRMLHKLSSEKQAVYLMADNLASSYNVQRAYILSSRIPGYRQTLRPDDESTLKANARIRELAAKYPNVYIIDAAAYIPANFQIGGLPVYSDKDHINPYGGTELAKRFSEKQRFLDTRHNH

SEQ ID NO: 21991 - protein, 466 aa, Neisseria meningitidis; identical to SEQ ID NO: 9872

SEQ ID NO: 21992 - protein, 372 aa, Neisseria meningitidis; identical to SEQ ID NO: 3260

SEQ ID NO: 21993 - protein, 558 aa, Neisseria meningitidis; identical to SEQ ID NO: 2720

SEQ ID NO: 21994 - protein, 170 aa, Neisseria meningitidis; identical to SEQ ID NO: 9874

SEQ ID NO: 21995 - protein, 314 aa, Neisseria meningitidis
MKAMVYHGANDIRFEEKPRPQIIDPTDAVVKIVKTTICGTDLGIWKGKKPEVADGRILGHEGIGIVEEVGEAVKNIKVGDKVIISCVSKCCTCDNCKIQLYSHCRNGGWILGYMIDGTQAEYVRTPYADNSLVPLPDNVNEEVALLLSDALPTAQLYSPAAIIVCDMDENRLKLAKELGATHTINPASGDVSKQVVAIVGEDGVDCAIEAVGIPATWNMCQDIVKPGGHIAVVGVHGQSVDFKLEKLWIKKLAITTGLVNANTTEMLMKAISSSSVDYTKMLTHRFKFSELEKAYDVFKHAAENQAMKVVLEAD

SEQ ID NO: 21996 - protein, 361 aa, Neisseria meningitidis; identical to SEQ ID NO: 2308

SEQ ID NO: 21997 - protein, 209 aa, Neisseria meningitidis; identical to SEQ ID NO: 1847

SEQ ID NO: 21998 - protein, 141 aa, Neisseria meningitidis; identical to SEQ ID NO: 7863

SEQ ID NO: 21999 - protein, 505 aa, Neisseria meningitidis; identical to SEQ ID NO: 3939

SEQ ID NO: 22000 - protein, 106 aa, Neisseria meningitidis; identical to SEQ ID NO: 3892

SEQ ID NO: 22001 - protein, 179 aa, Neisseria meningitidis
VNYKIYDGAKIIKKENLSIGDYSQIDDFVFFNCGEKSILGSFVHISSFTSIIGGGEFYMDHFSGLSAGCRIITGSDDFMGGGVNQSNSPIIYCKICNWKTCNFRNKCNSITRRYYWWGCCWSRGYSEKKSAVDYLCRGRLTTEAQITRNIGVRETSCSRISRFMSYNPIPEPAQTKGNA

SEQ ID NO: 22002 - protein, 97 aa, Neisseria meningitidis; identical to SEQ ID NO: 3898

SEQ ID NO: 22003 - protein, 124 aa, Neisseria meningitidis; identical to SEQ ID NO: 1868

SEQ ID NO: 22004 - protein, 94 aa, Neisseria meningitidis
MKLLAALIPLLMSVVGRILTALGLMAVTYSGVDRLVAHFQQAITHSITGAPQAMLQLFYISGGGTVLNILFGAIAFILSFKQITKLATSIGKKK

SEQ ID NO: 22005 - protein, 127 aa, Neisseria meningitidis; identical to SEQ ID NO: 3901

SEQ ID NO: 22006 - protein, 107 aa, Neisseria meningitidis
MAAPPPRQKKTIRNASDRSGLFSGESAASEHTAHAHIDLPSLAHRVHRRPLRLKIKLPSVVGITTQKNELLDIPMFFICFYIVMRSDKRPPDICLDGIVLLNFYKYV

SEQ ID NO: 22007 - protein, 78 aa, Neisseria meningitidis; identical to SEQ ID NO: 3902

SEQ ID NO: 22008 - protein, 75 aa, Neisseria meningitidis; identical to SEQ ID NO: 3903

SEQ ID NO: 22009 - protein, 72 aa, Neisseria meningitidis; identical to SEQ ID NO: 1579

SEQ ID NO: 22010 - protein, 66 aa, Neisseria meningitidis; identical to SEQ ID NO: 3905

SEQ ID NO: 22011 - protein, 107 aa, Neisseria meningitidis; identical to SEQ ID NO: 2106

SEQ ID NO: 22012 - protein, 64 aa, Neisseria meningitidis; identical to SEQ ID NO: 3555

SEQ ID NO: 22013 - protein, 160 aa, Neisseria meningitidis; identical to SEQ ID NO: 3906

SEQ ID NO: 22014 - protein, 139 aa, Neisseria meningitidis; identical to SEQ ID NO: 1180

SEQ ID NO: 22015 - protein, 80 aa, Neisseria meningitidis; identical to SEQ ID NO: 1154

SEQ ID NO: 22016 - protein, 78 aa, Neisseria meningitidis; identical to SEQ ID NO: 3909

SEQ ID NO: 22017 - protein, 103 aa, Neisseria meningitidis; identical to SEQ ID NO: 9893

SEQ ID NO: 22018 - protein, 67 aa, Neisseria meningitidis; identical to SEQ ID NO: 10269

SEQ ID NO: 22019 - protein, 68 aa, Neisseria meningitidis; identical to SEQ ID NO: 3910

SEQ ID NO: 22020 - protein, 68 aa, Neisseria meningitidis; identical to SEQ ID NO: 3911

SEQ ID NO: 22021 - protein, 64 aa, Neisseria meningitidis; identical to SEQ ID NO: 9896

SEQ ID NO: 22022 - protein, 147 aa, Neisseria meningitidis; identical to SEQ ID NO: 1529

SEQ ID NO: 22023 - protein, 65 aa, Neisseria meningitidis; identical to SEQ ID NO: 3913

SEQ ID NO: 22024 - protein, 131 aa, Neisseria meningitidis; identical to SEQ ID NO: 3914

SEQ ID NO: 22025 - protein, 69 aa, Neisseria meningitidis; identical to SEQ ID NO: 1883

SEQ ID NO: 22026 - protein, 68 aa, Neisseria meningitidis
LKNTWQGVKKGVHSATQNYRRSGAMPSERIFRSVLRLVGVSSETVKRKFAGVELSYAGKAAGESLYCL

SEQ ID NO: 22027 - protein, 89 aa, Neisseria meningitidis; identical to SEQ ID NO: 1885

SEQ ID NO: 22028 - protein, 157 aa, Neisseria meningitidis; identical to SEQ ID NO: 8883

SEQ ID NO: 22029 - protein, 100 aa, Neisseria meningitidis; identical to SEQ ID NO: 1890

SEQ ID NO: 22030 - protein, 73 aa, Neisseria meningitidis; identical to SEQ ID NO: 3916

SEQ ID NO: 22031 - protein, 72 aa, Neisseria meningitidis; identical to SEQ ID NO: 202

SEQ ID NO: 22032 - protein, 268 aa, Neisseria meningitidis; identical to SEQ ID NO: 8422

SEQ ID NO: 22033 - protein, 61 aa, Neisseria meningitidis; identical to SEQ ID NO: 9904

SEQ ID NO: 22034 - protein, 707 aa, Neisseria meningitidis; identical to SEQ ID NO: 3919

SEQ ID NO: 22035 - protein, 71 aa, Neisseria meningitidis; identical to SEQ ID NO: 3920

SEQ ID NO: 22036 - protein, 183 aa, Neisseria meningitidis; identical to SEQ ID NO: 3701

SEQ ID NO: 22037 - protein, 177 aa, Neisseria meningitidis; identical to SEQ ID NO: 3295

SEQ ID NO: 22038 - protein, 138 aa, Neisseria meningitidis; identical to SEQ ID NO: 9908

SEQ ID NO: 22039 - protein, 410 aa, Neisseria meningitidis
MPSAHYPEMSEKLMAVLMAMLVTLMPFSIDAYLPAIPEMAQSLNADVHRIEQSLSLFMFGTAFGQVVGGSVSDIKGRKPVALTGLTVYCLAVAAIVFASSAEQLLNLRVVQAFGAGMTVVIVGAMVRDYYSGRKAAQMFALIGIILMVVPLVASMVGALLQGLGGWQAIFVFLAAYSLVLLGLVQHFLPKPAVGGKIGRDVFGLVAGRFKRVLKTRAAMGYLFFQAFSFGSMFAFLTESSFVYQQLYRVTPHQYAWAFALNIITMMFFNRITAWRLKTGVHPQSILLWGIVVQFAANLSQLAAVLFFGLPPFWLLVACVMFSVGTQGLVGANTQACFMSYFKEEGGSANAVLGVFQSLIGAGVGMAATFLHDGSATVMAATMTASTSCGIALLWLCSHRAWKENGQSEYL

SEQ ID NO: 22040 - protein, 389 aa, Neisseria meningitidis; identical to SEQ ID NO: 8081

SEQ ID NO: 22041 - protein, 133 aa, Neisseria meningitidis; identical to SEQ ID NO: 9910

SEQ ID NO: 22042 - protein, 99 aa, Neisseria meningitidis
MHYFSIHDQSGRHIGFFILLADDESEARPQSGRFAVKLEGGMENHVLSPFGQTEIPQYWRVVKDRIELFFDEAPVGSLRNEYLTVSGQTFVLNDLTGNM

SEQ ID NO: 22043 - protein, 137 aa, Neisseria meningitidis; identical to SEQ ID NO: 3923

SEQ ID NO: 22044 - protein, 96 aa, Neisseria meningitidis
VLGKVAEIRRMPSPQPSPTGEGEGCSRFCGCRRFERQLRFAAVVSGHLKNKKQPAQPVFLAEPLIPTATTSSLPWERVRERATNCKAYTNSNPTTE

SEQ ID NO: 22045 - protein, 71 aa, Neisseria meningitidis; identical to SEQ ID NO: 9913

SEQ ID NO: 22046 - protein, 66 aa, Neisseria meningitidis; identical to SEQ ID NO: 3365

SEQ ID NO: 22047 - protein, 132 aa, Neisseria meningitidis; identical to SEQ ID NO: 3931

SEQ ID NO: 22048 - protein, 342 aa, Neisseria meningitidis
MDLSIVVPIYNVESYLEACLSSIEPILSNENVELILVNDGSKDGSEDICYKYIDKTTNNKQQTTNNKQQTTNNTRYRTPNIKYIYKDNQGTAEARNTGIKNSNGKYIVFIDSDDFINCQVLLDFLSKDDIDMPDVVFLNAVKYDKGSVSHFGEDYQPEKILNQSKVEVLKGLCRFRKFPGSACNKIIKRELIIKEKLFFEKEVYAEDIEWSMRLFNAATTFSYLDGCYYYYRQGRKDSKTGTVSEKSIKSLLYILEKNAEMEFNRDISSYLYSFLSYEYLVLLFIMTSKNIECDADIKRRAYHLRFMLLKSNKLIYKLIFPIITLFGVDITGRILKAIRGNI

SEQ ID NO: 22049 - protein, 385 aa, Neisseria meningitidis; identical to SEQ ID NO: 9918

SEQ ID NO: 22050 - protein, 351 aa, Neisseria meningitidis
MELKIDIATNNFKHGGGTERYTLDLVKGLNRQNITPAVYATKFDHGIPEYAMIEPHLVDQHRTLKKLRSFLFSSRLAQTRKNSAAKLIACHHADYADLLICGGTHLGYLHHMAQKPNLLDRLAIRRNRSNYATAKLIMAHSHMMRRELVGLYGVPPERIQVAPPPPDTERFFPQPGETADLRAKYGFADHETVFLFPSTGHTRKGLELLADFFEHTGLPVKLAVVGSPLPRPMKNVVGLGFCTDMPELYRAADFTIMASLYEPFGLVGVESVLCGTRVVLSENMACTEVMNEEAGFFFSRQNPETLAQAVAQAVSLKKQGGHRLSDPMRALNYNPSLSHHIDRLTDILASV

SEQ ID NO: 22051 - protein, 171 aa, Neisseria meningitidis; identical to SEQ ID NO: 8133

SEQ ID NO: 22052 - protein, 266 aa, Neisseria meningitidis; identical to SEQ ID NO: 3949

SEQ ID NO: 22053 - protein, 64 aa, Neisseria meningitidis; identical to SEQ ID NO: 3951

SEQ ID NO: 22054 - protein, 112 aa, Neisseria meningitidis
LFGEVSAFFKKHDKGLFYWMTLTSHADYPESDIFNHRLKCTEYGLPAETDLCRNFSLHTQFFDQLADLIQRPEMKGTEVIIVGDHPPPVGNLNETFRYLKQGHVAWLHFKIK

SEQ ID NO: 22055 - protein, 525 aa, Neisseria meningitidis; identical to SEQ ID NO: 9924

SEQ ID NO: 22056 - protein, 399 aa, Neisseria meningitidis; identical to SEQ ID NO: 3872

SEQ ID NO: 22057 - protein, 141 aa, Neisseria meningitidis; identical to SEQ ID NO: 3955

SEQ ID NO: 22058 - protein, 91 aa, Neisseria meningitidis; identical to SEQ ID NO: 3956

SEQ ID NO: 22059 - protein, 343 aa, Neisseria meningitidis; identical to SEQ ID NO: 9927

SEQ ID NO: 22060 - protein, 677 aa, Neisseria meningitidis; identical to SEQ ID NO: 9929

SEQ ID NO: 22061 - protein, 642 aa, Neisseria meningitidis
MLPTQPNPTQPNPSPDLIDTAGVNTEAIYTSDGITANSTQLEQLKKLFPACFDADGNFLIDRLQAEIAPQTDIGREFYEMNWLGKSYARLLRNLPPETLISEDKTHNAKPENAGSQNLLIRGDNLEVLKHLKNAYTNSVKMIYIDPPYNTGSDGFVYQDDRKFTPAELACLANIDEDEAARILDFTDKGSNSHSAWLTFMYPRLYIARELLKDDGVIFISIDDNEAAQLKLLCDEVFGEGNFIKDLIVNTSEGGGNAKYVVNGHETVLVYAKDITHFDNLKRPKDIRGKKIVINDELYWIQEDAVREQFGKYGNLHYEDIIEIKGIEFKNKIDKDIENNEYILIPKSYGKTIIGKLRKVSDDFSKFHSILNIGNISKNLTKDGIRELEELFETGKGYSPFETPKPLDLLKRLVLSATFKGNQTDLILDFFAGSGTTAHAVMQLNAEGQNGNRRYICVQLPEKTAEKSEARKAGYPTIFDITKARIEKAAAKIRVEHPDYTGDSGFKIFQTADNFRQHPDKDFSPEQPDLPLNDELSEEQLQTLLTTWTLYDGAALTTPVEPVRLGAYTAYLCEKRLYLMNAGFTSADLLAFIRKLDDDAAFNPNRVIVFGSNMASAMQHELDQAVRGYANKKEIELNVVIRV

SEQ ID NO: 22062 - protein, 698 aa, Neisseria meningitidis
MTLKASKQASKQASKQASKQASKQASKQASKQAVGLIYHYLFYRCFARHMFEVRMRTIPSKKPRLKTNLFKRRKTEIPTFGAARAAYLLIASVCSELSLVQILVLPKSATMPIFHFQTSRNPALPIIFPAVKPIKIHPNMGMTKSISKVKTTIAAYSPSIICPLLRNILDTYGDNLKDAVKKQLQDLYKTRPEAWEENKKRTEEAYIEQLGPKFSILKQKNPDLINKLVEDSVLTPHSNTSQTSLNNIFNKKLHVKIENKSHVAGQVLELTKMTLKDSLWEPRRHSDIHTLETSDNARIRLNTKDEKLTVHKDYAGGADFLFGYDVRESDEPALTFEDKVSGQSGVVLERRPENLKTLDGRKLIAAKTADSGSFAFKQNYRQGLYELLLKQCEGGFCLGVQRLAIPEAEAVLYAQQAYAANTLFGLRAADRGDDVYAADPSRQNIRGGAAADGRRKGVQIGGEVFVRQNEGSRLAIGVMGGRVGQHASVNSKGGAAGSDLHGYGGGVYAAWHQLRDKQTGAYLDGWLQYQRFKHRINDENRAERYKTKGWTASVEGGYNTLVAEGVVGKGNNVRFYLQPQAQFTYLGVNGGFTDSEGTGVGLLGSGQWQSRAGIRAKNRFALRNGVNLQPFAAFNVLHRSKSFGVEMDGEKQTLAGRTALEGRFGIEAGWKGHMSARIGYGKRTDGDKEAALSLKWLF

SEQ ID NO: 22063 - protein, 236 aa, Neisseria meningitidis; identical to SEQ ID NO: 9307

SEQ ID NO: 22064 - protein, 268 aa, Neisseria meningitidis; identical to SEQ ID NO: 8872

SEQ ID NO: 22065 - protein, 53 aa, Neisseria meningitidis
MSEQPEKNHNPLLEDERKNPVYRMGQAVAGFMLVVWVAVLALVFFLVFRFWLS

SEQ ID NO: 22066 - protein, 335 aa, Neisseria meningitidis
MLKQTTLLAACASFAALLGGCATQQPAPVIAGNSGMQDAPSSAVYNNPYGATPYSPAPAGDAPYVPPVQSAPVYTPPAYVPPSAPAVSGTYVPSYAPVDINAATHTIVRGDTVYNISKRYHISQDDFRAWNGMTDNTLSIGQIVKVKPAGYAAPKTSAVESRPAVPAAVQTPVKPAAQPPVQSAPQPAAPAAENKAVPAPAPQSPAASPSGTRSVGGIVWQRPTQGKVVADFGGNNKGVDIAGNAGQPVLAAADGKVVYAGSGLRGYGNLVIIQHNSSFLTAYGHNQKLLVGEGQQVKRGQQVALMGNTDASRTQLHFEVRQNGKPVNPNSYIAF

SEQ ID NO: 22067 - protein, 153 aa, Neisseria meningitidis; identical to SEQ ID NO: 8704

SEQ ID NO: 22068 - protein, 160 aa, Neisseria meningitidis; identical to SEQ ID NO: 4185

SEQ ID NO: 22069 - protein, 421 aa, Neisseria meningitidis; identical to SEQ ID NO: 9531

SEQ ID NO: 22070 - protein, 410 aa, Neisseria meningitidis; identical to SEQ ID NO: 446

SEQ ID NO: 22071 - protein, 164 aa, Neisseria meningitidis; identical to SEQ ID NO: 7401

SEQ ID NO: 22072 - protein, 219 aa, Neisseria meningitidis
MDTWHDALGNEKHQPYFQKILNAVRQERLSGQIIYPPETDVFNAFRLTAFDRVKVVILGQDPYHGAGQAHGLAFSVRQGVRIPPSLLNIYKELETDINGFSIPDHGCLTAWAEQGVLLLNTVLTVRAGQAHSHALLGWERFTDTVIRQLAAHRKHLVFMLWGGYAQQKRKLIDSQNHLILTAPHPSPLSAYRGFFGCRHFSQANSYLSRHGIDPINWKL

SEQ ID NO: 22073 - protein, 38 aa, Neisseria meningitidis; identical to SEQ ID NO: 7004

SEQ ID NO: 22074 - protein, 244 aa, Neisseria meningitidis; identical to SEQ ID NO: 1832

SEQ ID NO: 22075 - protein, 128 aa, Neisseria meningitidis; identical to SEQ ID NO: 605

SEQ ID NO: 22076 - protein, 240 aa, Neisseria meningitidis; identical to SEQ ID NO: 1969

SEQ ID NO: 22077 - protein, 103 aa, Neisseria meningitidis; identical to SEQ ID NO: 1278

SEQ ID NO: 22078 - protein, 603 aa, Neisseria meningitidis
MKQIRNIAIIAHVDHGKTTLVDQLLRQSGTFRANQQVDERVMDSNDLEKERGITILAKNTAIDYAGYHINIVDTPGHADFGGEVERVLGMVDCVVLLVDAQEGPMPQTRFVTKKALALGLKPIVVINKIDKPSARPSWVIDQTFELFDNLGATDEQLDFPIVYASGLSGFAKLEETDESNDMRPLFDTILKYTPAPSGSADETLQLQISQLDYDNYTGRLGIGRILNGRIKPGQVVAVMNHEQQIAQGRINQLLGFKGLERVPLEEAEAGDIVIISGIEDIGIGVTITDKENPKGLPMLSVDEPTLTMDFMVNTSPLAGTEGKFVTSRQIRDRLQKELLTNVALRVEDTADADVFRVSGRGELHLTILLENMRREGYELAVGKPRVVYRDIDGQKCEPYENLTVDVPDDNQGAVMEELGRRRGELTNMESDGNGRTRLEYHIPARGLIGFQGEFMTLTRGVGLMSHVFDDYAPVKPDMPGRHNGVLVSQEQGEAVAYALWNLEDRGRMFVSPNDKIYEGMIIGIHSRDNDLVVNPLKGKKLTNVRASGTDEAVRLTTPIKLTLEGAVEFIDDDELVEITPQSIRLRKRYLSELERRRHFKKLD

SEQ ID NO: 22079 - protein, 352 aa, Neisseria meningitidis; identical to SEQ ID NO: 15871

SEQ ID NO: 22080 - protein, 407 aa, Neisseria meningitidis; identical to SEQ ID NO: 12938

SEQ ID NO: 22081 - protein, 216 aa, Neisseria meningitidis
MISVEHVSKQYQMRGGMRTVLDDINFSLQKGEKVGILGRNGAGKSTLIRLISGVEPPTTGEIKRTMSISWPLAFSGAFQGSLTGMDNLRFICRIYNVDIDYVKNFTEEFSELGQYLYEPVKRYSSGMKARLAFALSLAVEFDCYLIDEVIAVGDSRFADKCKYELFEKRKDRSIILVSHSHSAMKQYCDNAMVLEKGHMYQFEDMDKAYEYYNSLP

SEQ ID NO: 22082 - protein, 110 aa, Neisseria meningitidis; identical to SEQ ID NO: 7667

SEQ ID NO: 22083 - protein, 369 aa, Neisseria meningitidis
MKYKRIVFKVGTSSITHSDGSLSRGKIQTITRQLAALHHAGHELVLVSSGAVAAGFGALGFKKRPVKIADKQASAAVGQGLLMEEYTANLSSDGIVSAQILLSRADFADKRRYQNAGGALSVLLQRRAVPIINENDTVSVEELKIGDNDTLSAQVAAMIQADLLVLLTDIDGLYTGNPNSNPDAVRLDKIEHINHEIIEMAGGSGSANGTGGMLTKIKAATIATESGVPVYICSSLKPDALAEAADNQADGSFFVPRAKGLRTQKQWLAFYSESRGGVYVDEGAEHALSEQGKSLLMSGIAGIEGHFSRMDTVTVYSKATKQPLGKGRVLFGSAAAEDLLKLRKAKGVFIHRDDWISITPEIRLLLTEF

SEQ ID NO: 22084 - protein, 109 aa, Neisseria meningitidis; identical to SEQ ID NO: 4604

SEQ ID NO: 22085 - protein, 467 aa, Neisseria meningitidis; identical to SEQ ID NO: 7547

SEQ ID NO: 22086 - protein, 153 aa, Neisseria meningitidis; identical to SEQ ID NO: 750

SEQ ID NO: 22087 - protein, 887 aa, Neisseria meningitidis; identical to SEQ ID NO: 7001

SEQ ID NO: 22088 - protein, 139 aa, Neisseria meningitidis; identical to SEQ ID NO: 6288

SEQ ID NO: 22089 - protein, 357 aa, Neisseria meningitidis
MRPFFVGAAVLAILGALVFFINPGAIVLHRQIFLELMLPAAYGGFLTAALLDWTGFSGNLKPVATLMAALLLAASAILPFSPQTASFFVAAYWLVLLLFCARLIWLDRNTDNFALLMLLAAFTVFQTAYAVSGDLNLLRAQVHLNMAAVMFVSVRVSILLGAEALKECRLKDPVFIPNVVYKNIAITFLLLHAAAELWLPAQTAGFTALAVGFILLAKLRELHHHELLRKHYVRTYYLLQLFAAAGYLWTGAAKLQNLPASAPLHLITLGGIMGGVMMVWLTAGLWHSGFTKLDYPKLCRIAVPILFAAAVSRAVLMNVNPIFFITVPAILTAAVFVLYLLTFVPIFRANAFTDDPE

SEQ ID NO: 22090 - protein, 332 aa, Neisseria meningitidis; identical to SEQ ID NO: 155

SEQ ID NO: 22091 - protein, 121 aa, Neisseria meningitidis; identical to SEQ ID NO: 6750

SEQ ID NO: 22092 - protein, 402 aa, Neisseria meningitidis; identical to SEQ ID NO: 2438

SEQ ID NO: 22093 - protein, 592 aa, Neisseria meningitidis
MTVLKPSHWRVLAELADGLPQHVSQLARMADMKPQQLNGFWQQMPAHIRGLLRQHDGYWRLVRPLAVFDAEGLRELGERSGFQTALKHECASSNDEILELARIAPDKAHKTICVTHLQSKGRGRQGRKWSHRLGECLMFSFGWVFDRPQYELGSLSPVAAVACRRALSRLGLDVQIKWPNDLVVGRDKLGGILIETVRTGGKTVAVVGIGINFVLPKEVENAASVQSLFQTASRRGNADAAVLLETLLVELDAVLLQYARDGFAPFVAEYQAANRDHGKAVLLLRDGETVFEGTVKGVDGQGVLHLETAEGKQTVVSGEISLRSDDRPVSVPKRRDSERFLLLDGGNSRLKWAWVENGTFATVGSAPYRDLSPLGAEWAEKADGNVRIVGCAVCGEFKKAQVQEQLARKIEWLPSSAQALGIRNHYRHPEEHGSDRWFNALGSRRFSRNACVVVSCGTAVTVDALTDDGHYLGGTIMPGFHLMKESLAVRTANLNRHAGKRYPFPTTTGNAVASGMMDAVCGSVMMMHGRLKEKTGAGKPVDVIITGGGAAKVAEALPPAFLAENTVRVADNLVIHGLLNLIAAEGGESEHT

SEQ ID NO: 22094 - protein, 314 aa, Neisseria meningitidis
MIEKSISIVDGKEYSVFAVSHEFRYTFDEPILVADLISSLKAYETLTSSYLPAILNQLFDVKIQKIKVAVSEIERGSFLEKLIFNLFFKDEDAYNEFCLKIRKFLGTENQDGSINMSKIIMFAMTTLLGVGAGYLLFKNPPQEKQAITNNIVTVINADSSVALDGEHLVSVVKEVTGSSKQKTAENVAKVYAPASKNNGSITLGTDDVRIEPVAQQTVATLPKDVDLRDTPLTEDYTDIDVQIRATDRDKNSGWYAVIDQIVPSRVRLELPEDIDLNRLANNATIRANVTVEFDLKQNGSRKPKKIILTSLSTD

SEQ ID NO: 22095 - protein, 193 aa, Neisseria meningitidis
MEEKNDYTDAASDNRNGQEIEVGIAGAGDRILAALLNQLFTFLVLLVPFAGLIAFAIKNEGRIGGSEEIFGLLLGMTSFWVGLAGILVYTVVQIYYMSRDGQSLGKKIMRIRVLKTDGRNPGFVGTVLVREIAWSVLVAIIAAVIGLIAGDNGENAINLLAFLANFVLLFMVKRDRRTLYDILADTVVVKLPK

SEQ ID NO: 22096 - protein, 405 aa, Neisseria meningitidis; identical to SEQ ID NO: 15536

SEQ ID NO: 22097 - protein, 344 aa, Neisseria meningitidis
MPNCFKFHTVIERHWQKPYPVLSFLLKPLSGLFAKIAAKRRTDFLSGKRQSEKLPVPVVVVGNIHAGGTGKTPIVAALVSGLQEKGVKVGIISRGYGRKSKAVHVLNAASRAEDAGDEPLLLFSKTGAPTAVGSSRAEVGRALLAAHPDIGLIVADDGLQHYALQRDVEIAVFPSADTARQDLDLLPNGNLREPLSRLDSVDAVVVSGGKADALFRPSENMFHSRIEAGRIYRLNNPSEILDTGRLKNQTVVAVAGIAKPARFFDSLRHMGITVKRTVALPDHADISAADLPDADAVIITEKDAVKFSDGICTDNVWVLPVCAIIEPDLAAFVLERLEDVPKAV

SEQ ID NO: 22098 - protein, 442 aa, Neisseria meningitidis
MKKVFIRTFGCQMNEYDSDKMLAVLAEEHGGIEQVTQADEADIILFNTCSVREKAQEKVFSDLGRVRPLKEKNPGLIIGVAGCVASQEGENIIKRAPYVDVVFGPQTLHRLPKMIVDKETSGLSQVDISFPEIEKFDHLPPARVEGGAAFVSIMEGCSKYCSFCVVPYTRGEEFSRPLNDVLTEIANLAQQGVKEINLLGQNVNAYRGEMDDGEICDFATLLRIVHEIPGIERMRFTTSHPREFTDSIIECYRDLPKLVSHLHLPIQSGSDRVLSAMKRGYTALEYKSIIRKLRAIRPDLCLSSDFIVGFPGETEREFEQTLKLVKDIAFDLSFVFIYSPRPGTPAANLHDDTPHEEKVRRLEALNEVIEAETARINQTMVGTVQRCLVEGISKKDPDQLQARTANNRVVNFTGTPDMINQMIDLEITEAYTFSLRGKIVEA

SEQ ID NO: 22099 - protein, 284 aa, Neisseria meningitidis; identical to SEQ ID NO: 14960

SEQ ID NO: 22100 - protein, 352 aa, Neisseria meningitidis; identical to SEQ ID NO: 6670

SEQ ID NO: 22101 - protein, 508 aa, Neisseria meningitidis
MNPMYITFAIYLVAVLLIGLAAYFSTRNFDDYILGGRSLGPFVTAMSAGASDMSGWLLMGLPGAIYLSGLNEAWIAIGLLVGAYFNWLLVAGRLRVHTEYANNALTLPDYFFHRFGAGGHLMKVVSALIILFFFTIYCASGIVAGATLFQSLFEGMTYNQAMWLGAGATIAYTFLGGFLAVSWTDTLQASLMIFALILTPVMVYLGLGGAEQMSAAIQSVAAGTGKEYGSLFAGTTVIGIISTAAWGLGYFGQPHILARFMAAESAKSLVSARRIGMTWMALCLAGAVAVGYFGIAYFGANPDKVSSMSGNHERIFIALSTLLFNPWIAGIILSAILAAVMSTLSCQLLVCSSAITEDFYKGFLRKNAQQSELVWVGRLMVLAIAVISILIASDPNSKVLGLVSYAWAGFGAAFGPIVILSVLWKRITAYGALSGMVAGALTVVVWAEWVKKPAQAAGESGLLTMYEIVPGFIVCLIIAVLVSLFNKEPSRETQERFEKADADYRAAR

SEQ ID NO: 22102 - protein, 46 aa, Neisseria meningitidis; identical to SEQ ID NO: 13095

SEQ ID NO: 22103 - protein, 74 aa, Neisseria meningitidis; identical to SEQ ID NO: 3004

SEQ ID NO: 22104 - protein, 704 aa, Neisseria meningitidis; identical to SEQ ID NO: 6999

SEQ ID NO: 22105 - protein, 106 aa, Neisseria meningitidis; identical to SEQ ID NO: 3331

SEQ ID NO: 22106 - protein, 593 aa, Neisseria meningitidis
MPYFALFDDAVSGRAKRYQNHVESRFFRPEELDALDGALQSGWQKGLHSVLFADYGFGLPLTGVESERGGNLALHWFANCADIDAESWLARHSDGLPAGISTPQPSVSETDYLDRIRQIHEAIRRGDTYQINYTTRLHLQAYGNPVSLYRRLRQPVPYAVLSHLPDAEGQSAWTLCFSPELFLKIGSDGTISTEPMKGTAPILGDGQDERRAAELQADPKNRAENVMIVDLLRNDLGKIAQTGTVCVPEPFKVSRFGSVWQMTSTIQAQALPHTSFADILRAAFPCGSITGAPKKMSMQIIESLEAEARGLYTGSIGYLNPCSGGLGFEGTFNVVIRTLSLTPLSDGIYQGVYGVGSGIVIDSDPAAEYRECGWKARFLNELRPDFGIFETLRVENGRCTLLDRHLCRLKTSAQALNLPLPDGCENQIKQYIADLPDGAFRIKALLASDGISLSRAVLNHLADKQRVIISPAVLPAQNYLRRFKTTCRALFDQAWQTAETQGAFDSLFFNSDGILLEGGRSNVFIKHRGQWLTPSLDLDILNGIMRQAVLDEPQKYLQTNQVIETHITQKTLQEAEEIRLSNALRGVFAAALA

SEQ ID NO: 22107 - protein, 65 aa, Neisseria meningitidis; identical to SEQ ID NO: 127

SEQ ID NO: 22108 - protein, 313 aa, Neisseria meningitidis; identical to SEQ ID NO: 7029

SEQ ID NO: 22109 - protein, 349 aa, Neisseria meningitidis
MPSEAFRRHRAYRENKLQPLVSVLICAYNVEKYFAQSLAAVVNQTWRNLEILIVDDGSTDGTLAIAKDFQKRDSRIKILAQAQNSGLIPSLNIGLDELAKSGGGGKYIARTDADDIAAPDWIEKIVGEMEKDRSIIAMGAWLEVLSEEKDGNRLARHHRHGKIWKKPTRHEDIADFFPFGNPIHNNTMIMRRSVIDGGLRYNTERDWAEDYQFWYDVSKLGRLAYYPEALVKYRLHANQVSSKYSIRQHEIAQGIQKTARNDFLQSMGFKTRFDSLEYRQIKAVAYELLEKHLPEEDFERARRFLYQCFKRTDTPPAGAWLDFAADGRMRRLFTLRQYFGILRRLLKNR

SEQ ID NO: 22110 - protein, 82 aa, Neisseria meningitidis; identical to SEQ ID NO: 2740

SEQ ID NO: 22111 - protein, 84 aa, Neisseria meningitidis; identical to SEQ ID NO: 3171

SEQ ID NO: 22112 - protein, 267 aa, Neisseria meningitidis; identical to SEQ ID NO: 1506

SEQ ID NO: 22113 - protein, 183 aa, Neisseria meningitidis
MKTYLALISAAVIGLAACSQEPAAPAAEATHAAEAPASEAPAAEAAPADAAEAPAAGNCAATVESNDNMQFNTKDIQVSKACKEFTITLKHTGTQPKASMGHNLVIAKAEDMDGVFKDGVGAADTDYVKPDDARVVAHTKLIGGGEESSLTLDPAKLADGEYKFACTFPGHGALMNGKVTLVD

SEQ ID NO: 22114 - protein, 296 aa, Neisseria meningitidis; identical to SEQ ID NO: 7062

SEQ ID NO: 22115 - protein, 363 aa, Neisseria meningitidis; identical to SEQ ID NO: 15367

SEQ ID NO: 22116 - protein, 465 aa, Neisseria meningitidis; identical to SEQ ID NO: 1096

SEQ ID NO: 22117 - protein, 247 aa, Neisseria meningitidis; identical to SEQ ID NO: 4076

SEQ ID NO: 22118 - protein, 242 aa, Neisseria meningitidis; identical to SEQ ID NO: 6894

SEQ ID NO: 22119 - protein, 93 aa, Neisseria meningitidis; identical to SEQ ID NO: 13684

SEQ ID NO: 22120 - protein, 547 aa, Neisseria meningitidis; identical to SEQ ID NO: 3624

SEQ ID NO: 22121 - protein, 597 aa, Neisseria meningitidis
MKNIRNFSIIAHIDHGKSTLADRFIQYCGGLDLREMSTQVLDSMDIEKERGITIKAQTAALNYKARDGQVYQLNLIDTPGHVDFSYEVSRSLSACEGALLVVDASQGVEAQTVANCYTAIDLGVEVVPVLNKIDLPAADPERVEQEIEDIIGIDAVGAVQCSAKSGIGVEDVLEEIVAKVPAPTGDENAPLQAVIVDSWFDNYVGVVMLIRVKNGTIKLKDKVRFMSTKAETQVEQLGVFTPKSVQKQELKAGEVGFLITGVKELGQAKVGDTVTLVANPASEPLPGFQEVQSQVFAGLYPVESHDYEALRDALEKLQLNDASLKFEPEVSQALGFGFRCGFLGLLHLEIVQERLEREFDMDLITTAPTVVYEVVLKSGEKIEVENPSKLPDIGSIETILEPIITATILVPQEYVGNVMTLCNQKRGVQVNMQYMGRQVMLTYDLPMNEVVMDFFDKLKSTSRGYASLDYHFKEFQPSDLIKLDIMVNGEKVDALSLIVHRQSAVHRGRELASKMRELIPRQMFDIAVQAAIGSQIIARENVKALRKNVLAKCYGGDITRKKKLLEKQKAGKRRMKQVGNVEIPQSAFLAILQVSDK

SEQ ID NO: 22122 - protein, 423 aa, Neisseria meningitidis; identical to SEQ ID NO: 7094

SEQ ID NO: 22123 - protein, 558 aa, Neisseria meningitidis
MSQQYVYSMLRVSKVVPPQKTIIKDISLSFFPGTKIGLLGLNGAGKSTVLRIMAGVDKEFEGEAVPMGGIKIGYLPQEPELDPEKTVREEVESGLGEVAAAQKRLEEVYAEYANPDADFDALAEEQGRLEAIIAAGSSTGGGAEHELEIAADALRLPEWDAKIDNLSGGEKRRVALCKLLLSKPDMLLLDEPTNHLDAESVEWLEQFLVRFPGTVVAVTHDRYFLDNAAEWILELDRGHGIPWKGNYSSWLEQKEKRLENEAKSEAARVKAMKQELEWVRQNAKGRQAKSKARLARFEEMSNYEYQKRNETQEIFIPVAERLGNEVIEFVNVSKSFGDKVLIDDLSFKVPAGAIVGIIGPNGAGKSTLFKMIAGKEQPDSGEVKIGQTVKMSLIDQSREGLQNDKTVFDNIAEGRDILQVGQFEIPARQYLGRFNFKGSDQSKIAGQLSGGERGRLHLAKTLLGGGNVLLLDEPSNDLDVETLRALEDALLEFAGSVMVISHDRWFLDRIATHILACEGDSKWVFFDGNYQEYEADKKRRLGEEGAKPKRIKYKPVTR

SEQ ID NO: 22124 - protein, 376 aa, Neisseria meningitidis; identical to SEQ ID NO: 7223

SEQ ID NO: 22125 - protein, 388 aa, Neisseria meningitidis
MRKFNLTALSVMLALGLTACQPPEAEKAAPAASGETQSANEGGSVSIAVNDNACEPMELTVPSGQVVFNIKNNSGRKLEWEILKGVMVVDERENIAPGLSDKMTVTLLPGEYEMTCGLLTNPRGKLVVTDSGFKDTANEADLEKLSQPLADYKAYVQGEVKELVAKTKTFTEAVKAGDIEKAKSLFADTRVHYERIEPIAELFSELDPVIDAREDDFKDGAKDAGFTGFHRIEYALWVEKDVSGVKEIAAKLMTDVEALQKEIDALAFPPGKVVGGASELIEEVAGSKISGEEDRYSHTDLSDFQANVDGSKKIVDLFRPLIETKNKALLEKTDTNFKQVNEILAKYRTKDGFETYDKLGEADRKALQASINALAEDLAQLRGILGLK

SEQ ID NO: 22126 - protein, 210 aa, Neisseria meningitidis
MLNIQNPMFLMLMSDSPQLREFLVRNIDNIANDTEAFINRYDLNRHMIYNTLLMVEGKQLDRLKQRSEKVLAHPTPSKWLQKRLYDYRFFLAFAEQDAEAMKAALEPLFDKKTARMAAKETLSYFDFYLQPQIVTYAKIASMHGFDLGIDQEIAPRDLIVYDPLPADEYQDIFDFMKQYDLSYPYEYLQDWIDYYTFKTDKLVFGNAKRE

SEQ ID NO: 22127 - protein, 287 aa, Neisseria meningitidis; identical to SEQ ID NO: 2812

SEQ ID NO: 22128 - protein, 95 aa, Neisseria meningitidis; identical to SEQ ID NO: 371

SEQ ID NO: 22129 - protein, 245 aa, Neisseria meningitidis
MIILDKVSKHYQTRDKTRFAAVEPTSLEIRDGEIFGLMGYSGAGKSTLLRLINLLERPDTGKVNVCGQELTALDAAALRQARQNIGMVFQQFNLLSNRTVADNVAFPLEIAGWPSEKIKARVAECLEIVGLTERAGHYPAQLSGGQKQRVGIARALAPKPQVILADEPTSALDPATTRSVLECLEDINKRFNVTIVIVTHEMSVIRRLCDRAALLDKGKVVEIVEVRGNQIHARSDIGRELIRED

SEQ ID NO: 22130 - protein, 287 aa, Neisseria meningitidis; identical to SEQ ID NO: 3495

SEQ ID NO: 22131 - protein, 159 aa, Neisseria meningitidis; identical to SEQ ID NO: 929

SEQ ID NO: 22132 - protein, 274 aa, Neisseria meningitidis; identical to SEQ ID NO: 450

SEQ ID NO: 22133 - protein, 244 aa, Neisseria meningitidis
MIQRQIILDTETTGLYADGGDRLVEFAGLEMVNRQMTDKNLHLYVHPERDMPEEAARVHGLTIEVLEGKNAPPFAEVGRQIADFLRGAELIIHNAKFDVGFLNMEFRRMGLPTVEELGCTVTDTLAMAREMFPGQKASLDALCNRFSVDRSKRVLHGALIDCELLGEVYLAMTRRQFDLMGAAAEEKMETKPVVHTETKRSGKLKVIRADENELAAHGQYLDGLGEACIWRKEAVPSENGGTDA

SEQ ID NO: 22134 - protein, 443 aa, Neisseria meningitidis
MDSGILKLRVSAGEIGDIRYEEKRDGKSAEGSISTFNNKFPLYRNKILNLRDVEQGLENLRRLSSVKTDIQIIPSEEEGKSDLQIKWQQNKPIRFSIGIDDAGGKTTGKYQGNVALSFDNPLGLSDLFYVSYGRGLAHKTDLTDATGTETESGSRSYSVHYSVPVKKWLFSFNHNGHRYHEATEGYSVNYDYNGKQYQSSLAAERMLWRNRLHKTSVGMKLWTRQTYKYIDDAEIEVQRRRSAGWEAELRHRAYLNRWQLDGKLSYKRGTGMRQSMPAPEENGGDILPGTSRMKIITAGLDAAAPFILGKQQFFYATAIQAQWNKTPLVAQDKLSIGSRYTVRGFDGEQSLFGERGFYWQNTLTWYFHPNHQFYLGADYGRVSGESAQYVSGKQLMGAVVGFRGGHKVGGMFAYDLFAGKPLHKPKGFQTTNTVYGFNLNYSF

SEQ ID NO: 22135 - protein, 69 aa, Neisseria meningitidis; identical to SEQ ID NO: 3167

SEQ ID NO: 22136 - protein, 502 aa, Neisseria meningitidis
MTTTPANILASVDLGSNSFRLQICENNNGQLKVIDSFKQMVRFAAGLDEQKNLSASSQEQALDCLAKFGERLRGFRPEQVRAVATNTFRVAKNIADFLPKAEAALGFPIEIIAGREEARLIYTGVIHTLPPGGGKMLVIDIGGGSTEFVIGSTLNPDITESLPLGCVTYSLRFFQNKITAKDFQSAISAARNEIQRISKNMRREGWDFAVGTSGSAKSIRDVLAAEIPQEADITYKGMRALAERIIEAGSVKKAKFENLKPERIEVFAGGLAVMMAAFEEMKLDRMTVTEAALRDGVFYDLIGRGLNEDMRGQTVAEFQHRYHVSLNQAKRTAETAQTFMDSLCHAKNVTVQELALWQQYLGRAAALHEIGLDIAHTGYHKHSAYILENADMPGFSRKEQTILAQLVIGHRGDMKKMGGIIGTNEMLWYAVLSLRLAALFCRSRQDLTFPKNMQLRTDTESCGFILRIDREWLERHPLIADALEYESVQWQKINMPFKVEAV

SEQ ID NO: 22137 - protein, 658 aa, Neisseria meningitidis
MSKLKTIALTASGLSVCPGFLYAQNTSSHQIGLAIMRLNSSILDLPPTKQYFQSGSLWGELRQGFRMGEVNPELVRRHESKFIASHSYFNRVINRSRPYMYHIANEVKKRNMPAEAALLPFIESAFVTKAKSHVGASGLWQFMPATGRHYGLEKTPVYDGRHDVYAATDAALNYLQYLYGLFGDWPLAFAAYNWGEGNVGRAINRARAQGLEPTYENLRMPNETRNYVPKLLAVRNIIATPQSFGMNISDIDNKPYFQAVEPDRPLDNEAIARLAGITQSELLALNPAFNVPAFIPKSKRKLLLPVASVQTFQSNYLNAAPDSLFSWEVYTPAAKTSLSDISTATGMSIADIKRLNNLNGNLVNAGRSILVAKNGKTLQTASESVVSIDIDNTPDTYRSNMPAGTVNVGIARIRPAAAQTADITVAPLPQKTVRTEPDPLVRIAEPALATAAAQPQTEKQTAMPSETQTATLAQIIPQNDMQAADELMQLVARNNLRRQAEETISAVIGTPDTVAEHKISASPQHTAAADGKRRIRLETRIAKAADGEAEISPLHASIHRVVEGDTLFNIAKRYNVSVADLIVANNIKGNTIQKGQVLRLAQAAPAQTRIEKVSYTARKGDTFKSIAARFNIHIDDIRRLNPNLNTINPGQRVKLIGS

SEQ ID NO: 22138 - protein, 136 aa, Neisseria meningitidis; identical to SEQ ID NO: 1274

SEQ ID NO: 22139 - protein, 350 aa, Neisseria meningitidis
MTVSPVALRRKTECKPHPTARYWKKCDVEALFGLPFLDLIYQAAEIHRQNFNPREIQLSTLLSIKTGGCPEDCAYCPQSAHHNTNLGKEQMMDVDEIVEKAKIAKSRGASRFCMGAAWRGPKPKDVETVSAIIKAVKGLGMETCGTFGMLEEGMAEDLKEAGLDYYNHNLDTDPDRYNDIIHTRRHEDRMDTLGKVRNAGLKVCCGGIVGMNETRAERAGLIASLANLDPQPESVPINRLVKVEGTPLDDAEDLDWTEFVRTIAVARITMPQSYVRLSAGRSNMPEAMQAMCFMAGANSIFYGDKLLTTGNPDEDGDRILMEKLNLYPLQFELEGEVAEVEKASGIKVDY

SEQ ID NO: 22140 - protein, 320 aa, Neisseria meningitidis
MQYAKISGTGSYLPANRVSNDDLAQKVDTSDEWITARTGIKFRHIAAENEKTSDLAAEAARRALADAKLNINDIDLIIVATATPDMQFPSTATIVQQKLGITNGCPAFDVQAVCAGFMYALTTANAYIKSGMAKNALIIGAETFSRIVDWNDRTTCVLFGDGAGAVVLSAADKPGIIHSKLKADGNYLKLLNVPGQIACGKVSGSPYISMDGPGVFKFAVKMLSKIADDVIEEAGYTAAQIDWIVPHQANRRIIESTAKHLGLSMDKVVLTVQDHGNTSAASIPLALDTGIRSGQIKRGQNLLLEGIGGGFAWGAVLLQY

SEQ ID NO: 22141 - protein, 433 aa, Neisseria meningitidis
MTESVRLPVARLKPSTVALPGSKSISNRTLLLAALSDNACEIHSLLKSDDTDRMLEALDKLGVQIEYLAEDRLKVHGTGGRFPNRTADLFLGNAGTAFRPLTAALAVLGGDYHLHGVPRMHERPIGDLADALRIAGADVEYLGKEHYPPLHIGKRQDNGERVIPIKGNVSSQFLTALLMALPLTGQAFEIRMVGELISKPYIDITLKLMAQFGVQVINEGYRVFKIPADARYHAPEHLHVEGDASGASYFLAAGLIAATPVRVTGIGANSIQGDVAFARELEKIGADVVWGENFVEVSRPKERAVQAFDLDANHIPDAAMTLAIVALATGQTCTLRNIGSWRVKETDRIAAMANELRKLGAKVAEEAEAIHITSPETPTPDAVIDTYDDHRMAMCFSLVSLLGVPVVINDPKCTHKTFPTYFDVFSSLTETAE

SEQ ID NO: 22142 - protein, 441 aa, Neisseria meningitidis; identical to SEQ ID NO: 7778

SEQ ID NO: 22143 - protein, 231 aa, Neisseria meningitidis
MLSEADIAAQTAFAAALPLLIDCPMLGEEMSRQEQSALWEQYSGEKGLWIVDPIDGTNNFVNGLPHFAVSVAFVRNGRAELGVIYNPVSGECFYAERGQGAFLNGTRLPLRLVDKKLNEAIAGVEIKYLRSGKLSSRMSTLAPFGTIRSMGSSTLDWCYLACGRYDVYVHGGQKLWDYAAGALIFEEAGGRLTTLEGDGFWSGEHVFKRSVVAALEPKLFERWVEWIRENQ

SEQ ID NO: 22144 - protein, 129 aa, Neisseria meningitidis
MWKIIKEDSDDLGFAIKCLFSQSIDLNEFKLWIEQVVRDMPIEDIPFYIFDLADFDVGIGDIGNIVGFAPSSSLPKSKKNALTGIAFLRGIDVYDPPISKEKALKALEKHPEIYQKFQHFFPFVELPPL

SEQ ID NO: 22145 - protein, 289 aa, Neisseria meningitidis
MKRIFLPALPAILPLSTYADLPLTIEDIMTDKGKWKLETSLTYLNSENNRAELAAPVYIQTGATSFIPIPTEIQENGSNTDMLVGTLGLRYGLTGNTDIYGSGSYLWHEERKLDGNGKTRNKRMSDVSLGISHTFLKDDKNPALISFLESTVYEKSRNKASSGKSWLIGATTYKAIDPIVLSLTAAYRINGSKTLSDGIRYKSGNYLLLNPNISFAANDRISLTGGIQWLGKQPDRIDGKKESARNTSTYAHFGAGFGFTKTTALNASARFNVSGQSSSELKFGVQHTF

SEQ ID NO: 22146 - protein, 314 aa, Neisseria meningitidis; identical to SEQ ID NO: 15538

SEQ ID NO: 22147 - protein, 166 aa, Neisseria meningitidis; identical to SEQ ID NO: 1240

SEQ ID NO: 22148 - protein, 140 aa, Neisseria meningitidis; identical to SEQ ID NO: 6541

SEQ ID NO: 22149 - protein, 135 aa, Neisseria meningitidis; identical to SEQ ID NO: 17232

SEQ ID NO: 22150 - protein, 490 aa, Neisseria meningitidis; identical to SEQ ID NO: 7202

SEQ ID NO: 22151 - protein, 572 aa, Neisseria meningitidis; identical to SEQ ID NO: 15958

SEQ ID NO: 22152 - protein, 344 aa, Neisseria meningitidis; identical to SEQ ID NO: 6064

SEQ ID NO: 22153 - protein, 229 aa, Neisseria meningitidis
  misc_feature 223, 224: 'Xaa' is any amino acid
MNEKTIILANPRGFCAGVDRAISIVERALEEFGAPIYVRHEVVHNKFVVDNLREKGAVFIEDLAEVPPGATLVYSAHGVSKAVRQEAAERGFRVFDATCPLVTKVHKEVARLDAQDCEIIMIGHKGHVEVEGTMGQLAPGKMLLVETVGDVAKLEVRNPDKLAYVSQTTLSVDETKDIIAALNARFPNIRNPHKEDICYATTNRQTAVKELAEQCDIVIVVGXXTHLIN

SEQ ID NO: 22154 - protein, 916 aa, Neisseria meningitidis; identical to SEQ ID NO: 8284

SEQ ID NO: 22155 - protein, 412 aa, Neisseria meningitidis
MAFYAFKAMRAAALAAAVALVLSSCGKGGDAAQGGQPAGREAPAPVVGVVTVHPQTVALTVELPGRLESLRTADVRAQVGGIIQKRLFQEGSYVRAGQPLYQIDSSTYEAGLESARAQLATAQATLAKADADLARYKPLVAAEAVSRQEYDAAVTAKRSAEAGVKAAQAAIKSAGINLNRSRITAPISGFIGQSKVSEGTLLNAGDTTVLATIRQTNPMYVNVTQSASEVMKLRRQIAEGKLLAADGVIAVGIKFDDGTVYPEKGRLLFADPTVNESTGQITLRAAVPNDQNILMPGLYVRVLMDQVAVDNAFIVPQQAVTRGAKDTVMIVNAQGGMEPREVTVAQQQGTNWIVTSGLKDGDKVVVEGISIAGITGAKKVTPKEWAPSENQAAAPQADVQTASEAKTASEAE

SEQ ID NO: 22156 - protein, 371 aa, Neisseria meningitidis
MKVGFVGWRGMVGSVLMQRMQEENDFAHIPEAFFFTTSNVGGAAPDFGQAAKTLLDANDVAELAKMDIIVTCQGGDYTKSVFQALRDSGWNGYWIDAASSLRMKDDAIIVLDPVNRNVIDNGLKNGVKNYIGGNCTVSLMLMALGGLFQNDLVEWATSMTYQAASGAGAKNMRELISGMGAVHAQVADELADPSSAILDIDRKVSDFLRSEDYPKANFGVPLAGSLIPWIDVDLGNGQSKEEWKGGAETNKILGRSDNPTVIDGLCVRIGSMRCHSQALTLKLKKDLPISEIEAILAGANDWVKVIPNEKEASIRELTPAKVTGTLSVPVGRIRKLGMGGEYISAFTVGDQLLWGAAEPLRRVLRIVLGSL

SEQ ID NO: 22157 - protein, 768 aa, Neisseria meningitidis; identical to SEQ ID NO: 14281

SEQ ID NO: 22158 - protein, 272 aa, Neisseria meningitidis; identical to SEQ ID NO: 7451

SEQ ID NO: 22159 - protein, 210 aa, Neisseria meningitidis
MGNTNRVPEQARYDAERRQADEALAGVFPAVSIFGSARTPQNHADYAFAFRLARRLSDSGIAVISGGGPGIMEAANKGAFAGKSVSVGLNIVLPHEQKPNPYQDIALRFSRFAERKAVFFRYSQAYVVMPGGFGTLDELFEILTLVQTGKVPPRPIVLVGKAFWSGLAEWINAQLLARGLISEGAASLFAISDDEDEIVAYLSEHGLQTA

SEQ ID NO: 22160 - protein, 617 aa, Neisseria meningitidis; identical to SEQ ID NO: 6171

SEQ ID NO: 22161 - protein, 127 aa, Neisseria meningitidis
MTFAYWCILIACLLPLFCAAYAKKTGGFRFSDNHHPRDFLARTQGAAARAHAAQQNSFEAFAPFAAAVLTAHATGNAGQATVNTLAGLFILFRLAFIWCYIADKAALRSLMWAGGFACTVGLFVAAA

SEQ ID NO: 22162 - protein, 1161 aa, Neisseria meningitidis
MRLTHIKLSGFKSFTDPTTIHVPGQLVAVIGPNGCGKSNVIDAVRWVLGEASAKQLRGESMQDVIFNGAATRRPAPRASVELVFDNSGHSLQGAWGQYAEVSIKRQLTRQGESTYFINNQTVRRRDITDLFLGTGVGARGYAVIEQGMISRIIEARPEELRAYIEEAAGVSKYKERRKETEGCLKDTREHLQRLGDLQNELARQVEKLEKQAETAERYKSLTAQLNQQQDLLDYAQWQQSLAAADKATAQHQSLQAQQDETAAQVQALNDEVHALQTAEQSQQQAVHELGNKRGVLREQIARLEEQIRHQQNLHQRIERDKQAAQAQLQRIHQEQQQIRVQLEENELQVEEKQTELAEWAMQVAEHEERLPELEEAQATLNAAFQTQQDEANRIRRELALKQQQLAHAEQTVAKHEERKGRLKQENQALNLPDEAETAAAQEAAALLQSQQEHYEEQIIAAEEALHAAREAFQTASNRFQSLKQQHITLQAQQQALSQILSQQQEAADFWQATDHAAAPQLWQHITAPAEWQHALSVILAERLHARAVPQGFVPPEPLPQGQAAWLSDGLSGGIKKSLPVQALLNQIQAQPPFQTALHYWLDGVLCAPDLSYALAHQNDLGAHQIWLTPEGHQVDKVSVLLYAKPAQESLIAQKARLDGIASELENLAPELSAAEAAFKQAEAAVRSSEVQHKNLMQQQQQHTRQYSQAQQRAAELLARTNQGQIRREHIERELAQLAEEQTVLQHTSDGLSDDIVTLQEAAAELEHQQQTTAHSRQEQQGRLKQAQLALLEANRQYGLAEVAVHKLNQQKQNYRQQIAQLEQQTLDWQERQQELALAYETEFQNDEQHIKLEELSEAVQTLDEEYIVVQEKLAQIQAQGREQYARVQALQTQLPQLQAATQTALLQQQEALINAKRYHQNLTERAADLDALEALAKESPKVLNSSIGSLSQQIEALGAVNLAALQELEEARERDGYYRSQSEDVQAAITLLEEAIAQIDDKTKARFKETFDAVNGKVQTFFPTLFGGGEATLKMIGDDLLTAGVSIMARPPGKKNSTIHLLSGGEKALTAMSLVFALFSLNPAPFCLLDEVDAPLDDANTSRFCNLVKEMSAQTQFLYISHNRLTMEMAEQLVGVTMQEKGVSRVVAVDIKQALEMAESV

SEQ ID NO: 22163 - protein, 841 aa, Neisseria meningitidis
LKNNRQIKLIAASVAVAASFQAHAGLGGLNIQSNLDEPFSGSITVTGEEAKALLGGGSVTVSEKGLTAKVHKLGDKAVIAVSSEQAVRDPVLVFRIGAGAQVREYTAILDPVGYSPKTKSALSDGKTHRKTAPTAESQENQNAKALRKTDKKDSANAAVKPAYNGKTHTVRKGETVKQIAAAIRPKHLTLEQVADALLKANPNVSAHGRLRAGSVLHIPNLNRIKAEQPKPQTAKPKAETASMPSEPSKQATVEKPVEKPEAKVAAPEAKAEKPAVRPEPVPAANTAASETAAESAPQEAAASAIDTPTDETGNAVSEPVEQVSAEEETESGLFDGLFGGSYTLLLAGGGAALIALLLLLRLAQSKRARRTEESVPEEEPDLDDAADDGIEITFAEVKTPATPEPAPKNDVNDTLALDGESEEELSAKQTFDVETDTPSNRIDLDFDSLAAAQNGILSGALTQDEETQKRADADWNAIESTDSVYEPETFNPYNPVEIVIDTPEPESVAQTAENKPETVDTDFSDNLPSNNHIGTEETASAKPASPSGLAGFLKASSPETILEKTVAEVQTPEELHDFLKVYETDAVAETAPETPDFNAAADDLSALLQPAEAPSVEENITETVAETPDFNATADDLSALLQPSKVPAVEENAAETVADDLSALLQPAEAPAVEENVTETVAETPDFNATADDLSALLQPSEAPAVEENAAETVADDLSALLQPAEAPAVEENAAEITLETPDSNTSEADALPDFLKDGEEETVDWSIYLSEENIPNNADTSFPSESVGSDAPSEAKYDLAEMYLEIGDRDAAAETVQKLLEEAEGDVLKRAQALAQELGI

SEQ ID NO: 22164 - protein, 183 aa, Neisseria meningitidis; identical to SEQ ID NO: 1173

SEQ ID NO: 22165 - protein, 370 aa, Neisseria meningitidis; identical to SEQ ID NO: 1989

SEQ ID NO: 22166 - protein, 129 aa, Neisseria meningitidis
MWKIIKEDSDDLGFAIKCLFSQSIDLNEFKLWIEQVIRDMPIEDIPFYIFDLADLDEEIDNIYNIIGFVSSYSLSKLRRNALTGIAFLRGIDVYDPPVSKEKALKALEKYPEIYQKFQHFFPFVELPPL

SEQ ID NO: 22167 - protein, 304 aa, Neisseria meningitidis; identical to SEQ ID NO: 9759

SEQ ID NO: 22168 - protein, 639 aa, Neisseria meningitidis
MIEIKNLTLQRGLKVLLDKANATVNPGQRVGLIGKNGTGKSSLFALIKGEITQDGGDVSIPKNWRLASVSQETPDLDISALDYVLQGDAELQAFQTALRQAEAQNDGMKQAEYHAKLEEIDAYTAPARAAKLLNGLGFSQEEHSRPVKSFSGGWRMRLNLAQALICRADLLLLDEPTNHLDLETVLWLENHLASLPCTQIIISHDRDFLNAATTQTIELSQQKLTQYGGNYDFYQNERAQRLAQQQAAYVKQQAQIKHLQSFIDRFKAKATKAVQAQSRMKALAKLERIAPAHLDSEFSFEFYHPDHLPNPLLKLEHADLGYEGKTVLHDITLSLESGARYGLLGVNGSGKSTFIKALAGKIDLLSGSIIRSEKLNIGYFAQHQLDTIRADQNPVWHIQQLSPEVREQEIRNFLGGFNFVGDMALQKTEPFSGGEKARLALAMIIWQKPNLLLLDEPTNHLDLDMRHALTLALQSFQGALIIVSHDRSLLEATTDSFLLIDKGRLKNFDGDLNDYRQWRLAQENAAAPAASAQSQSRKDTKRIEAQIRQEKARRGKPIQQKIDRAEKEMAQLSEIQTACEAFLAQEDAYLEANKEKLQNTLSLLAKVKTQLAQIEEVWLACQEELERIETEIEKQFAER

SEQ ID NO: 22169 - protein, 89 aa, Neisseria meningitidis; identical to SEQ ID NO: 1367

SEQ ID NO: 22170 - protein, 123 aa, Neisseria meningitidis; identical to SEQ ID NO: 130

SEQ ID NO: 22171 - protein, 324 aa, Neisseria meningitidis
VQPGLWASDGIFSEWRHSCRRRGSRMGKGGDIVVGNGKKYAAPLLVLGCVVFGLGSLIVRSVPVGSYAIAFWRLLISVFVFWFLARFFGQKFPKNRKTVRYALTAGVFLAFDLALWHESIHAVGPGISTLLNSLQIFFLSAIGVFFFGERLSGLKKAGLISAVAGVAMIAGAEFGYNGNAVWGFVSGLVSGLMLALSMVFVRKTHEVEPVALFPSMMILSLGGAVSLVVPALLMDGGVLYPTTWKDAGLVLVYGVVMQCFAWAMVAYAIPLLSLSLTGLLLLSEPVAALFIDYFGLGKPIEGVQWAGVALTLSAIYLGSLKQQS

SEQ ID NO: 22172 - protein, 481 aa, Neisseria meningitidis
MTQYTLKQASVLLQSKQISAVELASAYLAAIAEKNPALNGYITIDQDKTLAEARAADERIAQGNASALTGVPVAYKDIFCQTGWRSACASKMLDNFISPYTATVVQNLLDEGMVTLGRTNMDEFAMGSTNENSFYGAAKNPWNLEHVPGGSSGGSAAVVAARLAPAALGSDTGGSIRQPASHCGITGIKPTYGTVSRFGMVAYASSFDQAGPMAQTAEDCAILLNAMAGFDPKDSTSLEREKEDYTRDLNQPLKGLKIGLPKEYFGEGNSADVLTALQNTIDLLKAQGAELIEVSLPQTKLSIPAYYVLASAEASTNLSRYDGVRYGHRAAQFSDLEEMYGKTRAEGFGSEVKRRIMIGTYVLSHGYYDAYYLKAQKLRRLVADDFQTAFARCDLILAPTAPSAAPKIGADASPVETYLSDIYTIAVNLAGLPALTLPAGFSGGGLPIGVQLIGNYFSEAKILGAAHQIQLNSDWHGKRPE

SEQ ID NO: 22173 - protein, 275 aa, Neisseria meningitidis; identical to SEQ ID NO: 17334

SEQ ID NO: 22174 - protein, 239 aa, Neisseria meningitidis; identical to SEQ ID NO: 7144

SEQ ID NO: 22175 - protein, 138 aa, Neisseria meningitidis
LTDDAVRLALRQAVMAVRERYPFEILAWVLMPDHLHTIWRLPDNDSAYSERWRQIKRHSQYLIGGNLRLWQKRFWEYTIRDEADFAWHFDYLHFNPVKHGYVGQISDWGFSTFHRYVKQGIYPHNWGGGNADFSIGYD

SEQ ID NO: 22176 - protein, 107 aa, Neisseria meningitidis; identical to SEQ ID NO: 2524

SEQ ID NO: 22177 - protein, 363 aa, Neisseria meningitidis
MSHISPIPEILADIKAGKMVIITDAEDRENEGDLLMAAQFVTPEAINFMIKHARGLVCLPMDGEMVEKLGLPMMTQKNGAQYGTNFTVSIEAAHGITTGISAADRALTIQTAVSPTAKPEDIVQPGHIFPLRAQKGGVLVRAGHTEAGVDLAQMNGLIPASVICEIINDDGTMARMPELMKFAEEHKLKIGTIADLIEYRSRTESLLEDMGNAPVQTPWGEFQQHVYVDKLSGETHLALVKGTPSADTETLVRVHEPFSVMDFIQANPRHSWSLPKALERIQQAESGVVILLHRTEDGAALLDRTLPKGANQAYKWDSKSYGIGAQILAGLNVKKLRVLGQPSSFTGLTGFGLEVVGFEEAEK

SEQ ID NO: 22178 - protein, 91 aa, Neisseria meningitidis; identical to SEQ ID NO: 15162

SEQ ID NO: 22179 - protein, 117 aa, Neisseria meningitidis; identical to SEQ ID NO: 6607

SEQ ID NO: 22180 - protein, 290 aa, Neisseria meningitidis; identical to SEQ ID NO: 14702

SEQ ID NO: 22181 - protein, 72 aa, Neisseria meningitidis
MDALYVSAPFYFDDDFQVCYGEHYNTVFPLLVPLYKQEAELVEKKGWNAFEQFLLDNEVDNLSDMNRKPFVW

SEQ ID NO: 22182 - protein, 589 aa, Neisseria meningitidis; identical to SEQ ID NO: 14115

SEQ ID NO: 22183 - protein, 131 aa, Neisseria meningitidis
MPSDVGIRLQTAFKRKLNMKKILYFLIFVFSTSVWAGDAEDNLLSIQSGYRALLQKQNNLDGKIIGMQSDLEDARRRLQTAQADIARLEAEIPAAMAQKARQAEELRQIGVRLDHAWNAVYGAGGTKASGN

SEQ ID NO: 22184 - protein, 315 aa, Neisseria meningitidis; identical to SEQ ID NO: 8207

SEQ ID NO: 22185 - protein, 366 aa, Neisseria meningitidis; identical to SEQ ID NO: 6349

SEQ ID NO: 22186 - protein, 418 aa, Neisseria meningitidis; identical to SEQ ID NO: 8075

SEQ ID NO: 22187 - protein, 51 aa, Neisseria meningitidis
MRKACRNRPLTENQTKRNRYLSKTRYVVEQSFGTLHRKFRYARAAYFGLIK

SEQ ID NO: 22188 - protein, 417 aa, Neisseria meningitidis
MQTYLVGGAVRDYLLGLPVKDRDWVVVGADAQTMLAQGFQPVGKDFPVFLHPETHEEYALARTERKTAKGYAGFSFHTDKDVTLEQDLMRRDLTINAMAQDADGKIIDPFGGQRDLAAGILRHVSPAFAEDPVRILRTARFAARYKFEIAEETIKLMRQMVENGEADALVAERVWQEFAKGLMEKNPRKMIEVLRECGALKVLLPEVNALFGVPQRADYHPEIDSGIHTLMTLQRAADMGLSLPERYAALLHDLGKAKTPSDILPRHHGHDLAGVEPVREVNQRLRAPKHCAELAELVCRWHIIFHQVEKLRSKTIIDVLKKTDAFRRPERFQTALNVCIADTQGRLNREHTPYPQRAHWLALLEAANQADSGKIAAECRAQGKAHLIAEQIDRARLAQIAPLQKAFRAAQDKTEKH

SEQ ID NO: 22189 - protein, 400 aa, Neisseria meningitidis
MKNYHAPDEKGFFGEHGGLFVSETLIPALQELADAYKAAKNDPEFWEAFRHDLKHYVGRPSPVYHAARLSEHLGGAQIWLKREDLNHTGAHKVNNTIGQALLAKRMGKKRVIAETGAGQHGVASATVAARFGMTCDVYMGADDIQRQMPNVFRMKLLGANVVGVESGSRTLKDAMNEAMREWVARVDDTFYIIGTAAGPTPYPEMVRDFQCVIGNEAKAQMQEAIGRQPDVAVACVGGGSNAIGLFYPYIEEENVRLVGVEAGGLGVDTPDHAAPITSKAPIGVLHGFRSYLMQDENGQVLGTHSVSAGLDYPGIGPEHSHLHDIKRVEYTVAKDDEALEAFDLLCRFEGIIPALESSHAVAWAVKNAPKMGKDQVILVNLSGRGDKDINTVAKLKGIKL

SEQ ID NO: 22190 - protein, 197 aa, Neisseria meningitidis
MADSMGNLIGWEKTGLVAGKQWITAKDDKVSDVCNANGEMGVIGLYEPFSHGTLTIPGHPNCRCEVVSVSGGELGEFAEKKELRKAAMQYARDNFIGKSYVNENSGHELKVTWQGVKHATSKANQAELSIMTKLDDLLRYAKYEGSYSDRKGHPNIIAAHKYRAVAKVGNESLNIGVIVREFPDDHKHYDHFILKDE

SEQ ID NO: 22191 - protein, 366 aa, Neisseria meningitidis
MAGNTFGQLFTVTTFGESHGAGLGCIIDGCPPGLALTESDIQADLDRRKPGTSRHVTQRREADQVEILSGVFEGKTTGTPIALLIRNTDQRSKDYGNIAQSFRPGHADYTYWHKYGTRDYRGGGRSSARETAARVAAGAVAKKWLKEKFGTEITAYVTQVGEKKIRFEGCEHISQNPFFAANQSQIAELENYMDSVRKSLDSVGAKLHIEAANVPVGLGEPVFDRLDAEIAYAMMGINAVKGVEIGAGFDSVTQRGSEHGDELTPQGFLSNHSGGILGGISTGQDICVNIAIKPTSSIATPRRSIDINGDPVELATHGRHDPCVGLRAAPIAEAMLALVLIDHALRHRAQNADVAVDTPDIARSDK

SEQ ID NO: 22192 - protein, 265 aa, Neisseria meningitidis
MNRLYPHPIIAREGWPIIGGGLALSLLVSICCGWWSLPFWVFTVFALQFFRDPAREIPQNPEAVLSPVDGRIVVVERARDPYRDVDALKISIFMNVFNVHSQKSPADCTVTKVVYNKGKFVNADLDKASTENERNAVLATTASGREITFVQVAGLVARRILCYTQAGAKLSRGERYGFIRFGSRVDMYLPVDAQAQVAIGDKVNGVSTVLARLPLTAPQIESEPESEPALQTAPVETAANPSAEQRQIEATAAKIQAAVQDVLKD

SEQ ID NO: 22193 - protein, 498 aa, Neisseria meningitidis; identical to SEQ ID NO: 1489

SEQ ID NO: 22194 - protein, 313 aa, Neisseria meningitidis; identical to SEQ ID NO: 7029

SEQ ID NO: 22195 - protein, 470 aa, Neisseria meningitidis
MMPHINFDTIPGSIRVPGQYIEFNTRNAVQGLPQNPQKVLMVAPMLTAGIQPALEPVQLFSDAEAADLFGQGSLAHLMVRQAFANNPYLDLTVIGIADHSAGVQATATVTLSGTATAPGVVEITIGGKQVSTAVNTGETAATVADRLKTAITAADVTVTASGSGAAVTLTAKHKGEIGNESGLTVSTGNTGLTYQANAFTGGAKNADIATALSKVAGKHYHIICSPFSDDANAKALSNHITNVSNAIEQRGCIGVLGMSAALSTATTATGEINDGRMTCAWYKGAVEPNGIIAAGYAAVLAFEEDPAKPLNTLEIKGLAVTPDAQWPLFAECNNALYNGLTPLTVVNNRVQIMRAVSTYTKSANNTDDPALLDITTIRTLDYVRRSVKERIALRFPRDKLSDRLLPKVKSEILDVLIKLDQAEIIENAEANKGKLVVARAQNDPNRVNAIIPADVVNGLHVFAGRIDLIL

SEQ ID NO: 22196 - protein, 275 aa, Neisseria meningitidis
MKLIEQHQIFGGSQQVWAHHAQTLQCEMKFAVYLPNNPENRPLGVIYWLSGLTCTEQNFITKSGFQRYAAEHQVIVVAPDTSPRGEQVPNDDAYDLGQSAGFYLNATEQPWAANYQMYDYILNELPRLIEKHFPTNGKRSIMGHSMGGHGALVLALRNQERYQSVSTFSPILSPSLVPWGEKAFTAYLGKDREKWQQYDANSLIQQGYKVQGMRIDQGLEDEFLPTQLRTEDFIETCRAANQPVDVRFHKGYDHSYYFIASFIGEHIAYHAAFLK

SEQ ID NO: 22197 - protein, 206 aa, Neisseria meningitidis
MLTPKSCDLFNIPFFQFAQLKKYQPESIPQIKADYKENWQIWQQLIQQVAAELGAPFAPPHIERWCNGWQVRAHFFAYFKYEQYKNSAAILSILLNRRRLSVSLDWHCYKADVSPIALPDYNRWLDNFDTEKYASFDMWHGAESEYDDYRTVAQQNESDRRLQNDEDFFCIGKHIERDDLGRQDVAKWIAETVEDLLPLYEACHGK

SEQ ID NO: 22198 - protein, 167 aa, Neisseria meningitidis; identical to SEQ ID NO: 14758

SEQ ID NO: 22199 - protein, 82 aa, Neisseria meningitidis; identical to SEQ ID NO: 2338

SEQ ID NO: 22200 - protein, 153 aa, Neisseria meningitidis; identical to SEQ ID NO: 2505

SEQ ID NO: 22201 - protein, 125 aa, Neisseria meningitidis; identical to SEQ ID NO: 535

SEQ ID NO: 22202 - protein, 301 aa, Neisseria meningitidis
MLTFQQIIFKLQTFWADKGCTVIQPFDMEVGAGTSHPATCLRALGPEPWFAAYVQPSRRPKDGRYGDNPNRLQHYYQFQVALKPAPANIQDLYLDSLRELGIDPKVHDIRFVEDDWENPTLGAWGLGWEVWLNGMEVTQFTYFQQVGGIDCTPVLGEITYGIERLAMYLQGVENVYDLVWAKTPDGNTVSYGDVYHQNEVEQSTYNFEYSDADWLLRQFNDYEAQAKRLLAVEGASLALPAYELVLKAGHTFNLLDARGAISVTERATYIGRIRALSRAVAQKYVESREKLGFPLMKANAA

SEQ ID NO: 22203 - protein, 54 aa, Neisseria meningitidis; identical to SEQ ID NO: 2207

SEQ ID NO: 22204 - protein, 125 aa, Neisseria meningitidis; identical to SEQ ID NO: 348

SEQ ID NO: 22205 - protein, 416 aa, Neisseria meningitidis
MFVPLAMLAGMFSYYETFHETEALQDDLLRQAALYVAPDSKPETLPEGDGDTRILVQMPQQEDPVVSLPAHLADGLHTLQADGDDDYYRVYIRTTEQGRIAVMQENEYREDLAADAAWQSVLPLLAALPLMILLTVWITHQAMRPVRKLSQSLEQRRINDLSALSVDNIPSEIRGFVTAINLLLKRADEDIRHRQRFVADAAHELRTPMTALSLQAERLNNMSLPPDAARQPAVLQQSIRRNKHLLEQLLALARSQSDETPLTKTTFGLQSRFRQVLQELMPLALEKRQDIGVAVRGDVEVSADETEIYTLIKTFADNAVRYTPPEGRIDLGFTDEGKYLAVWVEDNGNGIPESERARVLDPFYRILGMEQQGTGLGLSIADTLATEYGRYLELSDSRRFGRGLLIRALLDKESLK

SEQ ID NO: 22206 - protein, 468 aa, Neisseria meningitidis; identical to SEQ ID NO: 15715

SEQ ID NO: 22207 - protein, 206 aa, Neisseria meningitidis
  misc_feature 200, 201: 'Xaa' is any amino acid
MSHTQLTQGERYHIQYLSRHCTVTEIAKQLNRHKSTISREIRRHRTQGQQYSAEKAQRQSQTIKQRKRQPYKLDSQLIQHIDTLIRRKLSPEQVCAYLCKHHQITLHHSTIYRYLRQDKSNGSTLWQHLRICSKPYRKRYGSTWTRGKVPNRVGIENRPAIVDQKSRIGDWEADTIVGKGQKSALLTLVERVTRYTIICXXTHLIN

SEQ ID NO: 22208 - protein, 489 aa, Neisseria meningitidis; identical to SEQ ID NO: 1073

SEQ ID NO: 22209 - protein, 157 aa, Neisseria meningitidis; identical to SEQ ID NO: 14438

SEQ ID NO: 22210 - protein, 915 aa, Neisseria meningitidis
MQQQHLFRLNILCLSLMTALPVYAENVQAGQAQEKQLDTIQVKAKKQKTRRDNEVTGLGKLVKTADTLSKEQVLDIRDLTRYDPGIAVVEQGRGASSGYSIRGMDKNRVALTVDGLAQIQSYTAQAALGGTRTAGSSGAINEIEYENVKAVEISKGSNSVEQGSGALAGSVAFQTKTADDVIGEGRQWGIQSKTAYSGKNRGLTQSIALAGRIGGAEALLIHTGRRAGEIRAHEDAGRGVQSFNRLVPVEDTNQYANFIVEEECESRNYETCKANPKKDVVGKDERQTVSTRDYTGPNRFLADPLSYESRSWLFRPGFRFENKRHYIGGILERTQQTFDTRDMTVPAFLTKAVFDENKKQAGSLSGNGKYAGDHKYGGLFTNGENGALVGAEYGTGVFYDETHTKSRYGLEYVYTNADKDTWVDYARLSYDRQGIGLDNHFQQTHCSADGSDKNCRPSADKPFSYYKSDRVIYGESHRLLQAAFKKSFDTAKIRHNLSVNLGFDRFGSNLRHQDYYYQNANRAYSSKIPTQNGDKKISPNGSQDKPYWVSIGGGNVVTGQICRLGNNTYTDCTPRSINGKSYYAAVRDNVRLGRWADVGAGLRYDYRSTHSDDGSVSTGTHRTLSWNAGIVLKPANWLDLTYRTSTGFRLPSFAEMYGWRSGDKIKAVKIDPEKSFNKEAGIVFKGDFGNLEASWFNNAYRDLIVRGYEAQIKNGKEEAKGDPAYLNAQSARITGINILGKIDWNGVWDKLPEGWYSTFAYNRVRVRDIKKRADRTDIQSHLFDAIQPSRYVVGLGYDQPEGKWGVNGMLTYSKAKEITELLGSRALLNGNSRNTKATARRTRPWYIVDVSGYYTIKKHFTLRAGVYNLLNYRYVTWENVRQTAGGAVNQHKNVGVYNRYAAPGRNYTFSLEMKF

SEQ ID NO: 22211 - protein, 582 aa, Neisseria meningitidis; identical to SEQ ID NO: 18200

SEQ ID NO: 22212 - protein, 286 aa, Neisseria meningitidis
MSDLSVLSPFAVPLAAVFGLLVGSFLNVVIYRVPVMMERGWTVFAKKHLNLPLTEEESRTFNLMKPDSCCPKCRVPIRARQNIPIVSYLLLRGKCASCQTKISIRYPLIELLTGVLFGLVAWQYGWSWITLGGLILTAFLISLTFIDADTQYLPDSMTLPLIWLGLIFNLDGGFVPLQSAVLGAVAGYGSIWLLCAVYKLIKGEIGMGNGDFKLIAALGAWLGISALPVLIFVSSLIGLVAAIVMRVAKGQHFAFGPALTVSGWIIFTANDSVWRAVNWWLTHPVL

SEQ ID NO: 22213 - protein, 464 aa, Neisseria meningitidis
MNKQPLSLAVVGHTNTGKTSLLRTLLRDSGFGEVKNAPSTTRHVEEAAISDGADTLVFLYDTPGLEDAGGVLEWLENHTDNRSDGIERLQQFLGSHGAHHDFNQEAKVLRQVLQSDMAMYVIDAREPVLDKYRDELTILSWCAKPVMPVFNFTGGQLPESWTTMLARRNLHVFAGFDTVAFDFEGELRLWENLATMLPERSTLDRLTAMRRREWQRLDGEARREIADFLLDAAAFRQEVDENEDTATVLQTMQAEIRQLERQMQQRLFALYRFYHSEIDGGDWMPQAFRQDPFDSELLKQYGIRTGTGAATGALIGLGLDIATLGGSLGLGTAIGGFLGGILPNTRTISDKLSGRQTLHTDPETLTLLAARALDLLHVLQTRGHAAQSDIELHSRKAPWDATRLPPELNKARSHWKWSSLNTHRPETSRAERAGYVEKLQIRLSGKYSELNLNQDKAASRRQYK

SEQ ID NO: 22214 - protein, 161 aa, Neisseria meningitidis; identical to SEQ ID NO: 14179

SEQ ID NO: 22215 - protein, 303 aa, Neisseria meningitidis
MVHIMFNQAAQELTTIRDVLRFAVSRFNEAGLFFGHGTDNAHDEAAYLILHTLNLPLDMLAPYLDAKLLEAEKEEVLAVIERRAVEHIPAAYLTHQAWQGEFDFYVDERVIVPRSFIYELLGDGLRPWIEYDELVHNALDLCTGSGCLAIQMAHHYPDAQIDAVDVSLDALEVAGINVEDYGLEERIRLIHTDLFEGLEGTYDLIVSNPPYVDAESVELLPEEYLHEPELALGSGADGLDATRQILLNAAKFLNPKGVLLVEIGHNRDVLEAAYPELPFTWLETSGGDGFVFLLTREQLLGEE

SEQ ID NO: 22216 - protein, 794 aa, Neisseria meningitidis; identical to SEQ ID NO: 6668

SEQ ID NO: 22217 - protein, 403 aa, Neisseria meningitidis
MNQLKLAVSGAQILFVAFGAMVLVPLLTGLNPALALLGAGLGTLLFQITTKRKVPIFLGSSFAFIAPIIYSVGEWGLPSTMFGLFAAGFMYFVFAALIRWRGLAAVHKLLPPVVIGPVIMVIGLSVAVAASSMAMGQADGKQVIDYTDSLILSGFTFAVTAIVSVFGSRMMKLIPILIGVASGYVLALLMGLVDTASIAHAPWFAVPHFETPQVNWQAALFMLPVAVAPAIEHIGGIMAIGNVTGKDYTKDPGLDKTLTGDGLGVCVAGLIGGPPVTTYGEVTGAVMITKNSNPVIMTWAAVFAVCMAFFGKFNAFLASIPMPVMGGIMLLLFGTIASLGVKTLIDAKVDLMLPKNLVIVSSVLTTGIGGMTLKLGSFSFAGVGLCAVLAIMLNSLLPDPKES

SEQ ID NO: 22218 - protein, 473 aa, Neisseria meningitidis
MDTKEILGYAAGSIGSAVLAVIILPLLSWYFPADDIGRIVLMQTAAGLTVSVLCLGLDQAYVREYYAAADKDTLFKTLFLPPLLSAAAIAALLLSRPSLPSEILFSLDDAAAGIGLVLFELSFLPIRFLLLVLRMEGRALAFSSAQLVSKLAILLLLPLTVGLLHFPANTAVLTAVYALANLAAAAFLLFQNRCRLKAVRRAPFSSAVLHRGLRYGIPIALSSIAYWGLASADRLFLKKYAGLEQLGVYSMGISFGGAALLFQSIFSTVWTPYIFRAIEANTPPARLSATAESASALLAAAVCLTGIFSPLASLLLPENYAAVRFIVVSCMLPPLFCTLVEISGIGLNVVRKTRPIALATLGALAANLLLLGLAVPSGGARGAAVACAASFWLFFVFKTESSCRLWQPLKRLPLYLHTLFCLTSSAAYTCFGTPANYPLFAGVWAAYLAGCILRHRKDLHKLFHYLKKQGFPL

SEQ ID NO: 22219 - protein, 316 aa, Neisseria meningitidis
MYLGIDVSKLTIDCCLIADGQNHQKKFQNNKGGFEQLINWLQSHKVNDKLHCVCEATGTYYEALAEYLYSRYTITVENPRKIKGYAIAELQRSKTDTQDAKLIAQYCQDRKHKLKAWKPPTKEQKQLQEIARYLDYLKQQRATEKAKQHEAPDYIKSHIQTTISNLTAQIQIVEKQLLQFYKDNPSYNNLRKRLKTITGIGEQATAVLLSTYKRHEFKNARQFTAYLGLDPRKFQSGTSVNGKSRISKIGSSEIRKSLYMPALVAYRCNAFPEFVGRLKNKGKHIKLILIAIMRKLAVIAFTILQNGQDFQVERYK

SEQ ID NO: 22220 - protein, 338 aa, Neisseria meningitidis
MNTRPFYFGLIFIAIIAILANYLGNTDFSHHYHISALIIAILLGMAIGNTIYPQFSTQVEKGVLFAKGALLRTGIVLYGFRLTFGDIADVGLNAVVTDAIMLISTFFFTVLLGIRYLKMDKQLVYLTGAGCSICGAAAVMAAESVTKAESHKASVAIAIVVIFGTLAIFTYPLFYTWSQDLINAHQFGIYVGSSVHEVAQVYAIGENIDPIVANTAVISKMIRVMMLAPFLLMLSWLLTRSDGVSENTSHKITIPWFAVLFIGVAIFNSFDLLPKELVKLFVEIDSFLLISSMAALGLTTHASAIKKAGLKPFVLGILTYLWLVVGGFLVNYGISKLI

SEQ ID NO: 22221 - protein, 85 aa, Neisseria meningitidis
MVLLLIVNKYWKVNDMKNEIQKIMDKYNPWHEDDFESYEDIAKDVSLMTDKTFIEHYLLEVYSEENGHFDQENVHAMIEEIKNAI

SEQ ID NO: 22222 - protein, 473 aa, Neisseria meningitidis; identical to SEQ ID NO: 719

SEQ ID NO: 22223 - protein, 809 aa, Neisseria meningitidis
MRFSRFEPKGRLKQQIRFQTTFLSTSHHGNQTKAAHRHIHVGSTAGTTTIRSGGDTTLKGAQLIGKGIQADTRNLHIESVQDTETSQSKQQNGNVQVTVGYGFSASGSYSQSKVKADHASVTEQSGIYAGEDGYQIKVGNHTDLKGGIITSGKSAEDKGKNLFQTATLTASDIQNHSRYEGKSFGIGGSFDLNGGWDGTVTDKQGRPTDRISLAAGYGSDSDSQSSITKSGINTRNIHITDEAGQLARTGRTAKETEARIYTGIDTETADQHTGRLKNSFDKDAVAKEINLQREVTKEFGRNAAQAVAAVADKLGNTQSYERYQEARTLLEAELQNTDSKAEKAAIRASLGQVNAYLAENQSRYDTWKEGGIGRSILHGAAGGLTTGSLGGILAGSGTSLAAPYLDKAAENLGPAGKAAVNALGGAAIGYAAGGNVGTAAVGANVDWNNRQLHPKETQILNKLSKGKSAEEQYRLKAAACALTRCAESVPDFDPLYKGLKNLQDAGKQFVAEQNVLMRTDAFKYGTWNSLNDIRSSYDRAATKIKGAGNMGLGATTFVGSGAIGGGLCSTGIGCAAGGLIATAGMTGGYTQASEGSRQLFGTYQSDFGKKVVLSLGTPIEYESPLVSDAKNLAVWGLETLITRKLGNLATGVKTSLTPKTADVQRNILSQSEVGIKWGKGIEGQGMPWEDYVGKGLSANARLPKNFKTFDYFDRGTGTAISAKTLDTQTTARLSKPEQLYSTMKGYIDKTANFKSYELSEVPLRADMIKQREIHLAIPAQTNKEQRLQLQRVVEYGKSQNITVKITEIE

SEQ ID NO: 22224 - protein, 392 aa, Neisseria meningitidis
MRKKLTALVLSALPLAAVADVSLYGEIKAGVEGRNYQLQLTEAQAANGGASGQVKVTKAKSRIRTKISDFGSFIGFKGSEDLGEGLKAVWQLEQDVSVAGGGATQWGNRESFIGLAGEFGTLRAGRVANQFDDASQAIDPWDSNNDVASQLGIFKRHDDMPVSVRYDSPEFSGFSGSVQFVPAQNSKSAYKPAYWTTVNTGSATTTTFVPAVVGKPGSDVYYAGLNYKNGGFAGNYAFKYARHANVGRDAFELFLLGSGSDQAKGTDPLKNHQVHRLTGGYEEGGLNLALAAQLDLSENGDKTKNSTTEIAATASYRFGNAVPRISYAHGFDFIERGKKGENTSYDQIIAGVDYDFSKRTSAIVSGAWLKRNTGIGNYTQINAASVGLRHKF

SEQ ID NO: 22225 - protein, 100 aa, Neisseria meningitidis; identical to SEQ ID NO: 3521

SEQ ID NO: 22226 - protein, 447 aa, Neisseria meningitidis
MIKIKKGLNLPIAGRPEQVIYDGPVITEVALLGEEYAGMRPSMKVKEGDAVKKGQVLFEDKKNPGVVFTAPVSGKIAAIHRGEKRVLQSVVIAVEGNDEIEFERYAPEALANLSGEEVRRNLIQSGLWTALRTRPFSKIPAVDAEPFAIFVNAMDTNPLAADPTVIIKEAAEDFRRGLLVLSRLTERKIHVCKAAGADVPSENAANIETHEFGGPHPAGLSGTHIHFIEPVGANKTVWTINYQDVIAIGRLFATGRLNTERVIALGGSQVNEPRLLRTVLGAKVSQITAGELVDADNRVISGSVLNGAITQGAHDYLGRYHNQISVIEEGRSKELFGWVAPQPDKYSITRTTLGHFLKNKLFKFTTAVNGGDRAMVPIGTYERVMPLDILPTLLLRDLIVGDTDSAQALGCLELDEEDLALCSFVCPGKYEYGPLLRKVLETIEKEG

SEQ ID NO: 22227 - protein, 309 aa, Neisseria meningitidis; identical to SEQ ID NO: 8627

SEQ ID NO: 22228 - protein, 275 aa, Neisseria meningitidis
MDGEGMSVGHYENFPVGSLILPRRLRKPVHAVYAFARTADDMADEGSMPSEARLAGLEGLRRELDVLASGGRSAHPLIARLDAEAVVPFGLDLQPFYDLLSAFSQDVVKTRYGNFGELADYCRRSANPVGRIMLALYGKTDAVCVAQSDGICTALQLVNFWQDVAVDWQKGRVYIPQDDLLKFGVSEGQIAEGRADAAFQRLMAYECRRAFRMLKAGSPLARELKGRIGLELRMIVLGAQLILQKLDACRYDVFAQRPVLDKKDWLIMLKRALWK

SEQ ID NO: 22229 - protein, 274 aa, Neisseria meningitidis
MLKKIVLGGIAALVLAACGGSEGGSGASSAPAQSAVSGSLIERINNKGTVTVGTEGTYAPFTYHDKDGKLTGYDVEVTRAVAEKLGVKVEFKETQWDSMMAGLKAGRFDVVANQVGLTSPERQATFDKSDPYSWSGAVLVARNDSNIKSIDDIKGVKTAQSLTSNYGEKAKAAGADLVAVDGLAQSLTLIEQKRADATLNDELAVLDYLKKNPNAGVKIVWSAPADEKVGSGLIVNKGNDEAVAKFSTAINELKADGTLKKLGEQFFGKDISVQ

SEQ ID NO: 22230 - protein, 503 aa, Neisseria meningitidis; identical to SEQ ID NO: 3463

SEQ ID NO: 22231 - protein, 445 aa, Neisseria meningitidis; identical to SEQ ID NO: 14461

SEQ ID NO: 22232 - protein, 458 aa, Neisseria meningitidis
MKHIHIIGIGGTFMGGLAAIAKEAGFEVSGCDAKMYPPMSTQLEALGIDVYEGFDAAQLDEFKADVYVIGNVAKRGMDVVEAILNLGLPYISGPQWLSENVLHHHWVLGVAGTHGKTTTASMLAWVLEYAGLAPGFLIGGVPENFGVSARLPQTPRQDPNSQSPFFVIEADEYDTAFFDKRSKFVHYRPRTAVLNNLEFDHADIFADLGAIQTQFHYLVRTVPSEGLIVCNGRQQSLQDTLDKGCWTPVEKFGTEHGWQAGEANADGSFDVLLDGKTAGRVKWDLMGRHNRMNALAVIAAARHVGVGIQTACEALGAFKNVKRRMEIKGTANGITVYDDFAHHPTAIKTTIQGLRQRVGGARILAVLEPRSNTMKLGTMKSALPASLKEADQVFCYAGGVDWNVAEALAPLGGRLHVGKDFDAFVAEIVKNAEAGDHILVMSNGGFGGIHTKLLDALR

SEQ ID NO: 22233 - protein, 50 aa, Neisseria meningitidis; identical to SEQ ID NO: 7105

SEQ ID NO: 22234 - protein, 196 aa, Neisseria meningitidis
MLLFIDNYDSFTYNIVQYFAELGQEVAVRRNDDITLEEIEALNPQYLVIGPGPCSPKEAGISVAAMRHFAGRLPIMGVCLGHQTIGEAFGGRIVRAKTLMHGKVSPVSHSGKGMFRGLPNPVTCTRYHSLVIDRNTMPECLEVTAWTEDGEIMGVRHKEYAVEGVQFHPEALLTEHGHDMLNNFLVEFQNFKPQKI

SEQ ID NO: 22235 - protein, 181 aa, Neisseria meningitidis; identical to SEQ ID NO: 14383

SEQ ID NO: 22236 - protein, 109 aa, Neisseria meningitidis; identical to SEQ ID NO: 6317

SEQ ID NO: 22237 - protein, 436 aa, Neisseria meningitidis
MIVPDLFVAHFREAVPYIRQMRGKTLVAGIDDRLLEGDTLNKLAADIGLLSQLGIRLVLIHGARHFLDRHAAAQGRTPHYCRGLRVTDETSLEQAQQFAGTVRSRFEAALCGSVSGFARAPSVPLVSGNFLTARPIGVIDGTDMEYAGVIRKTDTAALRFQLDAGNIVWLPPLGHSYSGKTFHLDMLQTAASVAVSLQAEKLVYLTLSDGISRPDGTLAETLSAQEAQSLAEHAGGETRRLISSTVAALEGGVHRVQILNGASDGSLLQELFTRNGIGTSIAKEAFVSIRQAHSGDIPHIAALIRPLEEQGILLHRSREYLENHISEFSILEHDGNLYGCAALKTFAEADCGEIACLAVSPQAQDGGYGERLLAHIIDKARSMGISRLFALSTNTGEWFAERGFQTASEDELPETRRKDYRSNGRNSHILVRRLHR

SEQ ID NO: 22238 - protein, 291 aa, Neisseria meningitidis; identical to SEQ ID NO: 5426

SEQ ID NO: 22239 - protein, 305 aa, Neisseria meningitidis; identical to SEQ ID NO: 5961

SEQ ID NO: 22240 - protein, 46 aa, Neisseria meningitidis; identical to SEQ ID NO: 6727

SEQ ID NO: 22241 - protein, 315 aa, Neisseria meningitidis
MNILSKISSFIGKTFSLWAALFAAAAFFAPDTFKWAGPYIPWLLGIIMFGMSLTLKPSDFDILFKHPKAVIIGVIAQFAIMPATAWLLSKLLNLPAEIAVGVILVGCCPGGTASNVMAYLARGNMALSVAVTSVSTLISPLLTPAIFLMLAGEMLEIQAAGMLMSIVKMVLLPIVLGLIVHKVLGSKTEKLTDALPLVSVAAIVLIIGAVVGASKGKIMESGLLIFAVVVLHNGIGYLLGFFAAKWTGLPYDAQKTLTIEVGMQNSGLAAALAAAHFAAAPVVAVPGALFSVWHNISGSLLATYWAAKAGKHKKP

SEQ ID NO: 22242 - protein, 94 aa, Neisseria meningitidis; identical to SEQ ID NO: 6698

SEQ ID NO: 22243 - protein, 259 aa, Neisseria meningitidis; identical to SEQ ID NO: 15437

SEQ ID NO: 22244 - protein, 114 aa, Neisseria meningitidis; identical to SEQ ID NO: 1818

SEQ ID NO: 22245 - protein, 365 aa, Neisseria meningitidis; identical to SEQ ID NO: 6610

SEQ ID NO: 22246 - protein, 311 aa, Neisseria meningitidis; identical to SEQ ID NO: 14030

SEQ ID NO: 22247 - protein, 123 aa, Neisseria meningitidis; identical to SEQ ID NO: 616

SEQ ID NO: 22248 - protein, 390 aa, Neisseria meningitidis
MKQINQALQQKLVEFKEKSGMNQTQLARGIGTSPASISMYLNGTYAEKGGNYETIEPKIEAFLEMQDSKAQREELVLGFVSTKTTRRIAEVMRDAHEGGETVVIYGQAGLGKTQAVKNYCEKNPAAILIEANPSFTALVLMRKLATAAKVSAMGSLNDLFESVSDRLRDSGRLIVVDEAENLPLRALEIVRRLHDETGCGLVLSGMPRLVANLRGKHGELVQLYSRVSVALNLGESLPDDELFEIAKAALPDAVKHLLPDSVQALITVIGFNETLELVRLMGGTTYPLRQGYTKNSQSRVAYLEEIIGSEAAGRLVEAMAPCNLFIPRCETALYELRNRKIRSQFDRQTAGGTPAYEAVNDLALVHRLSDRHVWRILKQADKEAEQENLF

SEQ ID NO: 22249 - protein, 94 aa, Neisseria meningitidis; identical to SEQ ID NO: 2694

SEQ ID NO: 22250 - protein, 313 aa, Neisseria meningitidis; identical to SEQ ID NO: 14846

SEQ ID NO: 22251 - protein, 636 aa, Neisseria meningitidis; identical to SEQ ID NO: 15487

SEQ ID NO: 22252 - protein, 322 aa, Neisseria meningitidis
MKLTLALPSLNLDEDEIRIPLCLPAFNKILQYGSLHRQSCTASAFYARYLWCGRLAERAAQSLNMPSEAVALATPVWQKMGMHQANVLTAEYLNVGTDEAERLCRDLSAFYGDIPWRFVPVLPELWLVSLPCAYRWGAKPVLDLGGLLGADDQPDGEDALEWLRVQTEIQMWLAAHPVNHNRKKRGLPELNGLWLWDGTNGGAQGGTLFADTVWSRFHPDRRALPDNFRAYEETAAHLPDTHHILFMDDLRLTALTGDRERYASVLQQWEEHWFAPIYEAVRTGKIKRLDITTDGQHGGTLTFKPADRWKFWRGAKTFDGIW

SEQ ID NO: 22253 - protein, 200 aa, Neisseria meningitidis; identical to SEQ ID NO: 2775

SEQ ID NO: 22254 - protein, 195 aa, Neisseria meningitidis
MEHKLPQLPYELDALSPHLSKETLEFHYGKHHQTYITNLNNQIKGTEFENLPLEEIVKKSSGGVFNNAAQTWNHTFYWLGFTPKGQGKPSGELAAAIDAKWGSFEKFQEAFNACAAGTFGSGWAWLVKTPAGGLDLVSTSNAATPLTTENTPLLTCDVWEHAYYIDYRNSRPNYLKGFWEIVNWDEVAKRFAALS

SEQ ID NO: 22255 - protein, 354 aa, Neisseria meningitidis; identical to SEQ ID NO: 6299

SEQ ID NO: 22256 - protein, 157 aa, Neisseria meningitidis
MSRNTEELQGISLLGNQKTRYPTGYAPEILEAFDNKHPDNDYFVKFVCPEFTSLCPMTGQPDFATIYIRYIPHIKMVESKSLKLYLFSFRNHGDFHEDCVNIIMKDLIALMDPKYIEVFGEFTPRGGIAIHPFANYGKAGTEFETLARKRLFEHDTQ

SEQ ID NO: 22257 - protein, 284 aa, Neisseria meningitidis; identical to SEQ ID NO: 1842

SEQ ID NO: 22258 - protein, 199 aa, Neisseria meningitidis; identical to SEQ ID NO: 368

SEQ ID NO: 22259 - protein, 121 aa, Neisseria meningitidis; identical to SEQ ID NO: 6632

SEQ ID NO: 22260 - protein, 281 aa, Neisseria meningitidis
MNKFSQSGKGLSGFFFGLILATVIIAGILFYLNQSGQNAFKIPASSKQPAETEILKPKNQPKEDIQPEPADQNALSEPDAATEAEQSDAEKAADKADEVEEKAGEPEREEPDGQAVRKKALTEEREQTVREKAQKKDAETVKKQAVKPSKETEKKASKEEKKAEKEKVAPKPTPEQILNSGSIEKARSAAAKEVQKMKTSDKAEATHYLQMGAYADRRSAEGQRAKLAILGISSKVVGYQAGHKTLYRVQSGNMSADAVKKMQDELKKHEVASLIRSIESK

SEQ ID NO: 22261 - protein, 570 aa, Neisseria meningitidis; identical to SEQ ID NO: 17474

SEQ ID NO: 22262 - protein, 102 aa, Neisseria meningitidis; identical to SEQ ID NO: 14592

SEQ ID NO: 22263 - protein, 69 aa, Neisseria meningitidis; identical to SEQ ID NO: 3057

SEQ ID NO: 22264 - protein, 700 aa, Neisseria meningitidis
MKTDIQTELTQALLPHEKVWANEEKTILAKNILLDLVEKTDPTIIGLLLSNDELKRHFFVEVNGVLVFKLQDFRFFLDKHSVNNSYTKYANRIGLTDSNRFLKDSSDIVLDFPFKDCVLNGGQSTEEGEEIYFKRNNSQPASQPASQPASQPASQPASQPASQPASQLYTKLTRKRQEIFFNQTLAFDEIDRLFDAKAFSKFSRYTADGKQAVGEIKRHSDGTPAENLIIKGNNLIALHSLAKQFKGKVKLIYIDPPYNTGNDGFKYNDKFNHSTWLTFMKNRLEIAKELLMKDGSIFVSIDDNEQAYLKILMDEVFGNENFICNFIWEKKTGASDAKQIATITEFVLCYSKNFKTVKLNKNTFSYDTERYKLSDKFEQERGKYYIDNLDRGGLQYSDSLNFAIQCPDGTFTYPNGRTEFVNDGWIWKWSKNKIDWAITNGFLEFRKSKSKKSGWSVCYKNYMLVDNENKPIERSAPYKNLIQDILNTHATDELKKLFGSKVFTTPKPESLLQYLIQIATSESDIVLDYHLGSGTTAAVAHKMNRQYIGIEQMDYIETLAVERLKKVIDGEQGGISKAVNWQGGGEFVYAELAPFNETAKQQILACEDSDGIKTLFEGLCERYFLKYNVSINEFSQTIQEPEFQSLPLDEQKQMVLEMLDLNQMYVSLSEMDDEQFAGCLNDDDKALSRAFYQTEKKDGE

SEQ ID NO: 22265 - protein, 78 aa, Neisseria meningitidis; identical to SEQ ID NO: 1246

SEQ ID NO: 22266 - protein, 416 aa, Neisseria meningitidis
MTKLTRRQIIRRTAGTLFALSPIASAVAKTVRAPQFTAARIWPSHTYTRLTLESTTALKYQHFTLDNPGRLVVDIQNANINTVLHGLSQKVMADDPFIRSIRAGQNTPDTVRLVIDLKQPSYAQVFSLPPVGGFKNRLVVDLYPQGMDPDDPMMALLNGSLNKTRRGSPEADLAQNTPAQTERGKNGRRPVIMIDPGHGGEDPGAVSPGGLQEKHVVLSIARETKKQLEALGYNVFMTRNEDVFIPLGVRVAKGRARRADVFVSIHADAFTSPSARGTGVYMLNTKGATSSAAKFLEQTQNNADAVGGVPTSGNRNVDTALLDMTQTATLRDSRKLGKLVLEELGRLNHLHKGRVDEANFAVLRAPDMPSILVETAFLSNPAEEKLLGSESFRRQCAQSIASGVQRYINTSVLKRG

SEQ ID NO: 22267 - protein, 443 aa, Neisseria meningitidis; identical to SEQ ID NO: 14859

SEQ ID NO: 22268 - protein, 398 aa, Neisseria meningitidis; identical to SEQ ID NO: 5408

SEQ ID NO: 22269 - protein, 123 aa, Neisseria meningitidis; identical to SEQ ID NO: 4020

SEQ ID NO: 22270 - protein, 94 aa, Neisseria meningitidis; identical to SEQ ID NO: 6698

SEQ ID NO: 22271 - protein, 268 aa, Neisseria meningitidis; identical to SEQ ID NO: 6826

SEQ ID NO: 22272 - protein, 705 aa, Neisseria meningitidis
MRRFLLIAAICAVVLLYGLTAATGSTSSLADYFWWIVAFSAMLLLVLSAVLARYVILLLKDRRDGVFGSQIAKRLSGMFTLVAVLPGVFLFGVSAQFINGTINSWFGNDTHEALERSLNLSKSALNLAADNALSNAVPVQIDLISTASLSGNMGRVLEHYASGFTQLSLYNAASGKIEKSINPHKLDQPFPDKEHWEKIQQAGSVRSLESIGGVLYAQGWLLVGTYNGRDYALFFRQPIPKGVAEDAVLIEKARAKYAELSYSKKGLQTFFLATLLAASLLSISLALVMALYFARRFVEPILSLAEGAKAVAQGDFSQMRPVLRNDEFGRLSKLFNHMTEQLSIAKKADERNRKREEAARHYLECVLESLTTGVVVFDETGRLKTFNKAAEHILGMSLVPLWGSNRHGWHGVSVQHTLLAEVFDAIDATASTDKPVQVGYAAPDDAKILLGKATVLPEDNDNGVVMVIDDITVLIHAQKEAAWGEVAKRLAHEIRNPLTPIQLSAERLAWKLDGKLDEQDAQILTRSTETIVKQVAALKEMVEAFRNYARSPSLKLEKQDLNVLVGDVLALYEAGPCRFEAELAGEPLMVAADTTAMRQVLHNIFKNAAEAAEEADVPEVRVKSETGQDGRIVLTVCDNGKGFGREMLHNAFEPYVTDKPAGTGLGLPVVKKIIEEHGGRISLSNQDAGGACVRIILPKTVKTYA

SEQ ID NO: 22273 - protein, 327 aa, Neisseria meningitidis
MKNFLSLFASILMSALIAVWFSQNPINAYWQQTYHRNSPLEPLAAYGWWRSGVALQENAYALSDGIKAFLSGETPPTAQDGGSADMPSEAAASEAVPQTGETEWKQDTEAAAVRSGDKVFFAGDSLMQGVAPFVQKSLKQQYGIESVNLSKQSTGLSYPKFFDWPKTIEETLQKHPEISVLAVFLGPNDPWDFPVGKRYLKFASDEWAQEYLKRVDRILEAARAHHVQVVWLGIPYMKKAKLDGQMRYLDKLLSEHLEGKIILIPTAHTLSGGEDRYTDSVNVNGKPVRYRSKDGIHFTAEGQKLLATKIMEKIVFEPSTQPSSTQP

SEQ ID NO: 22274 - protein, 228 aa, Neisseria meningitidis; identical to SEQ ID NO: 4638

SEQ ID NO: 22275 - protein, 68 aa, Neisseria meningitidis; identical to SEQ ID NO: 7052

SEQ ID NO: 22276 - protein, 687 aa, Neisseria meningitidis
MMTQTLLIELLTEELPPKALNNLGNHFAAAVAEGLEKAQLVDGAAELTAYASPRRLAVQVKNVKAVQADQKIVKKGPAVANAVKDGAPTKALEGFARGAGAKIEDLTIVHDGKQDVYAYEYVQTGKPLGELLEDIINQAVKKLPIPKVMRWGSSTFTFVRPVHGLVVLHGGDIVNVSVLGLQSGNQTLGHRFLSNGEITIENADSYAAQMREQGKVVASFAERKAAIQTALEGQARRLNAAVAADEALLDEVTALVEWPVVLEAGFEEHFLAVPQECLILTMQQNQKYFPLLDQNGKLMNRFLLVSNLQTADPSHIIRGNERVLRARLSDAEFFYKQDQKATLESRLPKLVNVVYHNKIGSQAERIERLQSIAAHIAKALGADAAAAERAARLAKADLVTEMVGEFPELQGTMGKYYARLDGETEEIAEAVEQHYQPRFAGDKLPESKIAAAVALADKLETLVGIWGIGLIPTGDKDPYALRRAALGILRMLMQYGLDVNELIQTAFDSFPKGLLNEKTPSETADFMQARLAVLLQNDYPQDIVVAVLAKQPRRLDDLTAKLQAVAAFKQLPEAAALAAANKRVQNLLKKADAALGEVDESLLQQDEEKALFAAAQGLQPKIAAAVAEGNFQTALSELASVKPQVDAFFDGVMVMAEDAAVKQNRLNLLNRLAEQMNAVADIALLGE

SEQ ID NO: 22277 - protein, 154 aa, Neisseria meningitidis; identical to SEQ ID NO: 15736

SEQ ID NO: 22278 - protein, 545 aa, Neisseria meningitidis; identical to SEQ ID NO: 3410

SEQ ID NO: 22279 - protein, 102 aa, Neisseria meningitidis; identical to SEQ ID NO: 6833

SEQ ID NO: 22280 - protein, 312 aa, Neisseria meningitidis
MKRKMLNVPKGNYDGMKGFTIIEFLVAGMLSMIVLMAVGSSYFTSRKLNDAANERLAAQQDLRNAATLIVRDARMAGGFGCFNMSEHPATDVVSDVAPKNRFFSLKRNSTNKLIPITESSNINYQNFFQVDSALIFQYGIDDLDASAETVVVSSCSKIAKPGKKISTLQEAKSALQITNDDKQNGNITRQRHVVNAYAVGRIAGEEGLFRFQLDDKGKWGNPQLLAKKIRHMKVRYIYVSDCPEDDDAGKEEKFKYTGTFDSSTNAVTPAGVEVLLSSGTDTKIAASSDNHIYAYRIDATIRGGNVCANRTL

SEQ ID NO: 22281 - protein, 513 aa, Neisseria meningitidis
MKIGIPRESLSGETRVACTPATVALLGKLGFETVVESGAGLAASLDDAAYQTAGATVADKAAVWVCPLIYKVNAPSEQELPLLNEGQTIVSFLWPRQNEALVEALRAKKVNALAMDMVPRISRAQALDALSSMANISGYRAVIEAANAFGRFFTGQITAAGKVPPAQVLVIGAGVAGLAAIGTANSLGAVVRAFDTRLEVAEQIESMGGKFLKLDFPQESGGSGDGYAKVMSDEFIAAEMKLFAEQAKEVDIIITTAAIPGKPAPKLITKEMVESMKSGSVIVDLAAATGGNCELTRPGELSVTGNGVKIIGYTDMANRLAGQSSQLYATNLVNLTKLLSPNKDGEITLDFEDVIIRNMTVTHDGEITFPPPPIQVSAQPQQTPSEKAAPAAKPEPKPVSLWKKLAPAVIAAVLVLWVGAVAPAAFLNHFIVFVLACVIGYYVVWNVSHSLHTPLMSVTNAISGIIVVGALLQISQGNGFVTLLAFIAILIASINIFGGFFVTRRMLNMFKKG

SEQ ID NO: 22282 - protein, 291 aa, Neisseria meningitidis; identical to SEQ ID NO: 6686

SEQ ID NO: 22283 - protein, 168 aa, Neisseria meningitidis
MPLLDSFKVDHTRMHAPAVRVAKTMTTPKGDTITVFDLRFCVPNKEILPEKGIHTLEHLFAGFMRDHLNGNGVEIIDISPMGCRTGFYMSLIGTPSEQQVADAWLASMQDVGNVKDQSKIPELNEYQCGTYQMHSLAEAQQIAQNVLARKVAVNKNEELTLDEGLLNA

SEQ ID NO: 22284 - protein, 618 aa, Neisseria meningitidis
MLNKIFSWFESRIDPYPEAAPKTPEKGLWRFVWSSMAGVRKWIAALAALTAGIGIMEALIFQFMGKIVEWLGKYAPAELFAEKGWELAAMAAMMVFSVVWAFAASNVRLQTLQGVFPMRLRWNFHRLMLNQSLGFYQDEFAGRVSAKVMQTALALRDAVMTVADMVVYVSVYFITSGVILASLDSWLLLPFIGWIVGFASVMRLLIPKLGQTAAWQADARSLMTGRITDAYSNIATVKLFSHGAREAAYAKQSMEEFMVTVRAQMRLATLLHSCSFIVNTSLTLSTAALGIWLWHNGQVGVGAVATATAMALRVNGLSQYIMWESARLFENIGTVGDGMATLSKPHTILDKPNALPLKVSQGEIKFEHVDFSYEAGKPLLNGFNLTIRPGEKVGLIGRSGAGKSTIVNLLLRFYEPQSGTVSIDGQDISGVTQESLRAQIGLVTQDTSLLHRSVRDNIIYGRPDATDAEMVSAAERAEAAGFIPDLSDAKGRRGYDAHVGERGVKLSGGQRQRIAIARVMLKDAPILLLDEATSALDSEVEAAIQESLDKMMDGKTVIAIAHRLSTIAAMDRLVVLDKGRIIEEGTHAELLEKRGLYAKLWAHQSGGFLNEHVEWQHD

SEQ ID NO: 22285 - protein, 600 aa, Neisseria meningitidis
MKRQSDELAEKMPKMLPQVRPGTAMSAQALAEAAKLLNEKQRSVANARCAVVAAVLGIKYQYGCSAKAAVAQFLGLLAAGKLDAVTLGNLEKANDRSRSAKVGERTLDGWISAYLKAENATERLVALAPKTTKAVKPIESYGWLPMFMQFHNIPSAPKLAHSYRRFVQWAEAENMPVNDVPNLSMVRRVWEKLPLIMQERGRKTGAAYKSLLPYVKRDWGALKPNDVWIGDGHSFKAKVAHPVHGRPFKPEVTVIIDGCTRFVVGFSVSLAESCVAVSDAMRIGVKHFGLPIIYYSDNGGGQTGKTIDHEITGITSRLGIRHETGIAGNPQGRGIIERWWKDNLIEMARQYETFAGAGMDSSTKNLMYRKMESAFNALEKGKDLTEEQQKYLKKLPSWSRFIADVVKCIDEYNNRPHGELPRHPDGGHYTPKAYREMRLEQDGIAPDMLSAQELATMFMPQEVRKVQRGWLDLFNNSYFSTELAEYHKDEVRVSYDLSDASAVNVFDMDGKFITKAQANGNTREAFPTARIDQLAEKRRKGKIKRAENAIKLANAEVNPALEQAAVWDELGHLGGNDIEAEYAVLPKTGTDDFVLFEADR

SEQ ID NO: 22286 - protein, 305 aa, Neisseria meningitidis; identical to SEQ ID NO: 1198

SEQ ID NO: 22287 - protein, 39 aa, Neisseria meningitidis; identical to SEQ ID NO: 7406

SEQ ID NO: 22288 - protein, 96 aa, Neisseria meningitidis; identical to SEQ ID NO: 6139

SEQ ID NO: 22289 - protein, 242 aa, Neisseria meningitidis
MNAAAAKDYMKTVELNKSAGNVDTTSRTARRVQAVFRRMLPYADAANNTGHRFDWKMTVFKNDELNAWAMPGGKMAFYTGIVDKLKLTDDEIAAIMGHEMTHALHEHGKNKVGQQILTNTAAQIGTQIILDKKPDTNPELVGLGMDILGTYGLTLPYSRSLEEEADEGGMMLMAQAGYHPAAAVRVWEKMNQENDQNGFIYAITSTHPTNNARIENLKRLLPTVMPVYEQSVRNKGRVNIVD

SEQ ID NO: 22290 - protein, 239 aa, Neisseria meningitidis; identical to SEQ ID NO: 3265

SEQ ID NO: 22291 - protein, 222 aa, Neisseria meningitidis
MLPSKYEDNALQIKEKSTERTAPFFVLEVTARSAADILGIHPNSAALFYRKIRTVINHHLALAADEVFEGPVEPDESDFGGRRKGRRGRGAAGKVVVFGILKRNGRVYTVVVDNAKSETLLPVIKKKIMPDSIVYTDSLSSYDKLDVSGFIHYRINHSKECADRQNHINDIENFWNQAKRVLRKYNGIDRKSFPLFLKECEFRFNFGTPSQQLKILRDWCGI

SEQ ID NO: 22292 - protein, 265 aa, Neisseria meningitidis
MLKQRVITAMWLLPLMLGMLFYAPQWLWAAFCGLIALIALWEYARMGGLCKIKTNHYLAATLVFGVVAYAGGWMLPNLVWYVVLAFWLAVMPLWLRFKWRLNGGWQVYAVGWLLVMPFWFALVSLRPHPDDALPLLAVMGLVWVADICAYFSGKAFGKHKIAPAISPGKSWEGAIGGAVCVAVYMTAVRSAGWTAFDTGWFDTVLIGLVLTVVSVCGDLLESWLKRAAGIKDSSNLLPGHGGVFDRTDSLIAVISVYAAMMSVLN

SEQ ID NO: 22293 - protein, 311 aa, Neisseria meningitidis; identical to SEQ ID NO: 5677

SEQ ID NO: 22294 - protein, 215 aa, Neisseria meningitidis; identical to SEQ ID NO: 6176

SEQ ID NO: 22295 - protein, 900 aa, Neisseria meningitidis
MQLHILNNPKDAALAADAEFLKQSLFNLLHEEASPLVVETVKLLSTSDDSAALIEKVLPQLDEQQTHDLTLACGLFAQILNIAEDVHHERRRQIHEEAGRGGAEGSLTETVRRLKAGKADGKSVQRQLDNTSVTAVLTAHPTEVQRQTVLSFNRRIRALLPQRERCTNADALARLRREIDTILLGLWQTSETRRHKLSVNDEINNGVSIFPMSFFEALPKLYRKMEHDFQTAYPGVRVPDILKIGGWIGGDRDGNPFVSAETLRFAFRRHADAVFRFYRGELDKLYRELPLSIRRVKVNGDVTALSDKSPDEEIARAEEPYRRAIAYIMARAMGKARALGLGMGCKFGFLEPYASAQEFLDDLKKLQRSLIDNGSRLLAEGRLADLIRSVSVFGFHMMPLDLRQHAGKHADVVAELFQHAGLEDYNSLNEEQKQAALLRELGHQRPLYSPFITYSDHTRHELAIFNEARKIKDEFGEDAVTQSIISNCEQPSDLLALALLLKETGLLVVENGKPHSRINIVPLFETIEALENACPVMETMFRLDWYDALLESRGNIQEIMLGYSDSNKDGGYVTSSWCLYQAELGLVELFKKYGVRMRLFHGRGGSVGRGGGPSYQAILAQPAGSVAGQIRITEQGEVITAKYADPGNAQRNLETLVAATLEASILPDKKDPDAKLMQALSDVSFKYYRELITHPDFIDYFLQTSPIQEIATLNLGSRPASRKTLARIQDLRAIPWVFSWMQNRLMLPAWYGFGSAVETLCEGSPETLAALREHAQSNPFFQAMLSNMEQVMAKTDITLAENYAGLSESPDKAKIIFGMIKEEYRRSRKALLDLLQTEELLRDNRSLARSLALRIPYLNALNGLQVAMLKRLRKEPDNPHALLMVHLTINGVAQGLRNTG

SEQ ID NO: 22296 - protein, 276 aa, Neisseria meningitidis
MAHYAIGDIQGCFDELTALLDKIDFNHGTDTLWLTGDIVNRGPKSLEALQFCMEHENSVQIVLGNHDLHLLAVGCGEGAPKRSDTIEPILKHPDGKKMLDWLRAQPLLIREGSRVMVHAGILPQWRITKAESLAGEAEAELRGKKYVKFFSKMYGNKPAAWDEGLEGYARLRFIVNAFTRMRALTFKNELDFDYKSTVKKMPPYLRPWFKAPDRQNLDRTIIFGHWSSLGYTNADNVISLDTGALWGGQLTAVNLETEEITQVQAAGGIDWKSFAK

SEQ ID NO: 22297 - protein, 156 aa, Neisseria meningitidis
MYDVNTHDVRRFFARVWQQRLNPLQLSALEQKALRIVEAHPEYHRYLERIEDHLDTDWLPENGESNPFLHMSLHLSVQEQAGIDQPHGIRAIHDTLCAKRGWLEAEHEMMEALAETLWTAQRYGTGLDVNFYMTRLRKLIGLGAEDQARLNPHKIA

SEQ ID NO: 22298 - protein, 397 aa, Neisseria meningitidis; identical to SEQ ID NO: 15546

SEQ ID NO: 22299 - protein, 397 aa, Neisseria meningitidis
MTEDERFAWLQLAFTPYIGAESFLLLLRRFGSASNALSAPAEQVAPAVRHKQAAEAWRNAEKRASARQAAEAALEWEMRDGCRLMLFQDEDFPEMLTQGLTAPPVLFLRGNVRLLHKPSAAIVGSRHATPQAMRIAKDFGKSLGGQNIPVVSGMASGIDTAAHQGALEAEGGTIAVWGTGIDRIYPPSNKNLAYEIAEKGLIVSEFPIGTRPYAGNFPRRNRLIAALSQVTLVVEAALESGSLITAGLAAEMGREVMAVPGSIDNPHSKGCHKLIKDGAKLTECLDDILNECPGLLQNTGASSYSINKDTSDTGSRAVQTAYAPPPSPEGKMPSEGAACGTDPGGILDKMGFDPVHPDVLAEQLAMPAADLYAALLELELDGSVAAMPGGRYQRIRT

SEQ ID NO: 22300 - protein, 193 aa, Neisseria meningitidis
MNLRDDLQLIYDRIPEGSRVLDLGCGDGELLAALVEHKKCSGYGIEIDTDNVIAAMSRGVNVIQADLEEGLTAFNDQSFDVIVLSQTIQAMQNTEKILRCLMRVAKQAIVSFPNFGYWRNRVQIALGGHMPVSERMPYHWYDTPNIHWCTLKDFDLLCAKNNIRILERAVMTGNRQVKHFPNLLGSLAFYRVG

SEQ ID NO: 22301 - protein, 408 aa, Neisseria meningitidis; identical to SEQ ID NO: 2386

SEQ ID NO: 22302 - protein, 242 aa, Neisseria meningitidis; identical to SEQ ID NO: 14445

SEQ ID NO: 22303 - protein, 162 aa, Neisseria meningitidis
MPPLFRKAVWLLFAVSVCAFAGSLAAQYVLGMEPCVLCISQRLCVLATALCTAIVLMCRPRGRAGGLFGAVFISIPAVTGISVAAYQLWLQSLPPGTAPSCGAPWTFRLKGWPLFDWFEPVVRGFGNCAEPDYLLGVALPVWSAAYFLAVVLTVWWAWARAK

SEQ ID NO: 22304 - protein, 163 aa, Neisseria meningitidis
MNSLFVDNTVFITRLKAGHIGRLVQALFEEWHGFEPWSSVDKIRAYYGRCLKDDELPLAFAAVDDFGTLLGSAAVKRHDMKSFPQYEYWLGDVFVLPEYRGKGIGRRLVAHCIGAARSLGIKFLYLYTPDVQIFYESFGWAVVGRHFHNGEWVTVMRLDMDKV

SEQ ID NO: 22305 - protein, 386 aa, Neisseria meningitidis; identical to SEQ ID NO: 19062

SEQ ID NO: 22306 - protein, 196 aa, Neisseria meningitidis; identical to SEQ ID NO: 259

SEQ ID NO: 22307 - protein, 735 aa, Neisseria meningitidis
MFPDQSAPNLLQGLNPEQLSAVTWPPQSALVLAGAGSGKTRVLTTRIAWLLQTGQASVHSIMAVTFTNKAAKEMQTRLGAMIPVNVRAMWLGTFHGLCHRFLRLHHRDAGLPSSFQILDSGDQLSLIKRLLKSLNIAEEIIAPRSLQGFINAQKESGLRASVLSAPDPHTRRMIECYAEYDKICQREGVVDFAELMLRSYEMLQSNEILRQHYQNRFNHILVDEFQDTNKLQYAWLKLMAGGNAAVFAVGDDDQSIYRFRGANVGNMTALMEEFHIDAPVKLEQNYRSVGNILAAANAVIENNDERLGKNLRTDAEAGDKIRYYSAFTDLEEARFILDETKALEREGWDLDEIAVLYRSNAQSRVIEQSLFRSGIPYKIYGGLRFYERQEIKHALAYLRLAVNPDDDNALLRVINFPPRGIGARTVENLQTASNEQGITLWQAACNAGAKAAKVVAFVRLIEALRNQVGQMPLSEIIVGILKDSGLTEHYRTQKGDNQDRLDNLDELVNAAIEFKPEDSNFETLPENISDDPAFPILAFLSNATLESGENQAGAGEKAVQLMTVHAAKGLEFNAVFLTGMEEGRFPSEMSLAERGGLEEERRLMYVAITRARKRLYITMAQQRMLHGQTQFGIVSRFVEEIPPEVLHYLSVKKPAYDSYGNTRQTAASKDKIIDDYKQPQTYAGFRIGQNVRHAKFGTGVIIDAADKGESARLTINFGKQGVKELDTKFAKLEEM

SEQ ID NO: 22308 - protein, 1034 aa, Neisseria meningitidis
MNKTLKRQVFRHTALYAAILMFSHTGGGGGAQAQTSKYAIIMNERNQLEVKQEGSYSTLREKDRERKFDFNANRGGGGSVFFDNTDTLVSRQSGTAVFGTATYLPPYGKVSGFDANALKERNNAVDWIHTTRAGLAGYAYTNVICRSSDQCPQLVYETKFAFSNKDLANNAGRLDRHSDPSRENSPIYKLKDHPWLGVSFNLGSEGTAKNGKSFNKLVSSFDENNSNQNLVYTTKGHHISLGDWQREHTAMAYYLNAKLHLLDKKGIKDIAQGKTVDLGTLRPRVEAKVRRGGGDLLNFWATWKIEDKGNITVRLDLPEVKAGRCTNAAHPNPKVQAPSPALTAPALWFGPVQNGKVQMYSASVSTYPDSSSSQIFLQNLSRKDDTSKPGRYSLKPLSTSEIKSKEPNFTGRQTIIRLDSGVREIKLDRSNEATGLNGNDGKNETFGIVSEGSFMPDVSEWKKVLLPWTVRVFADDSKFKEFNKEEKDNKPKYSQKYRSRDNNNHNLGDIVNSPIVAVGEYLATSANDGMVHIFKKGNGGDERNYSLKLSYIPGTMPRKDIQNTESTLAKELRAFAEKSYVGDRYGVDGGFVLRKVERNGKDHVFMFGAMGFGGRGAYALDLSKIDSGNGNLADVSLFDVKHDKNGNNGVKLGYTVGTPQIGKTHDGKYAAFLASGYATKDITSGDNKTALYVYDLESSGTLIKKIEVPGGKGGLSSPTLVDKDLDGTVDIAYAGDRGGSMYRFDLSNQDPNQWSVRAIFEGTKPITSAPAISQLKDKRVVIFGTGSDLSEDDVLSTSEQYIYGIFDDDTVANNVNVKLSGLGGGLLEQELKQEDKTLFLTDYKRSDGSGSKGWVVKLKGGQRVTVKPTVVLRTAFVTIHKYTGTDKCGAETAILGINTADGGKLTKKSARPIVPAENQAVAQYSGHKKGINGKSIPIGCMQKGNEIVCPNGYVYDKPVNVRYLDEKKTDGFSTTADGDAGGSGIDPAGKRSGKNNRCFSQKGVRTLLMNDLDSLDITGPTCGMKRISWREVFY

SEQ ID NO: 22309 - protein, 333 aa, Neisseria meningitidis; identical to SEQ ID NO: 14685

SEQ ID NO: 22310 - protein, 149 aa, Neisseria meningitidis
MSIYAVAHIVHLYCAIAFVGGVFFEVLVLSVLHTGRVSRESRREVEKAMSYRAVRVMPFVVGLLFASGVVMAANRYLSILGEPFATSFGTMLTLKILLAFSVLAHFAIAVVKMARSTLTVGWSKYIHAVVFTHMLLIVFLAKAMFYISW

SEQ ID NO: 22311 - protein, 68 aa, Neisseria meningitidis; identical to SEQ ID NO: 15327

SEQ ID NO: 22312 - protein, 261 aa, Neisseria meningitidis; identical to SEQ ID NO: 19636

SEQ ID NO: 22313 - protein, 207 aa, Neisseria meningitidis; identical to SEQ ID NO: 1132

SEQ ID NO: 22314 - protein, 484 aa, Neisseria meningitidis
MSIEPTPPNLENDGIENDVERVSADFDRVHSLCEILEPAFEQIENGTPLEDAPLRDKLTELTVLLSELHPADVAAVLESLPPRERNIVWILVKPEDDGEVLLEVSDAVRETLIESMDKDELLAAVDDLDADELAELADDLPHQVVYEALQTRDEEERAQVKAAMSYEDNQVGAIMDFELVSIRADVACEVVLRYLRRFDSLPDHTDKIFVVDENDVLQGVLPIRKLLVADPEDLVENVMAKDVVRFRAEDDVEEAAQAFERYDLVTAPVVDENKKLIGRITIDEMVDVIREESEADMLNMAGLQEEEDLFAPVLDSVKNRWMWLAINLCTAFLASRVIGAFEGSIEKIVALAALMPIVAGIGGNSGNQTITMIVRAMAMGQLTDMQAGRLLKKEVGVALVNGIIWGTVMGAVSWLLYGSLGIGLVMVAAMTLNLLLAATVGVLIPVVMEKFGRDPALGSSVLITAVTDSGGFLIFLGLATLFLL

SEQ ID NO: 22315 - protein, 544 aa, Neisseria meningitidis; identical to SEQ ID NO: 14366

SEQ ID NO: 22316 - protein, 310 aa, Neisseria meningitidis; identical to SEQ ID NO: 2585

SEQ ID NO: 22317 - protein, 507 aa, Neisseria meningitidis; identical to SEQ ID NO: 16328

SEQ ID NO: 22318 - protein, 453 aa, Neisseria meningitidis; identical to SEQ ID NO: 6561

SEQ ID NO: 22319 - protein, 725 aa, Neisseria meningitidis
MTRFKYSLLFAALLPVYAQADVSVSDDPKPQESTELPTITVTADRTASSNDGYTVSGTHTPLGLPMTLREIPQSVSVITSQQMRDQNIKTLDRALLQATGTSRQIYGSDRAGYNYLFARGSRIANYQINGIPVADALADTGNANTAAYERVEVVRGVAGLLDGTGEPSATVNLVRKRPTRKPLFEVRAEAGNRKHFGLGADVSGSLNTEGTLRGRLVSTFGRGDSWRRRERSRDAELYGILEYDIAPQTRVHAGMDYQQAKETADAPLSYAVYDSQGYATAFGPKDNPATNWANSRHRALNLFAGIEHRFNQDWKLKAEYDYTRSRFRQPYGVAGVLSIDHNTAATDLIPGYWHADPRTHSASVSLTGKYRLFGREHDLIAGINGYKYASNKYGERSIIPNAIPNAYEFSRTGAYPQPSSFAQTIPQYGTRRQIGGYLATRFRAADNLSLILGGRYSRYRTGSYDSRTQGMTYVSANRFTPYTGIVFDLTGNLSLYGSYSSLFVPQSQKDEHGSYLKPVTGNNLEAGIKGEWLEGRLNASAAVYRARKNNLATAAGRDPSGNTYYRAANQAKTHGWEIEVGGRITPEWQIQAGYSQSKTRDQDGSRLNPDSVPERSFKLFTAYHFAPEAPSGWIIGAGVRWQSETHTDPATLRIPNPAAKARAADNSRQKAYAVADIMARYRFNPRAELSLNVDNLFNKHYRTQPDRHSYGALRTVNAAFTYRFK

SEQ ID NO: 22320 - protein, 415 aa, Neisseria meningitidis
MLKQTTLLAACASFAALLGGCATQQPAPVIAGNSGMQDAPSSAVYNNPYGATPYSPAPASDAPYVPPVQSAPVYTPPAYVPPSAPAVSGTYVPSYAPVDINAATHTIVRGDTVYNISKRYHISQDDFRAWNGMTDNTLSIGQIVKVKPAGYAAPKAAAVKSRPAVPAATQPPVQSAPVDINAATHTIVRGDTVYNISKRYHISQDDFRAWNGMTDNMLSIGQIVKVKPAGYAAPKTAAVESRPAVPAAVQTPVKPAAQPPVQSAPQPAAPAAENKAVPAPAPQSPAASPSGTRSVGGIVWQRPTQGKVVADFGGNNKGVDIAGNAGQPVLAAADGKVVYAGSGLRGYGNLVIIQHNSSFLTAYGHNQKLLVGEGQQVKRGQQVALMGNTDASRTQLHFEVRQNGKPVNPNSYIAF

SEQ ID NO: 22321 - protein, 370 aa, Neisseria meningitidis; identical to SEQ ID NO: 7729

SEQ ID NO: 22322 - protein, 98 aa, Neisseria meningitidis; identical to SEQ ID NO: 9060

SEQ ID NO: 22323 - protein, 197 aa, Neisseria meningitidis; identical to SEQ ID NO: 1551

SEQ ID NO: 22324 - protein, 544 aa, Neisseria meningitidis; identical to SEQ ID NO: 3460

SEQ ID NO: 22325 - protein, 148 aa, Neisseria meningitidis
MNFSFVPLFLVTLILLGVVSNNNSITISATILLLMQQTALIQFVPLVEKHGLNLGIILLTIGVLSPLVSGKARVPPVAEFLNFKMISAVFIGIFVAWLAGRGVPLMGQQPVLITGLLIGTVIGVAFMGGIPVGPLIAAGILSFVVGKG

SEQ ID NO: 22326 - protein, 197 aa, Neisseria meningitidis; identical to SEQ ID NO: 2603

SEQ ID NO: 22327 - protein, 252 aa, Neisseria meningitidis; identical to SEQ ID NO: 7668

SEQ ID NO: 22328 - protein, 297 aa, Neisseria meningitidis
MVTFSKIRPLLAIAAAALLAACGTAGNNAARKPVQTAKPAAVVGLALGGGASKGFAHIGIIKVLKENGIPVKVVTGTSAGSIVGSLFASGMSPDRLELEAEILGKTDLVDLTLSTSGFIKGEKLQNYINRKVGGRRIQQFPIKFAAIATDFETGKAVAFNQGNAGQAVRASAAIPNVFQPVIIGRHTYVDGGLSQPVPVSAARRQGANFVIAVDISARPGKNISQGFFSYLDQTLNVMSVSALQNELGQADVVIKPQVLDLGAVGGFDQKKRAIRLGEEAARAALPEIKRKLAAYRY

SEQ ID NO: 22329 - protein, 242 aa, Neisseria meningitidis; identical to SEQ ID NO: 1183

SEQ ID NO: 22330 - protein, 155 aa, Neisseria meningitidis; identical to SEQ ID NO: 5339

SEQ ID NO: 22331 - protein, 637 aa, Neisseria meningitidis
MNPSPLLDLIDSPQDLRRLDKKQLPRLAGELRAFLLESVGQTGGHFASNLGAVELTIALHYVYDTPEDKLVWDVGHQSYPHKILTGRKNQMHTMRQYGGLAGFPKRSESEYDAFGVGHSSTSIGAALGMAAADKLLGSDRRSVAIIGDGAMTAGQAFEALNCAGDMDVDLLVVLNDNEMSISPNVGALPKYLASNVVRDMHGLLSTVKAQTGKVLDKIPGAMEFAQKVEHKIKTLAEEAEHAKQSLSLFENFGFRYTGPVDGHNVENLVDVLKDLRSRKGPQLLHVITKKGNGYKLAENDPVKYHAVAKLPKEGAAQMPSEKEPKPVAKPTYTQVFGKWLCDRAAADERLIAITPAMREGSGLVEFEQRFPDRYFDVGIAEQHAVTFAGGLACEGMKPVVAIYSTFLQRAYDQLVHDIALQNLPVLFAVDRAGIVGADGPTHAGLYDLSFLRCIPNMIVAAPSDENECRLLLSTCYQADAPAAVRYPRGTGTGAPVSDGMETVEIGKGIIRREGGKTAFIAFGSMVAPALAVAGKLNATVVDMRFVKPIDEELIVRLARSHDRIVTLEENAEQGGAGGAVLEVLAKHGICKPVLLLGVADTVTGHGDPKKLLDGLGLSAEAVERRVRAWLSDRDAAN

SEQ ID NO: 22332 - protein, 254 aa, Neisseria meningitidis
MSYTQLTQGERYHIQYLSRHCTVTEIAKQLNRHKSTISREIRRHRTQGQQYSAEKAQRQSQTIKQRKRQPYKLDSQLIQHIDPLIRRKLSPEQVCAYLCKHHQITLHHSTIYRYLRQDKSNGSTLWQHLRICSKPYRKRYGSTWTRGKVPNRVGIENRPAIVDQKSRIGDWEADTIVGKGQKSALLTLVERVTRYTIICKLDSLKAEDTARAAVRTLKAHKDRVHTITMDNGKEFYQHTKITKALKAETYFCRP

SEQ ID NO: 22333 - protein, 152 aa, Neisseria meningitidis; identical to SEQ ID NO: 1697

SEQ ID NO: 22334 - protein, 446 aa, Neisseria meningitidis
MLNPSRKLVELVRILDEGGFIFSGDPVQATEALRRVDGSTEEKIIRRAEMIDRNRMLRETLERVRAGSFWLWVVAATFAFFTGFSVTYLLMDNQGLNFFLVLAGVLGMNTLMLAVWLAMLFLRVKVGRFFSSPATWFRGKDPVNQAVLRLYADEWRQPSVRWKIGATSHSLWLCTLLGMLVSVLLLLLVRQYTFNWESTLLSNAASVRAVEMLAWLPSKLGFPVPDARAVIEGRLNGNIADARAWSGLLVGSIACYGILPRFLAWVVCKILLKTSENGLDLEKPYYQAVIRRWQNKITDADTRRETVSAVSPKIILNDAPKWAVMLETEWQDGEWFEGRLAQEWLDKGVATNREQVAALETELKQKPAQLLIGVRAQTVPDRGVLRQIVRLSEAAQGGAVVQLLAEQGLSDDLSEKLEHWRNALAECGAAWLEPDRAAQEGRLKDQ

SEQ ID NO: 22335 - protein, 602 aa, Neisseria meningitidis
MRTNYCGLISEQYLDQTVTVKGWVHRRRDHGGVIFIDLRDREGIVQVVIDPDTPEAFAAADSSRNEYVLSITGRVRNRPEGTTNDKMISGKIEILAKEIEVLNAAATPPFQIDDENISENVRLTNRVIDLRRPTMQRNLRLRYQVAMGVRRYLDAQGFIDIETPMLTRSTPEGARDYLVPSRVHPGEFFALPQSPQLFKQLLMVAGFDRYYQITKCFRDEDLRADRQPEFTQIDLETSFLNEDEIMDITEGMAKQVFKDALNVDLGDFPRMPYAEAMFYYGSDKPDMRINLKFTELTDLMKTEEFKVFRGAADMKGGRVVALRVPNGAKFSRKEIDEYTKFVGIYGAKGLAYIKVNDVGNLSNGEDSGLQSPIVKFLSENALKEIIERTGAQNGDIIFFGADKTKVVNEAIGALRIKVGLEHGAENGYFTDEWKPLWVVDFPMFEYDEEADRYVAVHHPFTAPKEGHEDLMVSDPANCLARAYDMVLNGWEIGGGSIRIHRADVQEKVFAALKISPEEQQEKFGFLLDNLKFGAPPHGGLAFGLDRLVTLMTGAESIRDVIAFPKTQRAQCLLTNAPNSVDDKQLRELSLRLRQKVAETKEA

SEQ ID NO: 22336 - protein, 77 aa, Neisseria meningitidis; identical to SEQ ID NO: 14102

SEQ ID NO: 22337 - protein, 273 aa, Neisseria meningitidis; identical to SEQ ID NO: 6354

SEQ ID NO: 22338 - protein, 859 aa, Neisseria meningitidis
MRYDKLTAKFQQALAEAQSLALAADGSYLEAGFVLKALLDDQNSGAAALLAHSGVNVPQVKQRLQQHLNSLPKVSSQGGDILPSRELQAVLNLMDKAATKRGDAYIASELFLLALVQQNDAAGKILKEAGATEQNINAAIDAVRGGQNVNDANAEDQRDALKKYTLDLTQRARDGKLDPVIGRDDEIRRAIQVLQRRTKNNPVLIGEPGVGKTAIVEGLAQRIVNGEVPESLRNKRLLVLDLAALIAGAKYRGEFEERLKGVLNDLAKDDGNTLIFIDEIHTLVGAGKTDGAMDAGNMLKPALARGELHCIGATTLDEYRQYIEKDAALERRFQKVLVGEPSVEDTIAILRGLQERYEIHHGIDITDPAIVAAAELSDRYITDRFLPDKAIDLIDEAASRVKMEKETKPEAMDKIDRRLIQLRMEKAHVEKEKDDASKKRLELIDEEINGLQKEYADLDEIWKAEKAISDGAANIKKQIDEVKIKIEQAKRQGDLALASKLMYEDLEHLEKQRAAAERADTDSTKPANKLLRNNVGAEEIAEVVSRMTGIPVSKMMEGERDKLLKMEEVLHRRVVGQDEAVRAVSDAIRRSRSGLADPNKPYGSFLFLGPTGVGKTELCKALAGFLFDSEDHLIRIDMSEYMEKHAVARLIGAPPGYVGYEEGGYLTEQVRRKPYSVILLDEVEKAHPDVFNILLQVLDDGRLTDGQGRTVDFKNTVIVMTSNIGSQHIQQMGIQDYEAVKEVVMEDVKEHFRPEMINRIDEVVVFHGLDQDNIRNIAKIQLKGLEKRLEKQNLRLTVSDAALDIIAKAGFDPIYGARPLKRAIQSEIENPLAKALLAGNYAPESEIRVEADGDRLKFA

SEQ ID NO: 22339 - protein, 75 aa, Neisseria meningitidis; identical to SEQ ID NO: 821

SEQ ID NO: 22340 - protein, 76 aa, Neisseria meningitidis
MNIVKKYAVKAALAAGIFTPAIVMADTFDASAIGTQVANVIMGFVSMVSAVGMAAITVILAIQGFKMAWSMIKSVK

SEQ ID NO: 22341 - protein, 358 aa, Neisseria meningitidis; identical to SEQ ID NO: 17036

SEQ ID NO: 22342 - protein, 148 aa, Neisseria meningitidis; identical to SEQ ID NO: 14771

SEQ ID NO: 22343 - protein, 158 aa, Neisseria meningitidis; identical to SEQ ID NO: 871

SEQ ID NO: 22344 - protein, 421 aa, Neisseria meningitidis; identical to SEQ ID NO: 4874

SEQ ID NO: 22345 - protein, 252 aa, Neisseria meningitidis; identical to SEQ ID NO: 4740

SEQ ID NO: 22346 - protein, 260 aa, Neisseria meningitidis; identical to SEQ ID NO: 7097

SEQ ID NO: 22347 - protein, 354 aa, Neisseria meningitidis
MALVSMRQLLDHAAENSYGLPAFNVNNLEQMRAIMEAADQVNAPVIVQASAGARKYAGAPFLRHLILAAVEEFPHIPVVMHQDHGASPDVCQRSIQLGFSSVMMDGSLLEDGKTPSSYEYNVNATRTVVNFSHACGVSVEGEIGVLGNLETGEAGEEDGVGAVGKLSHDQMLTSVEDAVRFVKDTGVDALAIAVGTSHGAYKFTRPPTGDVLRIDRIKEIHQALPNTHIVMHGSSSVPQEWLKVINEYGGNIGETYGVPVEEIVEGIKHGVRKVNIDTDLRLASTGAVRRYLAENPSDFDPRKYLSKTIEAMKQICLDRYLAFGCEGQAGKIKPVSLEKMASRYAKGELNQIVK

SEQ ID NO: 22348 - protein, 296 aa, Neisseria meningitidis; identical to SEQ ID NO: 2838

SEQ ID NO: 22349 - protein, 425 aa, Neisseria meningitidis
MRSSDILIVDDEIGIRDLLSEILQDEGYSVALAENAEEARKLRHQARPAMVLLDIWMPDCDGITLLKEWAKNGQLNMPVVMMSGHASIDTAVEATKIGAIDFLEKPISLQKLLSAVENALKYGAAQTETGPVFDKLGNSAAIQEMNREVGAAVKCASPVLLTGEAGSPFETVARYFHKNGTPWVSPARVEYLIDMPMELLQKAEGGVLYVGDIAQYSCNIQAGIAFIVGKAEHRRVRVVASGSRAAGSDGIACEEKLAELLSESVVRIPPLRMQHEDIPFLIQGIACNVAESQKIAPASFSEEALAALTRYDWPGNFDQLQSVVATLLLEADGQEIGAAAVSSLLGQNVPAEGAEDMVGGFNFNLPLRELREEVERRYFEYHIAQEGQNMSKVAQKVGLERTHLYRKLKQLGIGVSRRAGEKTEE

SEQ ID NO: 22350 - protein, 517 aa, Neisseria meningitidis
MTQANRVIIFDTTLRDGEQSPGAAMTKEEKIRVARQLEKLGVDIIEAGFAAASPGDFEAVNAIAKTITKSTVCSLSRAIERDIRQAGEAVAPAPKKLIHTFIATSPIHMEYKLKMKPKQVIEAAVKAVKIAREYTDDVEFSCEDALRSEIDFLAEICGAVIEAGATTINIPDTVGYSIPYKTEEFFRELIAKTPNGGKVVWSAHCHNDLGLAVANSLAALKGGARQVECTVNGLGERAGNASVEEIVMALKVRHDLFGLETGIDTTQIVPSSKLVSTITGYPVQPNKAIVGANAFSHESGIHQDGVLKHRETYEIMSAESVGWATNRLSLGKLSGRNAFKTKLADLGIELESEEALNAAFARFKELADKKREIFDEDLHALVSDEMGSMNAESYKFISQKISTETGEEPRADIVFSIKGEEKRASATGSGPVDAIFKAIESVAQSGAALQIYSVNAVTQGTESQGETSVRLARGNRVVNGQGADTDVLVATAKAYLSALSKLEFGSAKPKAQGSGTI

SEQ ID NO: 22351 - protein, 196 aa, Neisseria meningitidis
MGLELPLILGTSSVFRREQMERLGIAFQAASPDFDETPMLGESAPQTALRLAEGKARSLAGRFPEALIVGADQVAWCDGRQWGKPMNLANAHKMLMHLSGREIEFYSAVVLLNTVTGRMQRHIDKTVVVMRKLDELHILRYLEREPDAVYCSCALKSEALGALLIERIESTDPNALIGLPVFRLVDFLKNEGVEVL

SEQ ID NO: 22352 - protein, 435 aa, Neisseria meningitidis; identical to SEQ ID NO: 4637

SEQ ID NO: 22353 - protein, 299 aa, Neisseria meningitidis; identical to SEQ ID NO: 14953

SEQ ID NO: 22354 - protein, 467 aa, Neisseria meningitidis
MDTTLKTTLTSVAAAFALSACTMIPQYEQPKVEVAETFKNDTADSGIRAVDLGWHDYFADPRLQKLIDIALERNTSLRTAALNSEIYRKQYMIERNNLLPTLAANANDSRQGSLSGGNVSSSYKVGLGAASYELDLFGRVRSSSEAALQGYFASTANRDAAHLSLIATVAKAYFNERYAEEAMSLAQRVLKTREETYKLSELRYKAGVISAVALRQQEALIESAKADYAHAARSREQARNALATLINQPIPDDLPAGLPLDKQFFVEKLPAGLSSEVLLDRPDIRAAEHALKQANANIGAARAAFFPSIRLTGTVGTGSAELGGLFKSGTGVWSFAPSITLPIFTWGTNKANLDVAKLRQQAQIVAYESAVQSAFQDVANALAAREQLDKAYDALSKQSRASKEALRLVGLRYKHGVSGALDLLDAERSSYAAEGAALSAQLTRAENLADLYKALGGGLKRDTQTDK

SEQ ID NO: 22355 - protein, 74 aa, Neisseria meningitidis; identical to SEQ ID NO: 444

SEQ ID NO: 22356 - protein, 331 aa, Neisseria meningitidis
LKAAYQNIATVWQGDFHNAKQVLSAMKKKVRKPAAVRSDADIAALFHAHRMKQAQQSRILNMLAVEIRPGFVLDNKRAPDIRAALLDVYGEADGKPFFLPLNLLLGFMGAHEWHKKGVAVPQLGGSIHVPFGVFSPLRGEYLDLLAHAPSTGFQTAFDIGTGSGVLAAILAKQGIPSVIGTDTNPKAVACARANIARLGFEKQVEIRETDLFPEGFADLIVCNPPWLPAKPTSAVESALYDPESAMLAAFLRDAPKHLNPDGEIRLIISDLAEHLHLRPSDFLDKAFAQAGLRVADMMKTKPKHKKAANPSDPLAFARTRETTFLYRLKKA

SEQ ID NO: 22357 - protein, 42 aa, Neisseria meningitidis
LCQKCRLKAEYRFRRHFDCLKRGQFYKRKEMPKLLINFRMFF

SEQ ID NO: 22358 - protein, 83 aa, Neisseria meningitidis; identical to SEQ ID NO: 3011

SEQ ID NO: 22359 - protein, 370 aa, Neisseria meningitidis; identical to SEQ ID NO: 6893

SEQ ID NO: 22360 - protein, 208 aa, Neisseria meningitidis; identical to SEQ ID NO: 1121

SEQ ID NO: 22361 - protein, 265 aa, Neisseria meningitidis; identical to SEQ ID NO: 5208

SEQ ID NO: 22362 - protein, 225 aa, Neisseria meningitidis; identical to SEQ ID NO: 1206

SEQ ID NO: 22363 - protein, 455 aa, Neisseria meningitidis; identical to SEQ ID NO: 8196

SEQ ID NO: 22364 - protein, 332 aa, Neisseria meningitidis; identical to SEQ ID NO: 14961

SEQ ID NO: 22365 - protein, 225 aa, Neisseria meningitidis
MQADFNRPVLAIDTGTSHLSLALRADGETRLFHQEVGSRQSELILPEIRTLFRNAGITAADLGAIVYAKGPGAFTGLRIGIGVAQGLATPFDTPLIGVPSLDAAASLPPPQSCILAATDARMGEVFYAWFDTLNCRRLSDYQVGRAADIALPKGHVFSDGIGNAFALENCPPFSGKPDMPTAADFLNLAAEGGFPAVAAAHAELLYVRNKIALTAKEQAERKART

SEQ ID NO: 22366 - protein, 291 aa, Neisseria meningitidis; identical to SEQ ID NO: 122

SEQ ID NO: 22367 - protein, 97 aa, Neisseria meningitidis; identical to SEQ ID NO: 177

SEQ ID NO: 22368 - protein, 176 aa, Neisseria meningitidis; identical to SEQ ID NO: 2300

SEQ ID NO: 22369 - protein, 98 aa, Neisseria meningitidis
MDAKHRLKKYVYHLLVAIDQLFNALTGGAADETLSSRTYRGARFAQKPKTRWKVLYTLINGLFFDRQHCRQAYISELKGRQHDARFNQSRAAGEKGTR

SEQ ID NO: 22370 - protein, 1204 aa, Neisseria meningitidis
MSAPIQAFDSLTVPIAGTNLIEASAGTGKTYGIAALFTRLIVLEQKNVERVLVVTFTKAATAELKTRLRARLDDVLQVLESKEIAKLGDDTLSDGIAAYCAEHHKGDTFLPALLKQALQKEGRTRLIVRLKAAIGQFDNAAIYTIHGFCQRILRDYAFLCQAPFDVELTEEDGDRLLIPAQDFWRERVSNDPVLAALAFKRKAVPQTVLAQIRAYLSRPYLNFRRPQADLKQAQRNAETSWQTVCRLLPELEAGFWRIHPDLNGNSYRKNSFGNLFKELAQKSAAGQLPFLDKDTHDRLLKLASDKLEAGLKKGKTPDAAVFAELQKLADFGYDLNALEEAEEATIIRLQLDLIGYLNRSLAEMKKSRRERGFDDLLLDVHTALTDNPHAETLARAVAENWETALIDEFQDTDPLQYEIFQKIFIAQNRPLFLVGDPKQAIYSFRGADIYAYLQAAEDARHRYTLATNYRSHAALIGSIGALFRLKERPFVLENIGYSEVGAARAESRLSPERPAVQVRWLHENDNEKANKDVLRRRAADYCADEIAHALNEAAGGRLNFKGCPLQSGDIAVLVRTHNEAVMVSAALKKRQVQSVLLSRESVFASPEAAALSALIGFWLEPRRAGTLRFVLTSGIFGYDAQQLHDFNQNESEILHWAESARTALDNWNQYGIFAAMQQFSQTHGIETRLLSRNNGRSLTNYFQLLELLAAEDAQNRNPAALHKWLRDQISLAGNNSGDNRAIRLESDEDLVKIVTMHASKGLQYPLVYCPFAWDAQDTGPSDWQILHQSANRTELLAKAQLSEDEQKQYADEEMAERLRLLYVALTRAEEQLNIYAAYSSDTADNPLAYLIEGLPQDSRETVRQTYAQEKDGITMLKQNWRRVADNAPAGTDFAFTENAPPPAAYRSNAGQTAEFAANSIPERRFRFVRHTSFTALSRHTQTPDGGEEDACPSLDAAETSVAAMPSETPTASDGISIHDFPKGTQAGLCLHEILEDFKFGQAAAGQETLIADKLKKYGFEEIWLPAVAEMAEACRKTPLTGAYCLSDIPPECRCPEMGFTLHTEDFGLKRLRDWFARDDIRLPEVCRAAAETLDFHTVNGFLNGFIDMVCQDPDGNICIIDYKSNHLGADASAYTQQAMDEAVTHHHYYLQALIYAVAAARYFKLRGQPPAAVSVRYLFLRGTDGKGGGVWRWDIDAAALEQIK

SEQ ID NO: 22371 - protein, 95 aa, Neisseria meningitidis; identical to SEQ ID NO: 6871

SEQ ID NO: 22372 - protein, 213 aa, Neisseria meningitidis; identical to SEQ ID NO: 5657

SEQ ID NO: 22373 - protein, 355 aa, Neisseria meningitidis
MGGKTFMLMAGGTGGHIFPALAVADSLRARGHHVIWLGSKDSMEERIVPQYGIRLETLAIKGVRGNGIKRKLMLPFTLYQTVREAQRIIRKHRVECVIGFGGFVTFPGGLAAKLLGVPIVIHEQNAVAGLSNRHLSRWAKRVLYAFPKAFSHEGGLVGNPVRADISNLPVPAERFQGREGRLKILVVGGSLGADVLNKTVPQALALLPDNARLQMYHQSGRNKLGSLQADYDALGVKAECVEFITDMVSAYRDADLVICRAGALTIAELTAAGLGALLVPYPHAVDDHQTANARFMVQAEAGLLLPQTQLTAEKLAEILGSLNREKCLKWAENARTLALPHSADDVAEAAIACAA

SEQ ID NO: 22374 - protein, 337 aa, Neisseria meningitidis; identical to SEQ ID NO: 1101

SEQ ID NO: 22375 - protein, 74 aa, Neisseria meningitidis; identical to SEQ ID NO: 2281

SEQ ID NO: 22376 - protein, 433 aa, Neisseria meningitidis; identical to SEQ ID NO: 13982

SEQ ID NO: 22377 - protein, 65 aa, Neisseria meningitidis; identical to SEQ ID NO: 127

SEQ ID NO: 22378 - protein, 157 aa, Neisseria meningitidis; identical to SEQ ID NO: 15356

SEQ ID NO: 22379 - protein, 575 aa, Neisseria meningitidis; identical to SEQ ID NO: 14939

SEQ ID NO: 22380 - protein, 156 aa, Neisseria meningitidis; identical to SEQ ID NO: 955

SEQ ID NO: 22381 - protein, 664 aa, Neisseria meningitidis
LTGIRSEKQIQREIMLTQAAFNRLARSGKASQNDLARAAVATRNRIRELNAELKQGTGFADKMGKIGRFGAAAVAGGAAAYTVLKPAMDNRKQLDENINRVSRQAFIEDNSKSAAWIATEGAQQIKDLALELVEKNGGTHDKALDLISGMMTTSLNFAQTKNEAQAAYAFALASEGSGEDTAKLIKTLKDGGMSGKDLQLGLEHVLQSGLDGTFEVRDMVRELPSLLPAAQQAGMNGVGGLDYLLSLLQSAANKSGSPAEAATNVQNLLSKTLSPDTIGRLKKMANPNDPKKGVDWIGSVVQGKQNGENAVQVLSRLADAMLVKDKQYQDYKKRAAAGDKTAAEQANMLKGALLAQLLPDLQAKQGLLAATDMTQIREYMASLAGVTLDNGKIAKNNEARMLSAAAQQEQQESLAMLRESLTGTLVDMETSFKKLAAEYPNATLALQALTTAATAASAAMLLTAGGGKGAGFLKDVGSKALGWGKASAGGVAAGATAAGGKLLSWGKSAGSGLMNNPALVKRAGLLGMLLYSESLGDGTLPKGLRGTKTTPEMINRLKNNGIRFEPAPKREQARGGVPQYLAAPSAQPTDKMLSPLFSTQTAAYQAALAQDTAAVTTGLAQVQSAMASASQTINTNVSLNIDGRVIANEVSRYQVAMFGRGAGQ

SEQ ID NO: 22382 - protein, 77 aa, Neisseria meningitidis; identical to SEQ ID NO: 707

SEQ ID NO: 22383 - protein, 103 aa, Neisseria meningitidis; identical to SEQ ID NO: 1510

SEQ ID NO: 22384 - protein, 202 aa, Neisseria meningitidis; identical to SEQ ID NO: 16142

SEQ ID NO: 22385 - protein, 235 aa, Neisseria meningitidis; identical to SEQ ID NO: 6978

SEQ ID NO: 22386 - protein, 518 aa, Neisseria meningitidis; identical to SEQ ID NO: 9387

SEQ ID NO: 22387 - protein, 477 aa, Neisseria meningitidis; identical to SEQ ID NO: 3214

SEQ ID NO: 22388 - protein, 306 aa, Neisseria meningitidis; identical to SEQ ID NO: 19515

SEQ ID NO: 22389 - protein, 219 aa, Neisseria meningitidis; identical to SEQ ID NO: 6969

SEQ ID NO: 22390 - protein, 362 aa, Neisseria meningitidis
LITGTPGSGKTLKMVSMMANDEMFKPDENGIRRKVFTNIKGLKIPHTYIETDAKKLPKSTDEQLSAHDMYEWIKKPENIGSIVIVDEAQDVWPARSAGSKIPENVQWLNTHRHQGIDIFVLTQGPKLLDQNLRTLVRKHYHIASNKMGMRTLLEWKICADDPVKMASSAFSSIYTLDKKVYDLYESAEVHTVNKVKRSKWFYTLPVIVLLIPVFVGLSYKMLSSYGKKQEEPAAQESAATEQQAVLPDKTEGEPVNNGNLTADMFVPTLSEKPESKPIYNGVRQVRTFEYIAGCIEGGRTGCACYSHQGTALKEVTELMCKDYVKNGLPFNPYKEESQGQEVQQSAQQHSDRAQVATLGGKP

SEQ ID NO: 22391 - protein, 341 aa, Neisseria meningitidis; identical to SEQ ID NO: 14301

SEQ ID NO: 22392 - protein, 246 aa, Neisseria meningitidis; identical to SEQ ID NO: 2993

SEQ ID NO: 22393 - protein, 299 aa, Neisseria meningitidis; identical to SEQ ID NO: 14164

SEQ ID NO: 22394 - protein, 413 aa, Neisseria meningitidis
MSKFFKRLFDIVASASGLIFLSPVFLILIYLIRKNLGSPVFFFQERPGKDGKPFKMVKFRSMRDALDSDGIPLPDGERLTPFGKKLRAASLDELPELWNILKGEMSLVGPRPLLMQYLPLYDNFQNRRHEMKPGITGWAQVNGRNALSWDEKFTCDVWYIDHFSLCLDIKILLLTVKKVLIKEGISAQGEATMPPFTGKRKLAVVGAGGHGKVVADLAAALGRYREIVFLDDRAQGSVNGFSVIGTTLLLENSLSPEQYDVAVAVGNNRIRRQIAEKAAALGFALPVLVHPDATVSPSATVGQGSVVMAKAVVQAGSVLKDGVIVNTAATVDHDCLLNAFVHISPGAHLSGNTHIGEESWIGTGACSRQQIRIGSRATIGAGAVVVRDVSDGMTVAGNPAKPLPRKNPETSTA

SEQ ID NO: 22395 - protein, 352 aa, Neisseria meningitidis; identical to SEQ ID NO: 6199

SEQ ID NO: 22396 - protein, 123 aa, Neisseria meningitidis; identical to SEQ ID NO: 6403

SEQ ID NO: 22397 - protein, 63 aa, Neisseria meningitidis; identical to SEQ ID NO: 980

SEQ ID NO: 22398 - protein, 161 aa, Neisseria meningitidis
MNDYTAMPSEDREVGALSLPPHSMEAEQSVLGGLMLENPAWDRIADVVSGEDFYRHEHRLIFRSIAKLINESRPADVITVQEDLQRNEELEAAGGFEYLITLAQNTPSAANIRRHAEIVRERSIMRQLAEVGTEIARSAIPKISAAERAVAWSTKNSSSFF

SEQ ID NO: 22399 - protein, 49 aa, Neisseria meningitidis; identical to SEQ ID NO: 5144

SEQ ID NO: 22400 - protein, 485 aa, Neisseria meningitidis; identical to SEQ ID NO: 6505

SEQ ID NO: 22401 - protein, 169 aa, Neisseria meningitidis; identical to SEQ ID NO: 219

SEQ ID NO: 22402 - protein, 389 aa, Neisseria meningitidis; identical to SEQ ID NO: 11490

SEQ ID NO: 22403 - protein, 351 aa, Neisseria meningitidis; identical to SEQ ID NO: 6589

SEQ ID NO: 22404 - protein, 193 aa, Neisseria meningitidis; identical to SEQ ID NO: 1600

SEQ ID NO: 22405 - protein, 644 aa, Neisseria meningitidis
MSLIECKNINRYFGSGENRVHILKDISLSIEKGDFVAIIGQSGSGKSTLMNILGCLDTAGSGSYRIDGIETAKMQPDELAALRRERFGFIFQRYNLLSSLTARDNVALPAVYMGAGGKERSARAEKLLQDLGLASKEGNKPGELSGGQQQRVSIARALMNGGEIIFADEPTGALDTASGKNVMEIIHKLHEAGHTVIMVTHDPGIAANANRVIEIRDGEIISDTSKNPEIPASNVGRIREKASWSFYYDQFVEAFRMSVQAVLAHKMRSLLTMLGIIIGIASVVSVVALGNGSQKKILEDISSIGTNTISIFPGRGFGDRRSGRIKTLTIDDAKIIAKQSYVASATPMTSSGGTLTYRNTDLTASLYGVGEQYFDVRGLKLETGRLFDENDVKEDAQVVVIDQNVKDKLFADSDPLGKTILFRKRPLTVIGVMKKDENAFGNSDVLMLWSPYTTVMHQITGESHTNSITVKIKDNANTQVAEKGLTDLLKARHGTEDFFMNNSDSIRQIVESTTGTMKLLISSIALISLVVGGIGVMNIMLVSVTERTKEIGIRMAIGARRGNILQQFLIEAVLICVIGGLVGVGLSAAVSLVFNHFVTDFPMDISAASVIGAVACSTGIGIAFGFMPANKAAKLNPIDALAQD

SEQ ID NO: 22406 - protein, 383 aa, Neisseria meningitidis
MSNRDQLFKAPPFENHSPLTWYQAASQLPNFIRDDAQAAAIEHLDRLWTELMMFKRKRNRFLGRSLRSPQVPKGLYFYGGVGRGKSFLMDAFFGCLPYRRKRRVHFHAFMAEIHQRLKTLKSESNPLKSVAAEIAKETRVLCFDEFHVSDIADAMILGRLLENLLNEGVVLVATSNYAPSELYPQGQNRSSFLPTIALIESSLTVLNVDGGEDYRLRTLRPAEIFFTPANEENEAKLAKLFKEMTGITDLNPGISTIHGREIPRKAESGRAIWFDFRALCFGPRSQSDYLYLAEHYEMVFISGLEQLSPQEKAEARRLTWLIDVLYDFRVKLCATGAVDVNHIYTEGDFAEEFTRTASRMVEMQSEVYLEQPHLTLSPKASGG

SEQ ID NO: 22407 - protein, 149 aa, Neisseria meningitidis; identical to SEQ ID NO: 2323

SEQ ID NO: 22408 - protein, 87 aa, Neisseria meningitidis; identical to SEQ ID NO: 205

SEQ ID NO: 22409 - protein, 96 aa, Neisseria meningitidis
LRIKKSFFGGQVVYLPRSIVDSTKMDALYVSAPFYFDDDFQVCYGEHYNIVFPLLVPLYKQEAELVEKKGWNAFEQFLLDNEVGNLSDMNRKPFTW

SEQ ID NO: 22410 - protein, 186 aa, Neisseria meningitidis; identical to SEQ ID NO: 16419

SEQ ID NO: 22411 - protein, 537 aa, Neisseria meningitidis
MFIILGRNFLKIILCFSFFVSKFALASVNAPGKFDRVEVYDDGRYLGIRGSDDKRRRIWKGLFDRESGRYLTSEAQDLKVRHVSTGASSTGKVSSVVSSSVSRAAVLSGVGKLVRQGAKFSTRAVPYVGTALLAHDVYETFKEDIQARGYQYDTETDKFVKGYEYSNCLWYEDERRINRTYGCYGVDSSIMRLMSDYSRFPEVKELMESRMERLARPYWEKLRNRPDMYYFKNYNFKRCYFGLNGGDCLVAKGDDGRTFISFSLQGNSKYKEEMDAKKLEEILSLKVDANPDKYIKATGYPGYSEKVEVAPGTKVNMGPVTDRNGNPVQVVATFGRDSQGNTTVDVQVIPRPDLTPGSAEAPNAQPLPEVSPAENPANNPNPNENPGTSPNPEPDPDLNPDANPDTDGQPGTRPDSPAVPGRTNGRDGKDGKDGGLLCKFFPDILACDRLPEPNPAEDLNLPSETVNVEFQKSGIFQDSAQCPAPVTFTVTVLDSSRQFAFSFENACTIAERLRYMLLALAWAVAAFFCIRTVSREV

SEQ ID NO: 22412 - protein, 286 aa, Neisseria meningitidis; identical to SEQ ID NO: 6265

SEQ ID NO: 22413 - protein, 356 aa, Neisseria meningitidis; identical to SEQ ID NO: 14018

SEQ ID NO: 22414 - protein, 421 aa, Neisseria meningitidis
MSEALAKETLNPFEIARKQVKTACDRLKTDPAVYEILKSPTRVLEVNFPVKLDDGTVKTFTGYRSQHNNAVGPYKGGVRFHPGVNLDEVKALSIWMTIKCCVAGIPYGGGKGGITLDPRDYSEAELERIARAYSEAISPLIGEKIDIPAPDVNTNGKIMSWMVDAYENVVKHSAPGVFTGKPVEFGGSLARTEATGYGVNLAAVQALEKLGKDVKGATYAIQGFGNVGYHTGYYAHQSGAKVVAVSTVDVAIYNENGLDMEALFKEFQEKGFITNEAGYGKEITNAELLALDVDVLAPCALENQLTSENAGKVRAKIVVEGANGPTTPEADVILRQNGVLVVPDILANCGGVVVSYFEWVQNLQGYYWEFDEVQEKETVVLRRAFRDIWNLAQEYDVDLRTASYMMSIRRVEKAMKLRGWY

SEQ ID NO: 22415 - protein, 269 aa, Neisseria meningitidis; identical to SEQ ID NO: 1709

SEQ ID NO: 22416 - protein, 117 aa, Neisseria meningitidis
MGIKNEQIIICKKYNTEIYPISDVSKIGVAENVKQANLYPINGLRHRPKGDTNGWYIWAGENFSYDKNFFLPLHTFHLQIWRPEIIPFLTLPPGYRFLIGENGYEDVWFDELLLNDN

SEQ ID NO: 22417 - protein, 347 aa, Neisseria meningitidis
MIPATYTLSQITARLGGEWRGEDISVTAVRPLADAQAEHISFLANPKYKAEVHDSSAGAVIVSAKAADGFEGRNLIVADDPYLYFAKVARLFSPVVKARGGIHPTAVVEPGATVPANCEIGANAYIGANTVLGEGCRILANAVVQHDCKLGDEVVLHPNAVVYYGCTLGRRVEIHSGAVIGADGFGLAFAGDSWFKIPQTGAVTLGDDVEIGSNTNIDRGAMSDTTVGNGTKIDNQVQIGHNCKIGSHTVIAAKTGISGSVTIGSYCIIGGGVGTVGHIEIADKTTIGGGTSVTHSITESGKHLAGIFPMSTHKEWARNAVYIHRLSEMNKRLKTLEQQLSDGKDTQ

SEQ ID NO: 22418 - protein, 380 aa, Neisseria meningitidis; identical to SEQ ID NO: 5057

SEQ ID NO: 22419 - protein, 212 aa, Neisseria meningitidis; identical to SEQ ID NO: 3536

SEQ ID NO: 22420 - protein, 151 aa, Neisseria meningitidis
MVDTVVKTPEFLPFTSVGIFRFGADITEYKNILETFMYEPPDEFRTEYYESPDSNLLIAVKKNKIISIFCYQELYFMGVNLIGLNFEDFKQLFHHPKSYGVDEYYLSNESYPTYVYEFDEIGVQAWEAKGKVVTIIAGGKDNYSTEPYYDE

SEQ ID NO: 22421 - protein, 298 aa, Neisseria meningitidis; identical to SEQ ID NO: 9176

SEQ ID NO: 22422 - protein, 154 aa, Neisseria meningitidis; identical to SEQ ID NO: 15052

SEQ ID NO: 22423 - protein, 413 aa, Neisseria meningitidis; identical to SEQ ID NO: 15377

SEQ ID NO: 22424 - protein, 243 aa, Neisseria meningitidis; identical to SEQ ID NO: 2896

SEQ ID NO: 22425 - protein, 209 aa, Neisseria meningitidis; identical to SEQ ID NO: 14480

SEQ ID NO: 22426 - protein, 330 aa, Neisseria meningitidis
MKKSLIALTLAALPIAAMADVTLYGTIKTGVETSRSVYYEDGKAAEVTTGTGIVDLGSKIGFKGQEDLGNGLKAIWQVEQKASIAGTDSGWGNRQSFIGLKGGFGKLRVGRLNSVLKDTGDINPWDSKSDYLGVNKIAEPEARLISVRYDSPEFAGLSGSVQYALNDNAGRHNSESYHAGFNYKNGGFFVQYGGAYKRHEQIDNVKIEKYQIHRLVSGYDNDALHASVAVQQQDAKLVEDNYSHNSQTEVAATLAYRFGNVTPRVSYAHGFKGSFDDADRYNTYDQVVVGAEYDFSKRTSALVSAGWLQEGEGESKFVSTAGGVGLRHKF

SEQ ID NO: 22427 - protein, 72 aa, Neisseria meningitidis; identical to SEQ ID NO: 332

SEQ ID NO: 22428 - protein, 262 aa, Neisseria meningitidis
MEDLYIILALGLVAMIAGFIDAIAGGGGLITLPALLLAGIPPVSAIATNKLQAAAATFSATVSFARKGLIDWKKGLPIAAASFAGGVVGALSVSLVSKDILLAVVPILLIFVALYFVFSPKLDGSKEGKARISFFLFGLTVAPLLGFYDGVFGPGVGSFFLIAFIVLLGCKLLNAMSYTKLANVACNLGSLSVFLLHGSIIFPIAATMAVGAFVGANLGARFAVRFGSKLIKPLLIVISISMAVKLLIDERNPLYQMIISMF

SEQ ID NO: 22429 - protein, 278 aa, Neisseria meningitidis
MIDLHCHSTVSDGMLSPAEVVRLAHQNGCTLLALTDHDHTGGIAEARAEADRLGLRLINGVEISVTWRGRTIHVVGLDFDEQDENLQNLLAQVRQGRLKRLEAIAAKLEKRGISGAYDGALALAANKEMVSRTHVAEFLIRVGHVKNKQQAFTKYLGDGKSCAVRHEWATLEDCVSAVNGAGGLAVIAHPMRYDLSATAKRNLFEEFKKLGGAGIEVHSGNCCKNDRLNYALLAERFGLLASAGSDFHRLNDFSGGILGACPELPENCKPVWTHFSRH

SEQ ID NO: 22430 - protein, 124 aa, Neisseria meningitidis
MIVLHGIPNCDTVKKAKNRLAGYGMEFEFRDFKKQRPSEAEICSWLEQVPLATLLNKRGTSWRKLDAETQQKVLSSTAEAVKLMSEMPSLIKRPVLECGGKVYAGFSEETYDGIFKRQAPCRQG

SEQ ID NO: 22431 - protein, 99 aa, Neisseria meningitidis
MGYRVGINCFDTRLQADDYLLSSLPPTVTQDGKIIRPERVGEKWILNGKPVTLSYPKCSNYEQVKSGAYLGSMVLILFVVIYGFRLLINFLKDIGKVGA

SEQ ID NO: 22432 - protein, 498 aa, Neisseria meningitidis
MFSNYLLSLAIWIPIAAGVLVLATGSDSRAPFARVLAFMGALAGFLVTLPLFTGFDRLSGGYQFTEFHEWIPLLKINYALGVDGISVLFIILNAFITLLVVLAGWEVIQKRPAQYMAAFLIMSGLINGAFAAQDAILFYVFFEGMLIPLYLIIGVWGGPRRVYASVKLFLYTLMGSLLMLVAMVYLYYQTGSFSIVDFQNIEQIPLGVQQLLFVAFFLSFAVKVPMFPVHTWLPDAHVEAPTGGSMVLAAITLKLGAYGFLRFILPIMPDAARYFAPVIIVLSLIAVIYIGMVALVQTDMKKLVAYSSISHMGFVTLGMFLFVDGQLDDWALKGAVIQMISHGFVSAAMFMCIGVMYDRLHTRNIADYGGVVNVMPKFAAFMMLFGMANAGLPATSGFVGEFMVIMGAVKVNFWVGALAAMTLIYGASYTLWMYKRVIYGAIHNPHVAEMKDINCREFAILAILAVVVLGMGLYPQAFIEVVHQAANDLIAHVAQSKI

SEQ ID NO: 22433 - protein, 245 aa, Neisseria meningitidis; identical to SEQ ID NO: 3123

SEQ ID NO: 22434 - protein, 477 aa, Neisseria meningitidis; identical to SEQ ID NO: 8039

SEQ ID NO: 22435 - protein, 131 aa, Neisseria meningitidis
MMYSFEANANAVKISETVSVDTGQGAKIHKFVPKNSKTYSSDLIKTVDLTHIPTGAKARINAKITASISRAGVLAGVGKLARLGAKFSTRAVPYVGTALLAHDVYETFKEDIQARGYQYDTETDKFAKVSG

SEQ ID NO: 22436 - protein, 258 aa, Neisseria meningitidis; identical to SEQ ID NO: 2774

SEQ ID NO: 22437 - protein, 321 aa, Neisseria meningitidis
MSYTQLTQGERYHIQYLSRHCTVTEIAKQLNRHKSTISREIRRHRTQGQQYSAEKAQRQSQTIKQRKRQPYKLDSQLIQHIDPLIRRKLSPEQVCAYLCKHHQITLHHSTIYRYLRQDKSNGSTLWQHLRICSKPYRKRYGSTWTRGKVPNRVGIENRPAIVDQKSRIGDWEADTIVGKGQKSALLTLVERVTRYTIICKLDSLKAEDTARAAVRTLKAHKDRVHTITMDNGKEFYQHTKITKALKAETYFCRPYHSWEKGLNENTNGLIRQYFPKQTDFRNISDREIRRVQDELNHRPRKTLGYETPSVLFLNLFQPLIH

SEQ ID NO: 22438 - protein, 118 aa, Neisseria meningitidis; identical to SEQ ID NO: 2492

SEQ ID NO: 22439 - protein, 233 aa, Neisseria meningitidis; identical to SEQ ID NO: 1822

SEQ ID NO: 22440 - protein, 205 aa, Neisseria meningitidis
  misc_feature 3, 4: 'Xaa' is any amino acid
VCXXYQIPKNKALQKLINLKNQLHQHQKQIKNRLHSTEEDFIRNIHQDLIDTIQDKMEQVKIAISEQIKKQTDNNHYRNLQTIPSIGKDTASVLYAQLTEKHFKTANQFVSYAGLSPAIIQSGTSVRGRGRLSRYGNRRLKSTLYMPALCAYRFNAFPKLINNLKKAGKPKMVIIVAIMRKLAKLAYYIVKTGQPYDAERHRLNQ

SEQ ID NO: 22441 - protein, 343 aa, Neisseria meningitidis; identical to SEQ ID NO: 12509

SEQ ID NO: 22442 - protein, 49 aa, Neisseria meningitidis
MLSYPKCSNFEQIKQGSYVGSTVLILFVVIYGFRLLINFLKDIGKVGTD

SEQ ID NO: 22443 - protein, 153 aa, Neisseria meningitidis; identical to SEQ ID NO: 14040

SEQ ID NO: 22444 - protein, 241 aa, Neisseria meningitidis; identical to SEQ ID NO: 19472

SEQ ID NO: 22445 - protein, 159 aa, Neisseria meningitidis
MPESIFKQISLDILKLHRDSVYSLLATSGCNCQVHEAAYVNIDGKYYIALSCEPEVGEVKTGILLIEDESRNLRLSWVGSARELDRKDSVYKRALSALSRKLGRCKDRLHTAVQPFLLELVPEKGRFSVGDEEVWISRNDLVRALYPVGYSMRQAVLQI

SEQ ID NO: 22446 - protein, 716 aa, Neisseria meningitidis; identical to SEQ ID NO: 16518

SEQ ID NO: 22447 - protein, 198 aa, Neisseria meningitidis
MRKQNTLTGIPTSDGQRGFALFIVLMVMIVVAFLVVTAAQSYNTEQRISANESDRKLALSLAEAALREGELQVLDLEYDTDSKVTFSENCAKGLCTAVNVRTNNTGNEEAFDNIVVQGNPTVEAVKRSCPANSTDLCIDKKGMKYKKGTRSVSKMPRYIIEYLGVKNGENVYRVTAKAWGKNANTVVVLQSYVSNNDE

SEQ ID NO: 22448 - protein, 399 aa, Neisseria meningitidis; identical to SEQ ID NO: 2328

SEQ ID NO: 22449 - protein, 619 aa, Neisseria meningitidis
MPEYRSKTSTHGRNMAGARALWRATGVMETDFGKPIIAVANSFTQFVPGHVHLHNMGQLVAREIEKAGAIAKEFNTIAIDDGIAMGHSGMLYSLPSRDLIADSIEYMVNAHCADALVCISNCDKITPGMLIAAMRLNIPTIFVSGGPMEAGKVIGVANIQPERRLDLIDAMIESADDNVSNRQVEEVEQNACPTCGSCSGMFTANSMNCLTEALGLSLPGNGSYLATHAGRKELFLEAGRMIVEITKRYYEQNDETVLPRSIATKKAFENAMTMDIAMGGSTNTILHLLAVANEAGVDFKMADIDRLSRVVPCICKTAPNNHDYYMEDVHRAGGIFAILKELDKAGKLHTDVHTIHAPTLKDAIEKWDVTNPENTRAIERFKAAPGGVRTTQAFSQNRMWKTLDLDREKGCIRDVAHAYSQDGGLAVLFGNIAERGCVVKTAGVDESILKFTGRARVFESQEDAVEGILGNQIVAGDIVIIRYEGPKGGPGMQEMLYPTSYLKSKGLGKACALLTDGRFSGGTSGLSIGHASPEAAEGGAIGLVHEGDTIEIDIPNRSIHLVISDEELAARRAEMEVRGSKAWKPENRDRYVSAALRAYGAMATSADKGAVRDVSQIER

SEQ ID NO: 22450 - protein, 151 aa, Neisseria meningitidis; identical to SEQ ID NO: 4206

SEQ ID NO: 22451 - protein, 461 aa, Neisseria meningitidis; identical to SEQ ID NO: 10228

SEQ ID NO: 22452 - protein, 404 aa, Neisseria meningitidis
MEWEFNSYYTLIAATLVLLVGKFLVQKIKFLRDFNIPEPVAGGLVAAIILFALHEAYGVSFKFEKPLQNAFMLIFFTSIGLSADFSRLKAGGLPLVVFTAIVGGFILVQNFVGVGLATALGLDPLIGLITGSVSLTGGHGTSGAWGPNFETQYGLVGATGLGIASATFGLVFGGLIGGPVARRLINKMGRKPVENTKQDQDDNADDVFEQAKRTRLITAESAVETLAMFAACLAFAEIMDGFDKEYLFDLPKFVWCLFGGVVIRNILTAAFKVNMFDRAIDVFGNASLSLFLAMALLNLKLWELTGLAGPVTVILAVQTVVMVLYATFVTYVFMGRDYDAAVLAAGHCGFGLGATPTAVANMQSVTHTFGASHKAFLIVPMVGAFFVDLINAAILTGFVNFFKG

SEQ ID NO: 22453 - protein, 810 aa, Neisseria meningitidis
MHIPFKPVLAAAAIAQAFPAFAADPAPQSAQTLNEITVTGTHKTQKLGEEKIRRKTLDKLLVNDEHDLVRYDPGISVVEGGRAGSNGFTIRGVDKDRVAINVDGLAQAESRSSEAFQELFGAYGNFNANRNTSEPENFSEVTITKGADSLKSGSGALGGAVNYQTKSASDYVSEDKPYHLGIKGGSVGKNSQKFSSITAAGRLFGLDALLVYTRRFGKETKNRSTEGDIEIKNDGYVYNPTDTGGPSKYLTYVATGVARSQPDPQEWVNKSTLFKLGYNFNDQNRIGWIFEDSRTDRFTNELSNLWTGTTTSAATGDYRHRQDVSYRRRSGVEYKNELEHGPWDSLKLRYDKQRIDMNTWTWDIPKNYDLRGINGEVYHSFRHIRQNTAQWTADFEKQLDFSKAVWAAQYGLGGGRGDNANSDYSYFAKLYAPKILASNQAKITMLIENRSKYKFAYWNNAFHLGGNDRFRLNAGIRYDKNSSSAKDDPKYTTAIRGQIPHLGSERAHAGFSYGTGFDWRFTKHLHLLAKYSTGFRAPTSDETWLLFPHPDFYLKANPNLKAEKAKNWELGLAGSGKAGNFKLSGFKTKYRDFIELTYMGVSSNDPKKPTYAPLSDGTELVSSPVWQNQNRTAAWVKGIEFNGTWNLDSIGLPKGLHTGLNVSYIKGKATQNNGKETPINALSPWTAVYSLGYDAPSKRWGINAYATRTAAKKPSDTVHSNDDLNNPWPYAKHSKAYTLFDLSAYLNIGKQVTLRAAAYNITNKQYYTWESLRSIREFGTVNRVDNKTHAGIQRFTSPGRSYNFTIEAKF

SEQ ID NO: 22454 - protein, 256 aa, Neisseria meningitidis
MTTTEHDNDDELLLRYSRHILLDEIGIEGQQKLSDAHILVVGCGGLGAAALPYLAASGVGTLTIADSDTVELHNLQRQVAFDEGDVGKPKAEALAGRLKRINHTVNVHTVNEKLDGCRLTGLVQTADIVLDCCDNYATRQAVNRACVQTKTPLVSGAAVRFEGQLAVYRPDLPDSPCYACLFDGGSASDGICSLFGVFSPLVGIIGCTQAAEALKILLDVGEPSHGRLAVYRALEGGWQYFDLPRNPECPICGTER

SEQ ID NO: 22455 - protein, 112 aa, Neisseria meningitidis; identical to SEQ ID NO: 3481

SEQ ID NO: 22456 - protein, 636 aa, Neisseria meningitidis; identical to SEQ ID NO: 7432

SEQ ID NO: 22457 - protein, 1305 aa, Neisseria meningitidis
MTYPIPKPREKSRWPNLSQGSLPLALARYLPHKRLKVVLTQDAEQALRLQTAWRFFRPHDTAVFLPDWETLPYERFSPHQDLVSERLSALWQIKSGAADVLFVPVATAMQKLPPVPFLAGRTFWLKTGQTLDIGRLKSDLVDAGYNHVSHVVAAGEFAVRGGIVDLFPMGSEMPYRIDLFDDEIDSIKTFDTETQRTISPVSEIRLLPAHEFPTDSEAQKIFRSRFREEVDGNPNDAAVYKAVSNGHFGAGVEYYLPLFFENELETLFDYIGEDALFVSLDDVHAEANRFWSDVKSRYAMAQGDETYPPLLPQYLYLSADVFAGRLKNYGQVLPDVSGKEYTLPDLAVNRQADEPLQALKDFQTAFDGRILLCAESLGRRETMLGFLQQNGLKAKPVSDWQGFLSAHEPLMITVAPLAYGFKLGGLQSPNQQQPTPSPVGEGWGEGKAVAAQTEFPASATNPLPSPLPQEREQSAAAVSDDLKTKSSLHPVANNLHGQIRQQPTPSPVGEGWGEGKAVAAQTEFSAAATNPLPSPLPQEREQSAAVVSDSLKAAAVSTESSLPPGKSNLHGQIQQQPAPSPVGEGWGEGKAVAAQSAIAVITESDLYQYVARSRIHNRRKKHAAVSDGLLRDLAEINIGDPVVHEEHGIGRYMGLVTMDLGGETNEMMLLEYAGEAQLYVPVSQLHLISRYSGQAHENIALHKLGSGAWNKAKRKAAEKARDTAAELLNLYAQRAAQSGHKFEINELDYQAFADGFGYEETEDQAAAIAAVIKDLTQAKPMDRLVCGDVGFGKTEVALRAAFVAVMGGKQVAVLAPTTLLVEQHAQNFADRFADFPVKVASLSRFNNSKATKAALEGMADGTVDIVIGTHKLVQDDIKFKNLGLVIIDEEHRFGVRQKEQLKRLRANVDILTMTATPIPRTLSMALEGLRDFSLITTAPSRRLAVKTFVKPFSEGSVREAVLRELKRGGQVFFLHNEVDTIENMRERLETLLPEARIGVAHGQLRERELEQVMRDFLQQRFNVLLCSTIIETGIDIPNANTIIINRADKFGLAQLHQLRGRVGRSHHQAYAYLLTPEYITKDAEKRLDAIAAADELGAGFTLAMQDLEIRGAGEILGEGQSGEMIQVGFTLYTEMLKQAVRDLKKGRQPDLDAPLGITTEIKLHSPALLPEDYCPDIHERLVLYKRLAVCETVQQINTIHEELVDRFGLPEQPVKTLIESHHLRLMAKELGIDAIDAAGEAVTVTFGKNNNVDPTEIILLIQNDKKYRLAGADKLRFTAEMENIEVRINTVKNVLKTLQNRCLPK

SEQ ID NO: 22458 - protein, 207 aa, Neisseria meningitidis; identical to SEQ ID NO: 1335

SEQ ID NO: 22459 - protein, 123 aa, Neisseria meningitidis; identical to SEQ ID NO: 1296

SEQ ID NO: 22460 - protein, 205 aa, Neisseria meningitidis
MVIAAIMAMIALPNMSQWIASRRIASHAERIANLLRFSRGEAVRLNLPVYICPVQVKKDGTANNKCDSGKKGQGMLAFGDKNGNKGYDNDTADVLLRSVVLNDDINDKRINYAFNHIAFGQTQPTADRVVWTFNQNGTFGYSTNQDLTNTSKFVYSDGYIQIVLTDARAVSDADKKFRSAVVLIDSSGRVEVCPRNDRRTVCQYK

SEQ ID NO: 22461 - protein, 242 aa, Neisseria meningitidis; identical to SEQ ID NO: 107

SEQ ID NO: 22462 - protein, 225 aa, Neisseria meningitidis; identical to SEQ ID NO: 1002

SEQ ID NO: 22463 - protein, 581 aa, Neisseria meningitidis; identical to SEQ ID NO: 2972

SEQ ID NO: 22464 - protein, 126 aa, Neisseria meningitidis; identical to SEQ ID NO: 6506

SEQ ID NO: 22465 - protein, 72 aa, Neisseria meningitidis; identical to SEQ ID NO: 1579

SEQ ID NO: 22466 - protein, 309 aa, Neisseria meningitidis
MIHVSAVQAPAHIQDTGRYGHRRYGIGHAGAMDTVALAAGNILLGNDEGTAAIEIALGGIMLVFERDTPFCLTGAVYQAELDGEPVYSYWRYTARKGQTLKLVRAVQGMYGYVCVAGGFDVPEVMGSRSTDLKAGFGGHQGRMLQKGDCLPIGKGAQELSKVGIAPIPFTDTVHLVPSSEYAAFSEKGRLNLERETWTLQSDSNRMGYRFDGQPLTLSQPLEMLSHAVQAGTVQVPPGGKPIILLADAQTTGGYPKIATVAAADLGRLAQVRFGSKVKFKIIGLKEATALRRKNQVYLNQIRRITHEAG

SEQ ID NO: 22467 - protein, 242 aa, Neisseria meningitidis; identical to SEQ ID NO: 15535

SEQ ID NO: 22468 - protein, 227 aa, Neisseria meningitidis; identical to SEQ ID NO: 15115

SEQ ID NO: 22469 - protein, 273 aa, Neisseria meningitidis
MSLQNIIETAFENRADITPTTVAPEVKEAVLETIRQLDSGKLRVAERLGVGEWKVNEWAKKAVLLSFRIQDNEVLNDGVNKYFDKVPTKFADWSEDEFKNAGFRAVPGAVARRGSFVAKNVVLMPSYVNIGAYVDEGAMVDTWATVGSCAQIGKNVHLSGGVGIGGVLEPLQASPTIIEDNCFIGARSEIVEGVIVEEGSVISMGVFIGQSTKIFDRTTGEIYQGRVPAGSVVVSGSMPSKDGSHSLYCAVIVKRVDAQTRAKTSVNELLRGI

SEQ ID NO: 22470 - protein, 272 aa, Neisseria meningitidis
MKGMDKLRYQQDFLNIRPIFTAGEQEYLTGLSDRLPLSVLTGSVRNIEEIGIDFVYSSAKLEGNTYNQYDTQALLKLGQTAGGKLYSDAVMLINLRESYRHLLSGLDSPEPFDWLDFLKTTHSLISENLLEKGSGGVVRRDSVTISGTDYTPLSNPQSLDTELKWLLQEAPKIGNPFDRAVYLHNNLAYLQYFKDCNKRTARNCMTLSLMRSGFFPCVFAPDSYPAYAEAVVAYYETGDYGLFKKYFISAYENTVNKYGPQPDVDIFRNFSL

SEQ ID NO: 22471 - protein, 76 aa, Neisseria meningitidis; identical to SEQ ID NO: 8288

SEQ ID NO: 22472 - protein, 409 aa, Neisseria meningitidis; identical to SEQ ID NO: 4088

SEQ ID NO: 22473 - protein, 161 aa, Neisseria meningitidis; identical to SEQ ID NO: 1442

SEQ ID NO: 22474 - protein, 226 aa, Neisseria meningitidis; identical to SEQ ID NO: 7580

SEQ ID NO: 22475 - protein, 218 aa, Neisseria meningitidis; identical to SEQ ID NO: 5912

SEQ ID NO: 22476 - protein, 371 aa, Neisseria meningitidis; identical to SEQ ID NO: 14955

SEQ ID NO: 22477 - protein, 417 aa, Neisseria meningitidis
VDKLKISANGPLNGEITVSGAKNAALPLMCAGLLTSGTLRLKNVPMLADVKTTQKLLQGMGARVLTDNISEFEINGGTVNNTCAPYELVRTMRASILVLGPTLARFGEAQVSLPGGCAIGSRPVDQHLKGLEAMGAEIVIEHGYVKAKGKLKGTRVAMDVVTVGGTENLLMAATLAEGTTVLENCAIEPEVVDLAECLVKMGAKISGIGTSTMIVEGVDELHGCEHSVVPDRIEAGTFLCAVAITGGRVVLRNAAPKTMEVVLDKLVEAGAVIEAGDDWIAIDMRQRPKAVDIRTVVHPGFPTDMQAQFMALNAVAEGSCRVVETIFENRFMHVPELNRMGANITTEGNTAFVQGVEQLSGAVVKATDLRASASLVIAGLAARGETVVEQIYHLDRGYEHIEKKLGSVGAKIERVSG

SEQ ID NO: 22478 - protein, 174 aa, Neisseria meningitidis
MKKALATLIALALPAAALAEGASGFYVQADAAHAKASSSLGSAKGFSPRISAGYRINDLRFAVDYTRYKNYKAPSTDFKLYSIGASAIYDFDTQSPVKPYLGARLSLNRASVDLGGSDSFSQTSTGLGVFAGVSYAVTPNVDLDAGYRYNYIGKVNTVKNVRSGELSVGVRVKF

SEQ ID NO: 22479 - protein, 160 aa, Neisseria meningitidis; identical to SEQ ID NO: 515

SEQ ID NO: 22480 - protein, 594 aa, Neisseria meningitidis
MSLVELKVPDIGGHENVDIIAVEVNVGDTIAVDDTLITLETDKATMDVPAEVAGVVKEVKVKVGDKISEGGLIVVVEAEGTAAAPKAEAAAAPAQEAPKAAAPSPQAAQFGGSADAEYDVVVLGGGPGGYSAAFAAADEGLKVAIVERYKTLGGVCLNVGCIPSKALLHNAAVIDEVRHLAANGIKYPEPELDIDMLRAYKDGVVSRLTGGLAGMAKSRKVDVIQGDGQFLDPHHLEVSLTAGDAYEQAAPTGEKKIVAFKNCIIAAGSRVTKLPFIPEDPRIIDSSGALALKEVPGKLLIIGGGIIGLEMGTVYSTLGSRLDVVEMMDGLMQGADRDLVKVWQKQNEYRFDNIMVNTKTVAVEPKEDGVYVTFEGANAPKEPQRYDAVLVAAGRAPNGKLISAEKAGVAVTDRGFIEVDKQMRTNVPHIYAIGDIVGQPMLAHKAVHEGHVAAENCAGHKAYFDARVIPGVAYTSPEVAWVGETELSAKASGRKITKANFPWAASGRAIANGCDNGFTKLIFDAETGRIIGGGIVGPNGGDMIGEVCLAIEMGCDAADIGKTIHPHPTLGESIGMAAEVALGTCTDLPPQKKK

SEQ ID NO: 22481 - protein, 265 aa, Neisseria meningitidis
MDTAQKQRWAITLSYDGSRFYGWQKQADGVPTVQAALENALAQIAGEAVSTIVAGRTDTGVHATAQVVHFDTTAARPQQAWIRGVNAHLPEGIAVLHARQVAPEFHARFDAYGRHYRYLLESAPVRSPLLKNRAGWTHLKLDIEPMRRAAAYLIGEQDFSSFRAAECQAKSPVKTIYRADLTQSAGLVRLDLHGNAFLHHMVRNIMGALVYVGSGRLSVEGFAALIQERSRLKAPPTFMPDGLYLTGVDYPEAYGIIRPQIPEWL

SEQ ID NO: 22482 - protein, 38 aa, Neisseria meningitidis; identical to SEQ ID NO: 6664

SEQ ID NO: 22483 - protein, 162 aa, Neisseria meningitidis; identical to SEQ ID NO: 7842

SEQ ID NO: 22484 - protein, 557 aa, Neisseria meningitidis
MLLTLSLRDFVIVENLNLDFQSGFTVLTGETGAGKSITLDAIGLLLGDKADYSQVRSGAKEAQLSALFDISHLPTLKAELYEQGLLNDGEEELSIRRIIDAKGKSRSFINNQAATLAQLKAVGSQLIDIHGQNAHHSLNQEAAQRELLDAFAGSRAQAETVRQLYQNWANSKKALQEAQEQAENIALEQERLEWQFNELNQLDIKQGEWEALSQSHDSLAHSAELLQAAEEVGSKIDGDNGIQRHIYQCQKLLANLQNIEPRFAESLNMLASIEAELGEISANMRDVAGRSDINPNELAAQEQRMGELMGMARKYRIEPEELPAKLAEIEERLQSLQAAADLDALEHNVAHNFAEYQEAAHILSAMRHQAAERLSGETTEHMQHLAMKGARFDIVLLPSSPTAHGLEQVQFQVAANKGNPPRPLNKVASGGELARISLALQVVASQYTQVPTLIFDEVDTGIGGGVAEMVGKALRSLGRKHQVLAVTHLPQVASCGENHWRVRKHSEGEQTVSEISILDKIQRVEEVARMLGGEVITDTTRQHAAELLQLASKNSLF

SEQ ID NO: 22485 - protein, 136 aa, Neisseria meningitidis; identical to SEQ ID NO: 17078

SEQ ID NO: 22486 - protein, 437 aa, Neisseria meningitidis; identical to SEQ ID NO: 1149

SEQ ID NO: 22487 - protein, 121 aa, Neisseria meningitidis; identical to SEQ ID NO: 14769

SEQ ID NO: 22488 - protein, 160 aa, Neisseria meningitidis; identical to SEQ ID NO: 1377

SEQ ID NO: 22489 - protein, 185 aa, Neisseria meningitidis; identical to SEQ ID NO: 19896

SEQ ID NO: 22490 - protein, 167 aa, Neisseria meningitidis; identical to SEQ ID NO: 15626

SEQ ID NO: 22491 - protein, 146 aa, Neisseria meningitidis
MNIRRPSPSDCAALAALDAVCNPSAWTQRQFESALVSPSEEVFLAEKDGGIAAFIVWQNLPDESELHLIATAPECRRQGIASALLEYWYAHLPEGTQRLLLEVRAGNAAAQALYTAHGFSIAGRRKNYYRATDGQTEDAVLMEKIC

SEQ ID NO: 22492 - protein, 153 aa, Neisseria meningitidis
VSGEQTLETAALMCEIPQTTARAWKRADKEKGDDWDKMRAAYTLADGGIEDLSRAMLAGFMVQYNSTMTMLQDSSTEDLPPSDRAKLLASLADAFTKTVSANARVMPETSKLATALELIEFLMAFVQEKHPKHLPAFVEVLEPFGVEVEKKFG

SEQ ID NO: 22493 - protein, 145 aa, Neisseria meningitidis
MDQTVYLYTDGACKGNPGAGGWGVLMRYGSHEKELFGGEAQTTNNRMELTAVIEGLKSLKRRCTVIICTDSQYVKNGMENWIHGWKRNGWKTASKQPVKNDDLWKELDALVGRHQVSWTWVKGHAGHAENERADDLANRGAAQFS

SEQ ID NO: 22494 - protein, 159 aa, Neisseria meningitidis; identical to SEQ ID NO: 3392

SEQ ID NO: 22495 - protein, 317 aa, Neisseria meningitidis
MHQYYDAVILSVGNGLLKRFFKQNAQLNIASRPLIITLFPGVVFGDQASILSRMGADIVLYNNKHDFRIAEEYKKQYKLSCQNILYGYPIFRHASKGRHGEKIYFIDQVKIPFKKEERIYTLKKLITLAEKYPEKEFTILLRVADKDITVHQDKHSYIELAKQFQLPSNLTIERKSTAQAFQEMGYCLSYSSTMLFEAECKGIPVGVVADLGFSKSYANQHFLGSGVLVYFDQIDFTSPKIADPDWLDCYATKKVITTDEFNKLLKQVVPLQHDYQEYLSAVNSIESTKTIFLRKFKKLIRDPKKFFYDSKWLRKVI

SEQ ID NO: 22496 - protein, 390 aa, Neisseria meningitidis
LITGTPGSGKTLKMVSMMANDEMFKPDENGIRRKVFTNIKGLKIPHTYIETDAKKLPKSTDEQLSAHDMYEWIKKPENIGSIVIVDEAQDVWPARSAGSKIPENVQWLNTHRHHGIDIFVLTQGPKLLDQNLRTLVKRHYHIAANKMGLRTLLEWKVCADDPVKMASSAFSSIYTLDKKVYDLYESAEIHTVNKVKRSKWFYALPVIILLIPLFVGLSYKMLSSYGKKQEEPAAQESAATEQQAVLPDKTEGEPVNNGNLTADMFVPTLTEKPESKPIYNGVRQVRTFEYIAGCVEGGRTGCTCYSHQGTALKEITKEMCKDYARNGLPFNPYKEESQGRDVQQSEQHHSDRPQVATLGGKPWQNLMYDNWQERGKPFEGIGGGVVGSAN

SEQ ID NO: 22497 - protein, 467 aa, Neisseria meningitidis; identical to SEQ ID NO: 8430

SEQ ID NO: 22498 - protein, 470 aa, Neisseria meningitidis; identical to SEQ ID NO: 14061

SEQ ID NO: 22499 - protein, 268 aa, Neisseria meningitidis; identical to SEQ ID NO: 6520

SEQ ID NO: 22500 - protein, 691 aa, Neisseria meningitidis
MLCVLAGAAYGVFRTEAALSSQWWAEAVSGVPLTVEVADMPRSDGRRVQFAAKAVDSGGRTFDLLLSDYKRREWAVGSRWRITARVHPVVGELNLRGLNREAWALSNGIGGAGTVGADRVLLHGGSGWGIAVWRSRISRNWQQADADGGLSDGIGLMRALSVGEQSALRPELWQAFRPLGLTHLVSISGLHVTMVAVMFAWLAKRLLACSPRLPARPRAWVLAAGCAGALFYALLAGFSVPTQRSVLMLAAFAWAWRRGRLSAWATWWQALAAVLLFDPSAVLGVGTWLSFGLVAALIWACSGRLHEGKRQTALRGQWAASVLSLVLLGYLFASLPLISPLVNAVAIPWFSWVLTPLALLGSVVPFAPLQQLGAFLAEYTLRFLVWLADVSPEFAVASAPLPLLVLAVCAALLLLLPRGLGLRPWAVLLLAGFVFYRSPGVPENEVAVTVWDAGQGLSVSVQTANHHLLFDTGTAAAAQMGIVPSLNAAGVRRLDKLVLSHHDSDHDGGFQAVGKIPNGGIYAGQPEFYEGARHCAEQRWQWDGVDFEFLMPSERKNIDDNGKSCVLRVVAGGAALLVTGDLDTKGEESLVGKYGGNLYSQVLVLGHHGSNTSSSGVFLNAVSPEYAVASSGYANAYKHPTEAVQNRVRAHGIKLLRTDLSGALQFGLGRGGVKAQRLRGYKFYWQKKPFE

SEQ ID NO: 22501 - protein, 384 aa, Neisseria meningitidis; identical to SEQ ID NO: 4652

SEQ ID NO: 22502 - protein, 318 aa, Neisseria meningitidis
MNTAAIYRQYQTYVRSDKSGWALDGCSDSALIAQAKQPGLHLEMCINRFDSGITLSRMRGGGTGAFPTEIHNFSHNCALFVMVSGQNRLQMGGREYRPSAGEIWLVRGELADVSETLLPDNSGMCALHLDFSLEKLRRWHDEGLLDERLFSPQTIGRFTLQRLAQNAAALTAAACPLLQRPFESDGFGLLADEAAALELSARLLRFTFRRHDNGYRRRRIDEAADILQHEFVRPLTIAEIARRVGLNECYLKRYFKAQTGETVAGCLRRLRLEHALALIESGSTVQAAMHFCGYRHAGRFNEAFRRHYGFLPSDVKKC

SEQ ID NO: 22503 - protein, 461 aa, Neisseria meningitidis; identical to SEQ ID NO: 3158

SEQ ID NO: 22504 - protein, 60 aa, Neisseria meningitidis; identical to SEQ ID NO: 3237

SEQ ID NO: 22505 - protein, 398 aa, Neisseria meningitidis; identical to SEQ ID NO: 3453

SEQ ID NO: 22506 - protein, 343 aa, Neisseria meningitidis; identical to SEQ ID NO: 614

SEQ ID NO: 22507 - protein, 237 aa, Neisseria meningitidis; identical to SEQ ID NO: 14709

SEQ ID NO: 22508 - protein, 303 aa, Neisseria meningitidis; identical to SEQ ID NO: 7319

SEQ ID NO: 22509 - protein, 166 aa, Neisseria meningitidis; identical to SEQ ID NO: 987

SEQ ID NO: 22510 - protein, 351 aa, Neisseria meningitidis; identical to SEQ ID NO: 15425

SEQ ID NO: 22511 - protein, 74 aa, Neisseria meningitidis; identical to SEQ ID NO: 5759

SEQ ID NO: 22512 - protein, 417 aa, Neisseria meningitidis; identical to SEQ ID NO: 9265

SEQ ID NO: 22513 - protein, 482 aa, Neisseria meningitidis
MKGDIGVIGLAVMGQNLILNMNDCGFKVVAYNRTIGKVDEFLNGAAKGTDIVGAYSLQDLVDKLAKPRKIMMMVRAGSVVDDFIEQLLPLLDEEDIIIDGGNANYPDTTRRTHYLAEKGILFVGAGVSGGEEGARHGPSIMPGGDKRAWEAVKPIFQAIAAKTPQGEPCCDWVGRDGAGHFVKMVHNGIEYGDMQLICEAYQFMKDGLGLSYDEMHRVFAAWNKTELDSYLIEITAAILGYKDEGGEPLVEKILDMAGQKGTGKWTGINALDLGIPLTLISEAVFARCVSSFKEQRVQTGKLFARTVTPVEGGKQEWVEALRQALLASKIISYAQGFMLIREAGESYGWDLDYGNTALLWREGCIIRSAFLGNIRDAYENNPDLVFLGVDPYFKNILENCLPAWRKVVAKAVECGIPMPCMASAITFLDGYTTERLPANLLQAQRDYFGAHTYERTDKPRGEFFHTNWTGKGGDTASTTYDI

SEQ ID NO: 22514 - protein, 213 aa, Neisseria meningitidis
MQKPETIHISGPAGILETIHIPSEQVPARGVAVINHPNPLQGGTNTNKVIQTAAKALSKLGFHCYLPNLRGVGGSGGTHDYGRGETQDCLAVIDYARAQHPEAPEFALSGFSFGGYVATFAAQARTPDLLLLIGAAVCHYTDRPEPSAVPNVAKTLMIHGAEDEVVEIEKALKWAEPQDLPVITIAGSTHFFHGKLIVLRDTILRFAPVCLNG

SEQ ID NO: 22515 - protein, 114 aa, Neisseria meningitidis
MYYQVGNKCLEKHQAENLYFSLVVPRIKENGQIVRPEYNGSLWKMSDGQPLRLLLAECSPKDNLQSGLETGWIVFGILASVYFVSLLKKFEMMDFYFYLGVSVPVLIGAVLFKN

SEQ ID NO: 22516 - protein, 321 aa, Neisseria meningitidis; identical to SEQ ID NO: 6649

SEQ ID NO: 22517 - protein, 427 aa, Neisseria meningitidis; identical to SEQ ID NO: 146

SEQ ID NO: 22518 - protein, 206 aa, Neisseria meningitidis; identical to SEQ ID NO: 1725

SEQ ID NO: 22519 - protein, 208 aa, Neisseria meningitidis; identical to SEQ ID NO: 17482

SEQ ID NO: 22520 - protein, 157 aa, Neisseria meningitidis; identical to SEQ ID NO: 5447

SEQ ID NO: 22521 - protein, 242 aa, Neisseria meningitidis; identical to SEQ ID NO: 5117

SEQ ID NO: 22522 - protein, 60 aa, Neisseria meningitidis; identical to SEQ ID NO: 15364

SEQ ID NO: 22523 - protein, 312 aa, Neisseria meningitidis; identical to SEQ ID NO: 8892

SEQ ID NO: 22524 - protein, 242 aa, Neisseria meningitidis; identical to SEQ ID NO: 14809

SEQ ID NO: 22525 - protein, 1007 aa, Neisseria meningitidis
MNAQNLPEVKWGDQYQSLTHKSNEREVIHTSGFGLAKKSISFSFNNTDEVVAEKKDTVVFGAATYLPPYGKVSGFDTAKLTERKNALDQIGTTKTGLVGYSYEGSTCSSGGCPTVAYRTQFTFGNSSLAKKTNGGGLDIYEDKSRDNSPIYKLKDHPWLGVSFNLGGESSFKPKRQGSLVSSFSEDVTQQNGAGSQHKDKNLVYTTDDYKSQNNKNHQDKHHAVAFYLNAKLHLLDKKHIKNIVQGKTVNLGILKTRIEPTEAWKRRNSNFFNGSWTYEEKGTVSVKLKLPEVKAGRCINANNPNKSTKAPSPALTAPALWFGPVQNGKVQMYSASVSTYPDSSSSQIFLQNLSRKDDTSKPGRYSLKPLSTSEIKSKEPNFTGRQTIIRLDSGVREIKLDRSNEATGLNGNDGKNETFGIVSEGSFMPDVSEWKKVLLPWTVRVFADDSKFKEFNKEEKDNKPKYSQKYRSRDNNNHNLGDIVNSPIVAVGEYLATSANDGMVHIFKKGNGGDERNYSLKLSYIPGTMPRKDIQNTESTLAKELRAFAEKSYVGDRYGVDGGFVLRKVERNGKDHVFMFGAMGFGGRGAYALDLSKIDSGNGNLADVSLFDVKHDKNGNNGVKLGYTVGTPQIGKTHDGKYAAFLASGYATKDITSGDNKTALYVYDLESSGTLIKKIEVPGGKGGLSSPTLVDKDLDGTVDIAYAGDRGGSMYRFDLSNQDPSQWSVRAIFEGTKPITSAPAISQLKDKRVVIFGTGSDLSEDDVLSTSEQYIYGIFDDDTVANNVNVKLSGLGGGLLEQELKQEDKTLFLTDYKRSDGSGSKGWVVKLKGGQRVTVKPTVVLRTAFVTIHKYTGTDKCGAETAILGINTADGGKLTKKSARPIVPAENQAVAQYSGHKKGINGKSIPIGCMQKGNEIVCPNGYVYDKPVNVRYLDEKKTDGFSTTADGDAGGSGIDPAGKRSGKNNRCFSQKGVRTLLMNDLDSLDITGPTCGMKRISWREVFY

SEQ ID NO: 22526 - protein, 628 aa, Neisseria meningitidis; identical to SEQ ID NO: 6456

SEQ ID NO: 22527 - protein, 92 aa, Neisseria meningitidis; identical to SEQ ID NO: 419

SEQ ID NO: 22528 - protein, 256 aa, Neisseria meningitidis; identical to SEQ ID NO: 6620

SEQ ID NO: 22529 - protein, 146 aa, Neisseria meningitidis; identical to SEQ ID NO: 2658

SEQ ID NO: 22530 - protein, 293 aa, Neisseria meningitidis; identical to SEQ ID NO: 7892

SEQ ID NO: 22531 - protein, 591 aa, Neisseria meningitidis
VAKTYLLTALIMSMTISGCQVIHANQGKVNTHSAVITGADAHTPEHATGLTEQKQVIASDFMVASANPLATQAGYDILKQGGSAADAMVAVQTTLSLVEPQSSGLGGGAFVLYWDNTAKTLTTFDGRETAPMRATPELFLDKDGQPLKFMEAVVGGRSVGTPAIPKLMETIHQRYGVLPWGKLFDTPIRLAKQGFEVSPRLAISVEQNQQHLARYPKTAAYFLPNGVPLQAGSLLKNLEFADSVQALAAQGAKALHTGKYAQNIVSVVQNAKDNPGQLSLQDLSDYQVVERPPVCVTYRIYEVCGMGAPSSGGIAVGQILGILNEFSPNQVGYDAEGLRLLGDASRLAFADRDVYLGDPDFVPVPIRQLISKDYLKHRSQLLEQSDKALPSVSAGDFIHEWVSSQAIELPSTSHISIVDKAGNVLSMTTSIENAFGSTLMANGYLLNNELTDFSFEPIKQGKQVANRVEPGKRPRSSMAPTIVFKAGKPYMAIGSPGGSRIIGYVAKTIVAHSDWNMDIQDAISAPNLLNRFGSYELETGTTALQWQQALNDLGYKTDVRELNSGVQAIIIEPSRLVGGADPRREGRVMGD

SEQ ID NO: 22532 - protein, 217 aa, Neisseria meningitidis
MKITHCKLKKKVQKELLRFFVLEVTARSAADILGIHPNSAVLFYRKIRTVINHHLALAADEVFEGPVEQDESDFGGRRKGRRGRGAAGKVVVFGILKRNGRVYTVVVDNAKSETLLPVIKKKIMPDSIVYTDSLSSCDKLDVSGFIYYRINHSKEFADRQNHINGIENFWNQAKRVLRKYNGIDRKSFPLFLKECEFRFNFGTPSQQLKILRDWCGI

SEQ ID NO: 22533 - protein, 262 aa, Neisseria meningitidis
MLTLYGETFPSRLLLGTAAYPTPEILKQSVRIAQPAMITVSLRRTGSGGEAHGQGFWSLLQETGVPVLPNTAGCQSVQEAVTTAQMAREVFETDWIKLELIGDDDTLQPDVFQLVEAAEILIKDGFKVLPYCTEDLIACRRLLDVGCQALMPWAAPIGTGLGAVHAYALNVLRERLPDTPLIIDAGLGLPSQAAQVMEWGFDGVLLNTAVSRSGDPVNMARAFALAVESGRLAFEAGPVEARTKAQASTPTVGQPFWHSAEY

SEQ ID NO: 22534 - protein, 57 aa, Neisseria meningitidis; identical to SEQ ID NO: 14761

SEQ ID NO: 22535 - protein, 515 aa, Neisseria meningitidis; identical to SEQ ID NO: 654

SEQ ID NO: 22536 - protein, 312 aa, Neisseria meningitidis; identical to SEQ ID NO: 6086

SEQ ID NO: 22537 - protein, 492 aa, Neisseria meningitidis; identical to SEQ ID NO: 8394

SEQ ID NO: 22538 - protein, 159 aa, Neisseria meningitidis; identical to SEQ ID NO: 6605

SEQ ID NO: 22539 - protein, 79 aa, Neisseria meningitidis; identical to SEQ ID NO: 1083

SEQ ID NO: 22540 - protein, 375 aa, Neisseria meningitidis; identical to SEQ ID NO: 10113

SEQ ID NO: 22541 - protein, 321 aa, Neisseria meningitidis; identical to SEQ ID NO: 17649

SEQ ID NO: 22542 - protein, 318 aa, Neisseria meningitidis; identical to SEQ ID NO: 562

SEQ ID NO: 22543 - protein, 90 aa, Neisseria meningitidis; identical to SEQ ID NO: 3546

SEQ ID NO: 22544 - protein, 205 aa, Neisseria meningitidis
MPYTEDMRPGDTANPYGASKAMVERMLTDIQKADPRWSVILLRYFNPIGAHESGLIGEQPNGIPNNLLPYICQVASGRLPQLSVFGGDYPTPDGTGMRDYIHVMDLAEGHIAAMKAKGGVAGVHLFNLGSGRAYSVLEIIRAFEAASGLNIPYQIQPRRAGDLACSFADPSHTKQQTGWETKRGLQQMMEDSWRWVSRNPNGYGD

SEQ ID NO: 22545 - protein, 215 aa, Neisseria meningitidis
MKTKFYNYQGEHLILYFAGWGTPPDAVNHLILPENHDLLICYDYQDLNLDFDFSAYRHIRLVAWSMGVWAAERALQGIRLKSATAVNGTGLPCDDNFGIPCAVFKGTLENLTENTRLKFERRMCGDKASFEDYQQFPARPFDEIHQELIALFAMIGQDRRADLIRWTNALVGSGDKIFMPANQHRYWTARCTVREIDGGHYLFSRFTHWSALWNH

SEQ ID NO: 22546 - protein, 612 aa, Neisseria meningitidis
MCGIVGAIRAHHNVVDFLTDGLKRLEYRGYDSSGIAVNTDGKIKRVRRVGRVQLMEDAAREKGISGGIGIGHTRWATHGGVTEPNAHPHISGGMIAVVHNGIIENFESERKRLEGLGYRFESQTDTEVIAHSINHEYAQNGGRLFEAVQEAVKRFHGAYAIAVIAQDKPDELVVARMGCPLLVALGDDETFIASDVSAVIAFTRRVAYLEDGDIALLASDGIKRLTDKNGLPAERKVKVSELSLASLELGPYSHFMQKEIHEQPRAIADTAEVFLDGGFIPENFGKNAKSVFESIRSVKILACGTSYYAALTAKYWLESIAKIPADVEIASEYRYRSVIADPDQLVITISQSGETLDTMEALKYAKSLGHRHSLSICNVMESALPRESSLVLYTRAGAEIGVASTKAFTTQLVALFGLAVTLAKVRGLVSEEDEARYTEELRQLPGSVQHALNLEPQIAAWAQQFAKKTSALFLGRGIHYPIALEGALKLKEITYIHAEAYPAGELKHGPLALVDENMPVVVIAPNDSLLDKVKANMQEVGARGGKLFVFADLDSNFNATEGVHVIRAPRHVGELSPVVHTIPVQLLSYHTALARGTDVDKPRNLAKSVTVE

SEQ ID NO: 22547 - protein, 827 aa, Neisseria meningitidis
  misc_feature 2, 3, 4: 'Xaa' is any amino acid
VXXXAPYANENSRILLSTTDISSENGKIKLQSYGDQFYYAGQGELYTFDKRSYKTGKWYKLKHVTEIKEHKNAKADPVSLSASQGIEIKSGGNIGAHATLFDAPRGSVKIEAGRGLVLYAVEDLNYDKLDTRTKRKFIGITYDKVHDTTTHTMKTALPSRVVAESANLQSGWDAKLQGTQFETTLGGAAIRAGVGDQARADAKIILEGIKSSVRTETVSSSKSALWQKQAGRGSNIETLQLPSFTGSVAPVLSAPGGYIVDIPKGNLKTEIEKLAKQPEYAYLKQLQTAKNVDWKQVQLVYDKWDYKAEGLTGAGAAIIALAVTVVTSGAGTGAVLGLNGAAAAATDAAFASLASQASVSFINNKGNIGNTLKELGRSSTVKNLVVAAATAGVADKIGASALNNVSDKQWINNLTVNLANAGSAALINTAVNGGSLKDNLEANILAALVNTAHGEAASKIKQLDQHYIVHKIAHAIAGCAAAAANKGKCQDGAIGAAVGEIVGEALVKNTDFSRMSATEIEKSKAKITAYSKLVAGTASAVVGGDVNTAANAAQIAVENNTLYPRCVGAKCDEFQKEQQKWIRENPEEYREVLLLQTGFIPIIGDIQSFVQAQTAADHLFALLGVVPGIGESIQAYKVAKAAKNLQGMKKALDKAATVATAQGYVSKTKIKIGQTELRVTAATDKQLLKAIGEGRDTTGKMTEQLFDSLAKQNGFRVLSGGKYGGNNGFDHVWQAADGSVVLIVESKQIRNGTVQLNPNGAGGYTQMSEDWIKQVANSLPDGSPAKAAVFKAEREGKLKTAIAGVDRQTGKAVILSVKVPSKTNIRR

SEQ ID NO: 22548 - protein, 205 aa, Neisseria meningitidis; identical to SEQ ID NO: 2396

SEQ ID NO: 22549 - protein, 41 aa, Neisseria meningitidis; identical to SEQ ID NO: 6310

SEQ ID NO: 22550 - protein, 176 aa, Neisseria meningitidis; identical to SEQ ID NO: 1829

SEQ ID NO: 22551 - protein, 179 aa, Neisseria meningitidis
MNIIDTAIPDVKLLEPQVFGDARGFFMETFRDEWFKTQVCERTFVQENHSKSGKGVLRGLHYQTENTQGKLVRVVVGEVFDVAVDMREGSPTFGKWAGATLSAQNQCQLWIPEGFAHGFYVLSDTAELTYKCTDYYKPEAEQVLIWNDPAIGIDWPLQGEPNLSPKDLAGKVLAEAVTF

SEQ ID NO: 22552 - protein, 423 aa, Neisseria meningitidis
MFQWLYDVLWLLAPIWIRRYLDKRSGSAPAYRAHRGERFGKPYPNPVTGAVWIHAVSVGETRAAQPLIRELRQRFPDAPLLMTQMTPTGRETAQVLFPDAQCRYLPYDKKTWVRQFLREHRPMFGILMETEIWPNLMKECRRAGVPLFLANARLSEKSLSGYLKVRRLIRPAAASLTGCLAQTEADAARLAKLGAASVQVCGNTKYDLMPSEQMKTLAGQFEKRIGGRPVAVCGSTRVYRGEDEAEKLLAAWQQYRGDALLVVVPRHPEHFQTVFETAKRFGFKVQRRSDGLPVEPDTQVWIGDSMGELYAYYLCADVAFVGGSLVDSGCQNIIEPLSCGVPTIFGFSTYNFSEACRHALASGAAVRVESADAWREAVEKTLSSEGGGMQMQAHVDGFIAQHRGAGARIAEAVREAVCGHRGR

SEQ ID NO: 22553 - protein, 175 aa, Neisseria meningitidis; identical to SEQ ID NO: 5

SEQ ID NO: 22554 - protein, 94 aa, Neisseria meningitidis; identical to SEQ ID NO: 973

SEQ ID NO: 22555 - protein, 260 aa, Neisseria meningitidis
MKTKLIKILTPFTVLPLLACGQTPVSNANAEPAVKAESAGKSVAASLKARLEKTYSAQDLKVLSVSETPVKGIYEVVVSGRQIIYTDAEGGYMFVGELINIDTRKNLTEERAADLNKIDFTSLPLDKAIKEVRGNGKLKVAVFSDPDCPFCKRLEHEFEKMTDVTVYSFMMPIAGLHPDAARKAQILWCQPDRAKAWTDWMRKGKFPVGGSICDNPVAETTSLGEQFGFNGTPTLVFPNGRSQSGYSPMPQLEEIIRKNQ

SEQ ID NO: 22556 - protein, 156 aa, Neisseria meningitidis; identical to SEQ ID NO: 681

SEQ ID NO: 22557 - protein, 196 aa, Neisseria meningitidis; identical to SEQ ID NO: 1629

SEQ ID NO: 22558 - protein, 135 aa, Neisseria meningitidis
MKKLLIAAMMAAALAACSQEAKQEVKEAVQAVESDVKDTAASAAESAASAVEEAKDQVKDAAADAKASAEEAVTEAKEAVTEAKEAVTEAKEAVTEAKEAVTEAKEAVTEAAKDTLNKAADATQEAADKMKDAAK

SEQ ID NO: 22559 - protein, 661 aa, Neisseria meningitidis; identical to SEQ ID NO: 1085

SEQ ID NO: 22560 - protein, 79 aa, Neisseria meningitidis; identical to SEQ ID NO: 831

SEQ ID NO: 22561 - protein, 318 aa, Neisseria meningitidis
MILTPPDTPFFLRNGNADTIAAKFLQRPAPTYRRELLPDSTGKTKVAYDFSDGISPDAPLVVLFHGLEGSSRSHYAVELMLAVRSRGWHGAVVHFRSCGGIANTAPVFYHLGDTAEIAFTLDTLAARYREIYAVGVSLGGNALAKYLGERSENALPQAAAAVSAPVDAEAAGRRFDSGITRLLYTRYFLRTLIPKARSLHGFQTAFAAGCKTLGEFDDRFTAPLHGFADRHDYYRQTSCKPLLKHVAKPLLLLNAVNDPFLPPEALPRADEVSEAVTLFQPAYGGHVGFVSSTGGRLHLQWLPQTVLSYFDSFRTNRR

SEQ ID NO: 22562 - protein, 316 aa, Neisseria meningitidis; identical to SEQ ID NO: 5301

SEQ ID NO: 22563 - protein, 60 aa, Neisseria meningitidis; identical to SEQ ID NO: 6474

SEQ ID NO: 22564 - protein, 257 aa, Neisseria meningitidis; identical to SEQ ID NO: 15638

SEQ ID NO: 22565 - protein, 228 aa, Neisseria meningitidis; identical to SEQ ID NO: 445

SEQ ID NO: 22566 - protein, 2502 aa, Neisseria meningitidis
VVAVAETTKREGKSCADSDSGSAHVKSVPFGTTHAPVCRSNIFSFSLLGFSLCLAVGTANIAFADGIIADKAAPKTQQATILQTGNGIPQVNIQTPTSAGVSVNQYAQFDVGNRGAILNNSRSNTQTQLGGWIQGNPWLARGEARVVVNQINSSHSSQMNGYIEVGGRRAEVVIANPAGIAVNGGGFINASRATLTTGQPQYQAGDLSGFKIRQGNVVIAGHGLDARDTDFTRILSYHSKIDAPVWGQDVRVVAGQNDVVATGNAHSPILNNAAANTSNNTANNGTHIPLFAIDTGKLGGMYANKITLISTAEQAGIRNQGQLFASSGNVAIDANGRLVNSGTMAAANAKDTDNTAEHKVNIRSQGVENSGTAVSQQGTQIHSQSIQNTGTLLSSGEILIHNSGSLKNETSGTIEAARLAIDTDTLNNQGKLSQTGSQKLHIDAQGKMDNRGRMGLQDTAPTASNGSSNQTGNSYNASFHSSTTTPTTATGTGTATVSISNITAPTFADGTIRTHGALDNSGSIIANGQTDVSAQQGLNNAGQIDIHQLNAKGSAFDNHNGTIISDAVHIQAGSLNNQNGNITTRQQLEIETDQLDNAHGKLLSAEIADLAVSGSLNNQNGEIATNQQLIIHDGQQSTAVIDNTNGTIQSGRDVAIQAKSLSNNGTLAADNKLDIALQDDFYVERNIVAGNELSLSTRGSLKNSHTLQAGKRIRIKANNLDNAAQGNIQSGGTTDIGTQHNLTNRGLIDGQQTKIQAGQMNNIGTGRIYGDNIAIAATRLDNQDENGTGAAIAARENLNLGIGQLNNRENSLIYSGNDMAVGGALDTNGQATGKAQRIHNAGATIEAAGKMRLGVEKLHNTNEHLKTQLVETGREHIVDHEAFGRHELLREGTQHELGWSVYNDESDHLRTPDGAAHENWHKYDYEKVTQKTQVTQTAPAKIISGNDLTIDGKEVFNTDSQIIAGGNLIVQTEKDGLHNEQTFGEKKVFSENGKLHSYWREKHKGRDSTGHSEQNYTLPEEITRNISLGSFAYESHRKALSHHAPSQGTELPQSNGISLPYTSNSFTPLPSSSLYIINPVNKGYLVETDPRFANYRQWLGSDYMLDSLKLDPNNLHKRLGDGYYEQRLINEQIAELTGHRRLDGYQNDEEQFKALMDNGATAARSMNLSVGIALSAEQVAQLTSDIVWLVQKEVKLPDGGTQTVLVPQVYVRVKNGDIDGKGALLSGSNTQINVSGSLKNSGTIAGRNALIINTDTLDNIGGRIHAQKSAVTATQDINNIGGMLSAEQTLLLNAGNNINSQSTTASSQNTQGSSTYLDRMAGIYITGKEKGVLAAQAGKDINIIAGQISNQSEQGQTRLQAGRDINLDTVQTGKHQATHFDADNHVIRGSTNEVGSSIQTKGDVTLLSGNNLNAKAAEVSSANGTLAVSAKNDINISAGINTTHVDDASKHTGRSGGGNKLIITDKAQSHNETAQSSTFDGRQVVLQAGNDANILGSNVISDNGTRIQAGNHVRIGTTQTQSQSETYHQTQKSGLMSAGIGFTIGSKTNTQENQSQSNEHTGSTVGSLKGDTTIVAGKHYEQIGSTVSSPEGNNIIHAQSIDIQAAHNKLNSNTTQTYEQKGLTVAFSSPVTDLAQQAIAVAQSSKQVGQSKNGRVNAMAAANAGWQAYQTGKSAQNLANGTTNAKQVSISITYGEQQNRQTTQVQASQAQASQIQAGGKTTLIATGAAEQSNINIAGSDIAGKAGTILIADNDITLQSAEQSNTERSQNKSTGWNAGAAVSFGQGGWSLGVTAGGNVGKGYGNGDSVTHRHSHIGDKGSQTLIQSGGDTTIKGAQVRGKGVQVNAKNLSIQSVQDRETYQSKQQNASAQVTVGYGFSASGDYSQSKIRADHASVTEQSGIYAGEDGYQIKVGNHTDLKGGIITSSQSAEDKGKNRFQTATLTTSDIQNYSQYQGKSFGLGASVAVSGKTLGQGAQNKPQNKHLTSVADKNGASSSVGYGSDSDSQSSITKSGINTRNIHITDEAGQIRLTGKTAAQTKADIDTNVTTDTAERHSGSLKNTFNKEAVQSELDLQREVTQEFDKTRQGVKQELYAVVDSKREQATKERLKNGGYDNDKSRALNKEANELDEKIRWLDAGLGLVWGAGSSDMAWSMFATTQADRAVRSATAPKEMWFHKKIIDEKTGKVSFDTRQIWSLNDLSKEELASIQDTNGKVITVSNPGIFNNREDSLSNAAKQNRNSTNGSGVIAVMNPPTGKYKSDSNNKIKDSLWLSSSLVSELMYVGYDQLNNKVFQGYLPKTNSEKLNQDIYREVQKMDNGWSVDTSNHSRGGITASVSLKDWVNNKEQNGIAPIRKARFYGTATNVKNDYADVLQKNGYTYTGADGKTYNSGAYSIVHDKDFVGNKWIPFLLGTNNTTQGACKGLCYSHSSYFAEVPEQYQRDENGNIKMENGKPVETENWEDYTKKWGIPKTGADGKYINHAIPKLVNPNNPNGEKYETNPF

SEQ ID NO: 22567 - protein, 312 aa, Neisseria meningitidis
MLELNGLCKRFGGKTVADNICLTVGRGKILAVLGRSGCGKSTLLNIIAGIVRPDGGEIWLNGENITRMPPEKRRISLMFQDYALFPHMSALENAAFGLKMQKMPKAEAERLAMAALAEVGLENEAHRKPEKLSGGEKQRLALARALVVRPSLLLLDESFSSLDTHLRGTLRRMTAERIRNGGIPAVLVTHSPEEACTTADEIAVMHKGRILQYGTPETLVKTPSCVQVARLMGLPNTDDNRHIPQHAVRFDQDGMECRVLSRTCLPESFSLSVLHPEHGILWLNLDMRHAGAVSGKDTVRIHIEEREIVRFR

SEQ ID NO: 22568 - protein, 484 aa, Neisseria meningitidis; identical to SEQ ID NO: 2793

SEQ ID NO: 22569 - protein, 404 aa, Neisseria meningitidis; identical to SEQ ID NO: 14773

SEQ ID NO: 22570 - protein, 253 aa, Neisseria meningitidis
MMGDSVIYYVEQADEPVNRAGERARKTFKYFWRELFWERRRIIPALDFAMVKVPFFQDGEDGEICEHMWIDDIYFDGLYIYGVLNNEPGELTNIEQGESICVPVDDISDWMFVCNGIPYGGFTIQAMRGQMTEEERTEHDAAWGIDFGDPGQVLLVYEEKEHPENLEEHPMCRNCIDDFRQQLSQNPDFLHEQDEDGYTPLHHEAIAGNALMVQAMLEYGANPASKTSEGYTALDFARLTGWQNVADLLEPRH

SEQ ID NO: 22571 - protein, 154 aa, Neisseria meningitidis; identical to SEQ ID NO: 1226

SEQ ID NO: 22572 - protein, 344 aa, Neisseria meningitidis; identical to SEQ ID NO: 6064

SEQ ID NO: 22573 - protein, 704 aa, Neisseria meningitidis
MFLFSDGLQSINNNNRRKRIVKNAYIPSRGIRKIPHLSTLLPEFHIYKDGKGAEAVVGWGLRPTTHKARAFATEHQLPFIALEDGFLRSLGLGVSGYPPYSIVYDDIGIYYDTTRPSRLEQLILAADTMPSETLAQAQQTMDFILQHHLSKYNHAPELSDDHPLRSPSKPETVLIIDQTFGDMAIQYGGADASTFELMFQTALNENPQADIWVKTHPDVLCGKKQGYLTQLAQQHRVHLLAEDINPISLLQNVDKVYCVTSQMGFEALLCGKPLTTFGLPWYAGWGVSDDRHPEINRLVQTQRRATRNLLQLFAAAYLQYSRYLNPNTGEAGSLFDVIDYLATVKRKNDKLRGELYCVGMSLWKRAVAKPFFNVPSCRLKFISSTQKLARVKLSDDARILAWGNGKEAIVRFAEQHHIPLLRMEDGFIRSVGLGSNLVPPLSLVTDDMGIYFNAEAPSRLEHILQNQNFDDQDFQTALKLQKMLTENHISKYNVGNSDFTAPSTDKTVILVPGQVEDDASIRYGSPQIYHNLDLLRTVRERNPNAYIIYKPHPDVVSGNRIGHISPEDAARYADQTAEQADILTCLQYADEIHTMTSLTGFEALLRGKKVSCYGLPFYAGWGLTQDLLPIPRRSRRLELWQLIAGTLIHYPDYIHPETHQAINAETAAQILIRQKNMQKNNNGLHRGYFAKKLGKIKQLYRSFK

SEQ ID NO: 22574 - protein, 431 aa, Neisseria meningitidis
MAQKIQSVKGMNDLLPVEQKDFKLTAAFWQAFEDTVGRWTRAYGYRQIRTPIVEQTGLFVRSIGEETDVVGKEMYTFSDSNDSLSLSLRPEGTASCLRAVVEHNLLYNSPQKLWYMGPMFRRERPQKGRYRQFHQVGIEALGFEGADIDAEIVAMSADLWEKLGIREYLTLEINSLGNREERAAHRAALVEYLTRYEDKLDEDSKRRLKTNPLRVLDTKNPDLQEICNAAPRLVDYLGEASQNHYARFKAMLDGLGIQYVENPRLVRGLDYYNQTVFEWTTDKLGAQATVCGGGRYDGLIEELGGKPAPSIGFAMGIERLLLLVSEYGSLEVNAAPDVYAMHQGEGADLQVMKYAQALRAQGFNVMQHSGYQSLKAQMKKADNSGARFALIVAQDELANGTVTLKDMNGAHGQQTVAAEDLTHTLQQWKNA

SEQ ID NO: 22575 - protein, 404 aa, Neisseria meningitidis
MSEVEYFSHFISDGKGKLLEIPQRRGKQDGVFVDWISFTFHEDTLLKVSGCPLFSDAEYMYVLSRKLEEILGFGITRKCKSRGNKFYESMYRLGSDDVDYGEVHFGGQRNTVLVELKGTGCSVASPGWELRLKQFLDDSIRTRITRIDLALDFFDGEYTPDQALLDHDNGFFDNSNQRPKSETIGTAWRNEDGSGKTFYVGRKKNSRFVRVYEKGRQLGDKESKWVRFEIQFNYGDIEIPLDILINQGSYFCGAFPICRKFKNMPVPERFDQRKKKLNLTFEHKLHYAKNAVGKLVNFMIEMGFDNSEIVESLKADSGFPKGLEPEKYALEMLRDGLKHGFIHEQPDIDLEIELDELGVIAFKNSDKFDREKRLFSPDYDVEKERKYQEYLSKVYHQNVDYDYF

SEQ ID NO: 22576 - protein, 178 aa, Neisseria meningitidis; identical to SEQ ID NO: 1831

SEQ ID NO: 22577 - protein, 123 aa, Neisseria meningitidis; identical to SEQ ID NO: 2701

SEQ ID NO: 22578 - protein, 290 aa, Neisseria meningitidis; identical to SEQ ID NO: 18034

SEQ ID NO: 22579 - protein, 71 aa, Neisseria meningitidis
MKEYKVVIYQESLLSSLFFGAAKVNPVNFSAFLNKQTPEGWRVVTMEKDLRRMLLFFKREAYVVILERDRV

SEQ ID NO: 22580 - protein, 221 aa, Neisseria meningitidis
MTFTAVLFDLDGVITDTAEYHYRAWKKLAEELGIGIDRKFNEQLKGVSRDDSLKRILAHGGKTVGEAEFAELTRYKNDNYVEMIQAVKPEDVYPGILPLLEALKANGKKIALASASKNGPFLLERMGLTDFFDAIADPAAVAHSKPAPDIFLAAAEGVGADIRRCIGIEDAAAGVAAIKAAGALPIGVGKAEDLGSDIALVSGIAELTYAYLQNVWAQSGR

SEQ ID NO: 22581 - protein, 107 aa, Neisseria meningitidis; identical to SEQ ID NO: 17571

SEQ ID NO: 22582 - protein, 87 aa, Neisseria meningitidis; identical to SEQ ID NO: 1364

SEQ ID NO: 22583 - protein, 107 aa, Neisseria meningitidis; identical to SEQ ID NO: 15201

SEQ ID NO: 22584 - protein, 113 aa, Neisseria meningitidis; identical to SEQ ID NO: 3580

SEQ ID NO: 22585 - protein, 539 aa, Neisseria meningitidis; identical to SEQ ID NO: 15657

SEQ ID NO: 22586 - protein, 89 aa, Neisseria meningitidis; identical to SEQ ID NO: 6952

SEQ ID NO: 22587 - protein, 201 aa, Neisseria meningitidis; identical to SEQ ID NO: 14993

SEQ ID NO: 22588 - protein, 389 aa, Neisseria meningitidis
MSKKLHPQTLAIRGGKEQTGYREHNQALFLTSSFMWDNAQHAADLFSKKIKGFTYTRTANPTTAAFEKRIAALEGAERAVATSTGMSAIQAAFFTFLQAGDHVVSSRSLFGTTVGFINNIVTKFGIEVSHVSPTDINEWKAAVKANTKLLFLETPSNPLGEVADLEALAELAHGIGAILVVDNSLLSPVGSQPLKHGADISVSSATKAIDGHGRVMGGVLAGSEELMAQVAMYCNSCGLAMSPFNAWQLLSGVETLSLRMEKQFDNALKIAQWLQAQPQVQAVYYTGLPDHPQAALIRKQQNGGGIVIGFEVADQAAAWKVVDGVELFSRTANLGDVRSTITHPWTTTHGRMQPEEKLAANIRPGLVRLSVGLEYVGDLIDDLKQALAR

SEQ ID NO: 22589 - protein, 99 aa, Neisseria meningitidis; identical to SEQ ID NO: 1110

SEQ ID NO: 22590 - protein, 192 aa, Neisseria meningitidis
MSNTIKMVVGLGNPGKEYEQTRHNAGFWFLDELAWKWKASFKEEKKFFGEVARATLPDGDVWLLKPTTFMNRSGQAVAALAQFYKIKPEEILVVHDELDIPCGRIKFKLGGGNGGHNGLKDIQAKLGTADYYRLRLGIGHPGDRNLVVGYVLNKPSTEHRRQIDDAVAKSLQAIPDILADKCEEATRFLHSK

SEQ ID NO: 22591 - protein, 63 aa, Neisseria meningitidis
LQRSRALIAAKIDQAEISDSEKSWLKKELGKIKDTALSTLTENAINAIPAATLITLLKKFVGL

SEQ ID NO: 22592 - protein, 559 aa, Neisseria meningitidis
MENFAQLLEESFTLQEMNPGEVITAEVVAIDQNFVTVNAGLKSESLIDVAEFKNAQGEIEVKVGDFVTVTIESVENGFGETKLSREKAKRAADWIALEEAMENGNILSGIINGKVKGGLTVMISSIRAFLPGSLVDVRPVKDTSHFEGKEIEFKVIKLDKKRNNVVVSRRAVLEATLGEERKALLENLQEGSVIKGIVKNITDYGAFVDLGGIDGLLHITDLAWRRVKHPSEVLEVGQEVEAKVLKFDQDKQRVSLGMKQLGEDPWSGLTRRYPQGTRLFGKVSNLTDYGAFVEIEQGIEGLVHVSEMDWTNKNVHPSKVVQLGDEVEVMILEIDESRRRISLGMKQCQANPWEEFAANHNKGDKISGAVKSITDFGVFVGLPGGIDGLVHLSDLSWTESGEEAVRKYKKGEEVEAVVLAIDVEKERISLGIKQLEGDPFGNFISVNDKGSLVKGSVKSVDAKGAVIALSDEVEGYLPASEFAADRVEDLTTKLKEGDEVEAVIVTVDRKNRSIKLSVKAKDAKESREALNSVNAAANANAGTTSLGDLLKAKLSGEQE

SEQ ID NO: 22593 - protein, 499 aa, Neisseria meningitidis; identical to SEQ ID NO: 4892

SEQ ID NO: 22594 - protein, 165 aa, Neisseria meningitidis; identical to SEQ ID NO: 14112

SEQ ID NO: 22595 - protein, 214 aa, Neisseria meningitidis
MKLKHLLPLLLSAVLSAQAYALTEREDYLVLDKPIPQEQSGKIEVLEFFGYFCVHCHHFDPLLLKLGKALPSDAYLRTEHVVWQPEMLGLARMAAAVNLSGLKYQANPAVFKAVYEQKIRLENRAVAGKWALSQKGFDGKKLMRAYDSPEAAAAALKMQKLTEQYRIDSTPTVIVGGKYRVIFNNGFDGGVHTIKELVAKVREERKRQTPAVQK

SEQ ID NO: 22596 - protein, 72 aa, Neisseria meningitidis; identical to SEQ ID NO: 7342

SEQ ID NO: 22597 - protein, 463 aa, Neisseria meningitidis; identical to SEQ ID NO: 14079

SEQ ID NO: 22598 - protein, 720 aa, Neisseria meningitidis; identical to SEQ ID NO: 16412

SEQ ID NO: 22599 - protein, 158 aa, Neisseria meningitidis; identical to SEQ ID NO: 6684

SEQ ID NO: 22600 - protein, 331 aa, Neisseria meningitidis; identical to SEQ ID NO: 6104

SEQ ID NO: 22601 - protein, 321 aa, Neisseria meningitidis; identical to SEQ ID NO: 6149

SEQ ID NO: 22602 - protein, 163 aa, Neisseria meningitidis; identical to SEQ ID NO: 14584

SEQ ID NO: 22603 - protein, 113 aa, Neisseria meningitidis; identical to SEQ ID NO: 6827

SEQ ID NO: 22604 - protein, 122 aa, Neisseria meningitidis; identical to SEQ ID NO: 15340

SEQ ID NO: 22605 - protein, 279 aa, Neisseria meningitidis; identical to SEQ ID NO: 19598

SEQ ID NO: 22606 - protein, 709 aa, Neisseria meningitidis
MAYQVLARKWRPKTFSDLVGQEHVVKALQNALDEGRLHHAYLLTGTRGVGKTTIARILAKSLNCENAQHGEPCGVCESCTQIDAGRYVDLLEIDAASNTGIDNIREVLENAQYAPTAGKYKVYIIDEVHMLSKSAFNAMLKTLEEPPEHVKFILATTDPHKVPVTVLSRCLQFVLRNMTAQQVADHLAHVLDSEKIAYAPPALQLLGRAAAGSMRDALSLLDQAIAMGSGSVAEQDVRQMIGAVDKQYLYELLTGIVNQDGEALLAKAQEMAACAVGFDNALGELAILLQHLALIQAVPNALAHDDPDSDILHRLAQTISGEQIQLYYQIAVHGKRDLSLAPDEYAGFMMTLLRMLAFAPLAAASCDANAVIENTELKSPSAQTAEKETSAKKPQPRPETETAQTPVQTASAAAMPSEGKTAEPVSNQENNDVPPWEDAPDEAQAAAGTAQTSAKSIQTASEAETPPENQVSKNKAADNETNAPLSEVPSENPIQTTPNNEALETEAFAHEAPAKPFNGYSFPDDDCPVEDNAEIPPPDWEHAAPADTAGGGADEEAEADGIGGNNTPSAPPPEFSTENWAAIVRHFARKLGAAQMPAQHSAWTEYHPDTGLMVLAMTAEARATADKKRLDKIRDTLAQAYGLQLTLQTQDWQDESGRETPAMQDKRVQAEDRQKAQALLEADPAAQKILQAFGAQWQPESLELAANRP

SEQ ID NO: 22607 - protein, 242 aa, Neisseria meningitidis; identical to SEQ ID NO: 1952

SEQ ID NO: 22608 - protein, 425 aa, Neisseria meningitidis
MFERSVIAMACIFALSACGGGGGGSPDVKSADTLSKPAAPVVAEKETEVKEDAPQAGSQGQGAPSTQGSQDMAAVSAENTGNGGAATTDKPKNEDEGPQNDMLQNSAESANQTGNNQPADSSDSAPASNPAPANGGSNFGRVDLANGVLIDGPSQNITLTHCKGDSCDGDNLLDEEAPSKSEFDNLSESERMEKYKKDGKSDKFTGFVADKLQMKGTNQYIIFYKPKTTSSARFRRSARLRRSLPAEMPLIPVNQADTLIVDGEAVSLTGHSGNIFAPEGNYRYLTYGAEKLSGGSYALSVQGEPAKGEMLAGTAVYNGEVLHFHTENGRPYPSRGRFAAKVDFGSKSVDGIIDSGDDLHMGTQKFKAAIDGNGFKGTWTENGGGDVSGRFYGPAGEEVAGKYSYRPTDAEKGGFGVFAGKKEQD

SEQ ID NO: 22609 - protein, 210 aa, Neisseria meningitidis; identical to SEQ ID NO: 6015

SEQ ID NO: 22610 - protein, 76 aa, Neisseria meningitidis; identical to SEQ ID NO: 8288

SEQ ID NO: 22611 - protein, 288 aa, Neisseria meningitidis; identical to SEQ ID NO: 3535

SEQ ID NO: 22612 - protein, 230 aa, Neisseria meningitidis
MTAFVHTLSDGMELTVEIKRRAKKNLIIRPAGTHTVRISVPPCFSVSALNRWLYENEAVLRQTLAKTPPPQTAENRLPESILFHGRQLALTAHQDTQILLMPSEIRVPEGAPEKQLALLRDFLERQAHSYLIPRLERHARTTQLFPAPSSLTSAKTFWGVCRKTTGIRLNRRLVGAPEYVADYVCIHELCHLAHADHSRAFWALTRRFAPYTPEAKQWLKIHGRELFALG

SEQ ID NO: 22613 - protein, 667 aa, Neisseria meningitidis
LVSVLGFHGFYTDLRHLRARFSLSLKGATLADLVRFANSMNLTARAVRLDLDELANLRVPCILHWDLNHFVVLHEVHRNHIMIMNPASGWQKVRMEEVSRCFTGVALELFPNTQFEEKHETRKIRVLPMLRGVVGLKRSLFQLLLLAAVLQVFALASPFFMQWVIDHAIVSADRDLLMTLALCFGLLMIVRQLVSLLQTWAGMYLSTSLNIQWKANVLRRLMDLPVSYFAKRHLGDVVSRFGSVDSIQSTLTSTFFVLVLNSIMAVFTLGLMYLYSPSLTTVVLVVLLIYIGIRWVAYYPLRHATQENIVHAAKQSSYFMETIRGIQTVKLFDKNAQRHAAWLNLFIDTINTGLMTQKLSALFGFTNGLLFGIANILIVYFGAVSVLNGGFTVGALMAFMSYKSQFESKAGSLIDQFVQIKMLGLHAERLADIVLEETENEQNNDFSLPKNLEHFDIQIENVSFSYAENEPYILQNFSLIIKQGTAIAFAGHSGCGKSTLIQILTGSLKPESGHVLLGGHDIHALPPAFIRTWSASVMQNDVLFTGSIAENISFFDDTPNMEKIAFCAQMANIHHEIVAMPMAYETLIGDMGSALSGGQKQRIVLARALYREPKILFLDEASSHLDINNERVINDNLRQLNITKIMVAHRQETLNTADSVVYLDKVA

SEQ ID NO: 22614 - protein, 47 aa, Neisseria meningitidis
LDDAANIIHTVTPPIFIGVSLIIYFKKVIYYHIIREQVVKKKPLKFH

SEQ ID NO: 22615 - protein, 188 aa, Neisseria meningitidis; identical to SEQ ID NO: 9104

SEQ ID NO: 22616 - protein, 120 aa, Neisseria meningitidis; identical to SEQ ID NO: 7043

SEQ ID NO: 22617 - protein, 397 aa, Neisseria meningitidis; identical to SEQ ID NO: 14453

SEQ ID NO: 22618 - protein, 171 aa, Neisseria meningitidis; identical to SEQ ID NO: 6461

SEQ ID NO: 22619 - protein, 81 aa, Neisseria meningitidis; identical to SEQ ID NO: 1361

SEQ ID NO: 22620 - protein, 414 aa, Neisseria meningitidis; identical to SEQ ID NO: 7206

SEQ ID NO: 22621 - protein, 187 aa, Neisseria meningitidis
MPWNLPIFLTWLRVLLIPVMTALFYLPFPWFAEETINLTAAVIFAVAALTDWFDGFLARLWKQTSDFGAFLDPVADKLMVAVSLLLLVKLDRTYVLFAMIIIGREITISALREWMAQMGKRNSVAVATVGKFKTAAQMLAIFLLLLNIPDFYGFNLVVIGNILMFIASLLTVWSMLYYLKMAWKEIA

SEQ ID NO: 22622 - protein, 188 aa, Neisseria meningitidis; identical to SEQ ID NO: 7225

SEQ ID NO: 22623 - protein, 208 aa, Neisseria meningitidis; identical to SEQ ID NO: 4867

SEQ ID NO: 22624 - protein, 553 aa, Neisseria meningitidis; identical to SEQ ID NO: 6712

SEQ ID NO: 22625 - protein, 453 aa, Neisseria meningitidis
MGNVEVPSEAYWGAQTQRSRNNFKIGGETLPQPLIYALALVKKAAAATNVSLGRIKPEQADLITQAADDVLNGRLDGQFPLVVWQTGSGTQSNMNMNEVLANRANEIAGTGLAAYQPVHPNDHVNHAQSTNDAFPTAIHVAAAIEINRHLIPAVKALRDTLDKKAQAFAPIVKIGRTHLQDATPLTLGQEFSGYVSQLDHGLGRLNDALKDLYELALGGTAVGTGLNSHPEYAEKAAAKLAELSGLPFVSAPNKFEALGGRDAAVAASGALKTLAASLNKIANDIRWLASGPRCGLGEIKIPENEPGSSIMPGKVNPTQCEAMTMVCCQVFGNDVTIGMAGASGNFELNVYMPVIAYNLLQSIRLLGDACNSFNEHCAVGIEPVPEKIDYFLHHSLMLVTALNRKIGYENAAKVAKTAYKNNKSLRETAVELGLLTGEEFDELVVPADMVHPR

SEQ ID NO: 22626 - protein, 151 aa, Neisseria meningitidis; identical to SEQ ID NO: 658

SEQ ID NO: 22627 - protein, 94 aa, Neisseria meningitidis; identical to SEQ ID NO: 973

SEQ ID NO: 22628 - protein, 220 aa, Neisseria meningitidis; identical to SEQ ID NO: 1320

SEQ ID NO: 22629 - protein, 125 aa, Neisseria meningitidis; identical to SEQ ID NO: 592

SEQ ID NO: 22630 - protein, 81 aa, Neisseria meningitidis; identical to SEQ ID NO: 17799

SEQ ID NO: 22631 - protein, 129 aa, Neisseria meningitidis
MSKTIIHTDKAPAAIGAYSQAVRAGDTVYMSGQIPLDPATMTVVGNGDFRAEARQVFKNLQAVAEAAGGSLADIVKLNAYLTDLANFAVFNEVMAEFIAEPFPARAAVGVASLPKGVQVEAEAVLVLNA

SEQ ID NO: 22632 - protein, 418 aa, Neisseria meningitidis; identical to SEQ ID NO: 7682

SEQ ID NO: 22633 - protein, 263 aa, Neisseria meningitidis; identical to SEQ ID NO: 15554

SEQ ID NO: 22634 - protein, 262 aa, Neisseria meningitidis; identical to SEQ ID NO: 7699

SEQ ID NO: 22635 - protein, 390 aa, Neisseria meningitidis; identical to SEQ ID NO: 22496

SEQ ID NO: 22636 - protein, 259 aa, Neisseria meningitidis; identical to SEQ ID NO: 14311

SEQ ID NO: 22637 - protein, 123 aa, Neisseria meningitidis; identical to SEQ ID NO: 15049

SEQ ID NO: 22638 - protein, 318 aa, Neisseria meningitidis
MNIIGLDISKDTIDATLHKTNGSIHYIKFKNNDDGLKQFRLWIKGNRIRKVYIGMEATGIYYEKAADMLSSYYTVYVINPLKIKDYGKSRFNRTKTDKADSNLIADYIKRHQDTLIPYQIPKNKALQKLINLKNQLHQHQKQIKNRLHSTEEDFIRNIHQDLIDTIQDKMEQVKIAISEQIKKQTDNNHYRNLQTIPSIGKDTASVLYAQLTEKHFKTANQFVSYAGLSPAIIQSGTSVRGRGRLSRYGNRRLKSTLYMPALCAYRFNAFPKLINNLKKAGKPKMVIIVAIMRKLAKLAYYIVKTGQPYDAERHRLNQ

SEQ ID NO: 22639 - protein, 94 aa, Neisseria meningitidis; identical to SEQ ID NO: 973

SEQ ID NO: 22640 - protein, 45 aa, Neisseria meningitidis; identical to SEQ ID NO: 645

SEQ ID NO: 22641 - protein, 678 aa, Neisseria meningitidis
MTDNALLHLGEEPRFDQIKTEDIKPALQTAIAEAREQIAAIKAQTHTGWANTVEPLTGITERVGRIWGVVSHLNSVADTPELRAVYNELMPEITVFFTEIGQDIELYNRFKTIKNSPEFDTLSPAQKTKLNHDLRDFVLSGAELPPEQQAELAKLQTEGAQLSAKFSQNVLDATDAFGIYFDDAAPLAGIPEDALAMFAAAAQSESKTGYKIGLQIPHYLAVIQYADNRELREQIYRAYVTRASELSDDGKFDNTANIDRTLANALQTAKLLGFKNYAELSLATKMADTPEQVLNFLHDLARRAKPYAEKDLAEVKAFARESLGLADLQPWDLGYASEKLREAKYAFSETEVKKYFPVGKVLNGLFAQIKKLYGIGFTEKTVPVWHKDVRYFELQQNGKTIGGVYMDLYAREGKRGGAWMNDYKGRRRFSDGTLQLPTAYLVCNFAPPVGGREARLSHDEILILFHETGHGLHHLLTQVDELGVSGINGVEWDAVELPSQFMENFVWEYNVLAQMSAHEETGVPLPKELFDKMLAAKNFQRGMFLVRQMEFALFDMMIYSEDDEGRLKNWQQVLDSVRKKVAVIQPPEYNRFALSFGHIFAGGYSAGYYSYAWAEVLSADAYAAFEESDDVAATGKRFWQEILAVGGSRSAAESFKAFRGREPSIDALLRHSGFDNAV

SEQ ID NO: 22642 - protein, 179 aa, Neisseria meningitidis; identical to SEQ ID NO: 11525

SEQ ID NO: 22643 - protein, 512 aa, Neisseria meningitidis
MFHSIEKYRTPAQVLLGLIALTFVGFGVSTVSHPGADYIVQVGDEKISDHSINNAIQNEQADGGGPSRDAVFQSLLQRAYLKQGAKLMGISVSSEQIKQIIVDDPNFHDANGKFDHALLNRYLSQRHMSEDQFVEEIRDQFALQNLVNLVQNSVLVGDAQAEQLIRLTQVNRTIRSHTFNPDEFIAQVKVSEADLQKFYNANKKDYLLPKAVKLEYVALNLKDFADKQTVSETEVKNAFEERVARLPANEAKPSFEQEKAAVENELKMKKAVADFNKAKEKLGDDAFNHPSSLAEAAKNSGLKVETQETWLSRQDAQMSGMPENLINAVFSDDVLKKKHNSEVLTINSETAWVVRAKEVREEKTLPFAEAKDAVRQAYIRTEAAKLAENKAKDVLTQLNGGKAVDVKWSEVSVLGAQQARQSMPPEAYAELLKAKPANGKPAYVRLIGLPAPVIVEVQAVTPPDDIAAQLPLAKQALAQQQSANTFDLLIRYFNGKIKQTKGAQSVDNGDGQ

SEQ ID NO: 22644 - protein, 136 aa, Neisseria meningitidis
MPVYFRTPSRKRLHKMNRRQHKKLHLGEFQTLIFGVQGSLHQAEDDAEAFGRFMDELIAYLAVNGLEMAGGGDCGDFSCLFQKSGTRSLGETEKKAIISWLAGREDVATLYATPLVDGFYGDDGWESYSETYKQAD

SEQ ID NO: 22645 - protein, 155 aa, Neisseria meningitidis; identical to SEQ ID NO: 6437

SEQ ID NO: 22646 - protein, 505 aa, Neisseria meningitidis
MLYFRYGFLVVWCAAGVSAAYGADAPAILDDKALSQVWRSVSDKWAESDWKVENDAPRVVDGDFLLAHPKMLEHSLRDALNGNQADLIASLADLYAKLPDYDAVLYGRARALLAKLAGRPAEAVARYRKLHGENAADERILLDLAAAEFDDFRLKSAERHFAEAEKLDLPAPVLENVGRFRKKAEGLTGWRFSGGISPAVNRNANNAAPQYCWQNGGRQICSVSRAERAAGLNYEIEAEKLTALADNHYLLFRSNIGGTSYYFSKKSAYDDGFGRAYLGWQYKNARQTAGILPFYQVQLSGSDGFDAKTKRVNNRRLPPYMLAHGVGVQLSHTYRPNPGWQFSVALEHYRQRYREQDRAEYNNGRQDGFYVSSAKRLGESATVFGGWQFVRFVPKRETVGGAVNNAAYRRNGVYAGWAQEWRQLGGLNSRVSASYARRNYKGVAAFSTEAQRNREWNVSLALSHDKLSYKGIVPALNYRFGRTESNVPYAKRRNSEVFVSADWRF

SEQ ID NO: 22647 - protein, 156 aa, Neisseria meningitidis; identical to SEQ ID NO: 19682

SEQ ID NO: 22648 - protein, 203 aa, Neisseria meningitidis; identical to SEQ ID NO: 15529

SEQ ID NO: 22649 - protein, 172 aa, Neisseria meningitidis; identical to SEQ ID NO: 1639

SEQ ID NO: 22650 - protein, 329 aa, Neisseria meningitidis
MSTFFRQTAQAMIAKHIDRFPLLKLDQVIDWQPIEQYLNRQKTRYLRDHRGRPAYPLLSMFKAVLLGQWHSLSDPELEHSLITRIDFNLFCRFDELSIPDYSTLCRYRNWLAQDDTLSELLELINCQLTEKGLKVEKASAAVIDATIIQTAGSKQRQAIEVDEEGQISGQTTPSKDSDARWIKKNGLYKLGYKQHTRTDAEGYIEKLHITPANAHECKHLSPLLEGIAEGTTVYADKGYDSAENRQHLEEHQLQDGIMRKACRNRPLTEAQTKRNRYVVEQSFGTLHRKFRYARAAYFGLIKVSAQSHLKAMCLNLLKAANRLSAPAAA

SEQ ID NO: 22651 - protein, 336 aa, Neisseria meningitidis; identical to SEQ ID NO: 9366

SEQ ID NO: 22652 - protein, 468 aa, Neisseria meningitidis; identical to SEQ ID NO: 18038

SEQ ID NO: 22653 - protein, 216 aa, Neisseria meningitidis; identical to SEQ ID NO: 3431

SEQ ID NO: 22654 - protein, 485 aa, Neisseria meningitidis; identical to SEQ ID NO: 12288

SEQ ID NO: 22655 - protein, 321 aa, Neisseria meningitidis
VKPRFYWAACAVLLTACSPEPAAEKTVSAASASAATLTVPTARGDAVVPKNPERVAVYDWAALDTLTELGVNVGATTAPVRVDYLQPAFDKAATVGTLFEPDYEALHRYNPQLVITGGPGAEAYEQLAKNATTIDLTVDNGNIRTSGEKQMETLARIFGKEARAAELKAQIDALFAQTREAAKGKGRGLVLSVTGNKVSAFGTQSRLASWIHGDIGLPPVDESLRNEGHGQPVSFEYIKEKNPDWIFIIDRTAAIGQEGPAAVEVLDNALVRGTNAWKRKQIIVMPAANYIVAGGARQLIQAAEQLKEAFEKAEPVAAGKE

SEQ ID NO: 22656 - protein, 214 aa, Neisseria meningitidis; identical to SEQ ID NO: 1408

SEQ ID NO: 22657 - protein, 322 aa, Neisseria meningitidis
MTAKPFSLNLTNLLLLAALFAVSLSVGVADFRWSDVFSLSDSQQVMFISRLPRTFAIVLTGASMAVAGMIMQILMRNRFVEPSMAGAGQSAALGLLLMSLLLPAAPLPVKMSVAAVAALIGMLVFMLLIRRLPPTAQLMVPLVGIIFGGVVEAVATFVAYENEMLQMLGVWQQGDFSSVLLGRYELLWITGGLAVFAYLIADRLTILGLGETVSVNLGLNRTVVLWSGLIIVALITSLVIVTVGNIPFVGLVVPNIISRLIGDRLRQSLPAVALLGASLVLLCDILGRVIVFPFEIPVSTVFGVLGTALFLWLLLRKPAHAV

SEQ ID NO: 22658 - protein, 492 aa, Neisseria meningitidis
MFSKLTPLAETGIPTLSCANAAGRLLHSDSRQIKQGDIFVACPGEYADGRSYIPAAVANGAAFVFWDDDGKFAWNPEWKVPNQGIKDLKHRAGILAAQVYGNVSDGLKFWGVTGTNGKTSITQWLAQAADLLGEKTAIVGTVGNGFWGALEETTHTTPAPVDVQTLLYRFRQQGATAAAMEVSSHGLDQSRVNGVPFRSAIFTNLTRDHLDYHGTMEAYGAIKSRLFYWHGLKHAVINVDDGYGAELIGRLKKDCPDLAVYSYGFSEHADIRITDFTASSDGIEAVFRTPWGEGKCRTRLLGRFNAQNLAACIALLCANGYPLDNVLDVLAKIRPASGRMDCIMNSGKPLVVVDYAHTPDALEKALATLQEIKPQGAALWCVFGCGGNRDRGKRPLMGAAAVQGADKVVVTSDNPRLENPHDIINDILPAVPAPECVEADRAAAIRYAVEQAAANDIILIAGKGHENYQDVQGVKHRFSDLEIVGQALLTRK

SEQ ID NO: 22659 - protein, 485 aa, Neisseria meningitidis
MKPTIALVGRPNVGKSTLFNRLTRTKDALVHDLPGLTRDRHYGHGKVGSKPYLVIDTGGFEPVVDSGILHEMAKQTLQAVDEADAVVFLVDGRTGLTPQDKIIADRLRQSPRPVYLAVNKGEGGNRAVLAAEFYELALGDPYVISGAHGDGVYYLIEEILENFPEPEVEEADAKHPVFAVIGRPNVGKSTLVNAILGEERVIAFDMAGTTRDSIHIDFEREGKPFTIIDTAGVRRRGKVDEAVEKFSVIKAMQAVEAANVAVLVLDAQQDIADQDATIAGFALEAGRALVVAVNKWDGISEERREQVKRDINRKLYFLDFAKFHFISALKERGIDGLFDSIQAAYNAAMIKMPTPKITRVLQSAIERQQPPRAGLVRPKMRYAHQGGMNPPVIVVHGNSLHAISDSYTRYLTQTFRKAFNLQGTPLRIQYNVSENPYENAEDKPKKKPLRRVSLSNRIEKREDRKEEKNRFKKKTKVSVKKQFSK

SEQ ID NO: 22660 - protein, 296 aa, Neisseria meningitidis
MNPKSPLFLRLSDRLDVYLRLMRADKPIGALLLLWPTYWALWLASDGIPDLAVLAAFTIGTFLMRSAGCVINDFADRDFDGAVERTKNRPFAQGRVKKKEALLLTAFLCLLAALCLIPLNHLTWLMSLPALFLALTYPFTKRFFPIPQLYLGLAFSFGIPMAFAAVAGNVPPQAWILFAANVLWTLAYDTVYAMADKEDDLKIGIKTSAVTFGRYDIAAVMLCHGGFTLLMAVLGAVIGAAWAYWTAIPIVLLLQYRQYAAIKSRVRQICFETFLANNRIGWVWFTAIFAHTFFAK

SEQ ID NO: 22661 - protein, 169 aa, Neisseria meningitidis; identical to SEQ ID NO: 16877

SEQ ID NO: 22662 - protein, 263 aa, Neisseria meningitidis; identical to SEQ ID NO: 14310

SEQ ID NO: 22663 - protein, 218 aa, Neisseria meningitidis
MDFEKARFNMVEQQIRPWDVLDFDVLDALAEIPRELFVDEDLQGLAYADMALPLANGHKMLEPKVVARLAQGLKLTKNDTVLEIGTGSGYATALLAKLAGRVVSDDIDAEQQNRAKAVLDGLGLDNIDYVQNNGLTELSAGAPFDAVYVGGAVNLVPEVLKEQLKDGGRMVVIVGRKPVQRALLITRRGDVFEEKVLFDTLVAHLDDKDADPFGGFDF

SEQ ID NO: 22664 - protein, 394 aa, Neisseria meningitidis
MTEPTSRRRFLKTCTAAAGAGLLQACGTSATSVPPLPSSHSVVKARTVPLQTPRRQSSDGNLLRVVASSGFAEDTNRVNTALTRLYNVGFTVTNQQAGSRRFQRFAGTDAQRVADFQEVASGRVATPKVLMGLRGGYGAARILPHIDFASLGARMREHGTLFFGFSDVCAVQLALLAKGNMMSFAGPMAYSDFGKPAPGAFTMDAFIKGATQNRLTVDVPYIQRADVETEGILWGGNLSVLASLAGTPYMPDIDGGILFLEDVGEQPYRIERMLNTLYLSGILKKQRAIVFGNFRMEKIRDVYDPSYDFSAVANHVSRTAKIPVLTGFPFGHIADKITFPLGAHARIRMNGNGGYAVAFEGYPTLDASALTLDTLLPPPDLPIFPESGVADISE

SEQ ID NO: 22665 - protein, 117 aa, Neisseria meningitidis
MSEIKIFHNPRCSKSRAALSLLEERGIAAEVVKYLDTPPDLSELKDIFNKLGLASERGMMRVKDDLYKELGLDNPDLDNDALLRAIADHPALLERPIVLANGKAAVGRPLENIEAVL

SEQ ID NO: 22666 - protein, 203 aa, Neisseria meningitidis
MKPLILGLAAVLALSACQVQKAPDFDYTSFKESKPASILVVPPLNESPDVNGTWGVLASTAAPLSEAGYYVFPAAVVEETFKENGLTNAADIHAVRPEKLHQIFGNDAVLYITVTEYGTSYQILDSVTTVSAKARLVDSRNGKELWSGSASIREGSNNSNSGLLGALVSAVVNQIANNLTDRGYQVSKTAAYTCCRPILTTAS

SEQ ID NO: 22667 - protein, 89 aa, Neisseria meningitidis; identical to SEQ ID NO: 19801

SEQ ID NO: 22668 - protein, 418 aa, Neisseria meningitidis
MKVLVLGAGVAGVSSAWYLAEAGHEVTVIDRAEGVAMETSFANAGQLSYGYTTPWAAPGIPTKALKWLFKSHPPLLFRPDGSLYQIEWLWQMLQNCTAAHYQTNKERMVRISEYSREMFRRFEAQTGMNFEERKKGTLQIFRQTKEVEAAEQDIAVLERYGVPYRRLKPEECAEFEPALARVTSKIAGGLHLPADATGDCHLFTENLYKLCQEKGVQFHFNQTISRIDHNGLRIKAVETETGRFEADAVVCALGCFSRTVLAQLDLDLPIYPVKGYSLTLPVTNSDGAPVSTVLDESYKVAITRFDNRIRVGGMAELSGYEIKLPEKRRETLALVVNDLFPEGGDLSQALFWSGLRPMTPDSTPLIGRTRFENLFLNTGHGTLGWTMSLGSAKLTADIVSGKDTEIRSDDLSLSRYQA

SEQ ID NO: 22669 - protein, 444 aa, Neisseria meningitidis; identical to SEQ ID NO: 2522

SEQ ID NO: 22670 - protein, 451 aa, Neisseria meningitidis; identical to SEQ ID NO: 7557

SEQ ID NO: 22671 - protein, 147 aa, Neisseria meningitidis
MPLRLLLGILCDLSMVAPVYAQGQPDAVNAYIQKKKVIVDTSKAELCFADDRQCHPVLIGTATPKGTFGLTLNSTDKPGYGGEVIGFKQEGDFLFALHRVWNQIPSERRSERIASSVVSDRIMTNGCINVSDAVYEKLRHYFVLEVI

SEQ ID NO: 22672 - protein, 287 aa, Neisseria meningitidis
MKTFFKTLSAAALALILAACGGQKDSAPAASASAAADNGAEKKEIVFGTTVGDFGDMVKEQIQAELEKKGYTVKLVEFTDYVRPNLALAEGELDINVFQHKPYLDDFKKEHNLDITEVFQVPTAPLGLYPGKLKSLEEVKDGSTVSAPNDPSNFARVLVMLDELGWIKLKDGINPLTASKADIAENLKNIKIVELEAAQLPRSRADVDFAVVNGNYAISSGMKLTEALFQEPSFAYVNWSAVKTADKDSQWLKDVTEAYNSDAFKAYAHKRFEGYKYPAAWNEGAAK

SEQ ID NO: 22673 - protein, 475 aa, Neisseria meningitidis; identical to SEQ ID NO: 14755

SEQ ID NO: 22674 - protein, 174 aa, Neisseria meningitidis; identical to SEQ ID NO: 3281

SEQ ID NO: 22675 - protein, 207 aa, Neisseria meningitidis; identical to SEQ ID NO: 243

SEQ ID NO: 22676 - protein, 88 aa, Neisseria meningitidis; identical to SEQ ID NO: 1100

SEQ ID NO: 22677 - protein, 210 aa, Neisseria meningitidis
MTVWVGLTGGIGSGKSAAAQCFADLGVPRIDADAAAHSLTASDGIALPEIRRLFGDTVFDTQGLLRRDILRKEVFASPSRKALLESVMLPLIFSEIKKQQETFTDAAYGIVEIPLLTEKRQFISLIRRVLTISAPLEKRIGRVMARSGLTRGEVAAVISHQASESERLLLADDVLLNDGSLKSLREKTMRLHAFYSGIFASKPTQGKHNG

SEQ ID NO: 22678 - protein, 115 aa, Neisseria meningitidis; identical to SEQ ID NO: 3528

SEQ ID NO: 22679 - protein, 306 aa, Neisseria meningitidis; identical to SEQ ID NO: 1302

SEQ ID NO: 22680 - protein, 311 aa, Neisseria meningitidis; identical to SEQ ID NO: 15099

SEQ ID NO: 22681 - protein, 766 aa, Neisseria meningitidis; identical to SEQ ID NO: 6920

SEQ ID NO: 22682 - protein, 85 aa, Neisseria meningitidis; identical to SEQ ID NO: 15519

SEQ ID NO: 22683 - protein, 186 aa, Neisseria meningitidis; identical to SEQ ID NO: 6815

SEQ ID NO: 22684 - protein, 173 aa, Neisseria meningitidis
MSCFSIKRMSAFRARITVFFTAFVFLTAALPAYAERLPDFLAKIQPSEIFPGADRYSKPEGKPMVARVYKGDEQLGLVYITTDAVNTRGYSSKPIDTLMALANDGTIAGAKLVDHHEPIMLIGIPHLPAPGRAIRLNWLPAYIKPNFISTNRLRLKGLPTVPQPSKETGAGVP

SEQ ID NO: 22685 - protein, 65 aa, Neisseria meningitidis; identical to SEQ ID NO: 981

SEQ ID NO: 22686 - protein, 305 aa, Neisseria meningitidis; identical to SEQ ID NO: 13298

SEQ ID NO: 22687 - protein, 154 aa, Neisseria meningitidis; identical to SEQ ID NO: 6562

SEQ ID NO: 22688 - protein, 124 aa, Neisseria meningitidis
LAEGQKSAVTEYYLNHGEWPGNNSSAGVATSANIKGKYVEKVEVKNGVVTATMLSTGVNNEIKGKKLSLWAKRQDGSVKWFCGQPVKRDNASADAVKADTAANGKQIDTKHLPSTASTRKSTPN

SEQ ID NO: 22689 - protein, 76 aa, Neisseria meningitidis; identical to SEQ ID NO: 374

SEQ ID NO: 22690 - protein, 86 aa, Neisseria meningitidis; identical to SEQ ID NO: 6575

SEQ ID NO: 22691 - protein, 286 aa, Neisseria meningitidis; identical to SEQ ID NO: 5950

SEQ ID NO: 22692 - protein, 357 aa, Neisseria meningitidis
MSITIQNLNKHFGNFHALKNINLNVPTGKLVSLLGPSGCGKTTLLRIIAGLENADGGNILFDGQDVTAKHVRERKVGFVFQHYALFRHMNVFDNVAFGLTVLPKSERPSKEQICTKVEELLKLVQLSHLAKSYPHQLSGGQRQRIALARALAVEPKLLLLDEPFGALDAKVRKELRTWLRDIHHNLGVTSILVTHDQEEALEVSDEIVVMNHGKIEQTGSAEAIYRKPENAFVTEFLGETDAFEGRIEKGFWHYNGFAWKLDAHYKWQEQTATGYIRPHEWQIAAEHETPMICAEIEKVHAVGALTHILVKHGKQDVHITLAGSDAARYPIAEGKELKLIPKQVYVFSQNELIEYSI

SEQ ID NO: 22693 - protein, 390 aa, Neisseria meningitidis
  misc_feature 386, 387, 388: 'Xaa' is any amino acid
MFIILGRNFLKIILCFSFFVSKFALASVNAPGKFDRVEVYDDGRYLGIRGSDDKRRRIWKGVFDRESGRYLTSEAQDLKVRHVSTGASSTGKVSSVVSSSVSRAAVLSGVGKLARLGAKLSTRAVPYVGTALLAHDVYETFKEDIQAQGYQYDPETDKFVKGYEYSNCLWYEDERRINRTYGCYGVDSSIMRLMSDYSRFPEVKELMESQMYRLARPFWNWHKEELNKLSSLDWNNFVLNSCTFNWNGGDCSVNKGDDYRNGADFSLIRNPKYKEEMDAKKLEEILSLKVDANPDKYIKATGYPGYSEKVEVAPGTKVNMGPVTDRNGNPVQVVATFGRDSQGNTTVDVQVIPRPDLTPGSAEAPNAQPLPEVSPAENPANNPNPXXXHT

SEQ ID NO: 22694 - protein, 311 aa, Neisseria meningitidis
MGHNMMTTQKWYEHITNVIIGNTANFNSGCPEAIDYVDERKGVPLAAMRHILMYTEAAASHAYLFEHDLNKFKQYAYVAGKLGILRSVNSTDPEPFFFPCDMLNIQNPMFLMLMSDSPQLREFLVRNIDNIANDTEAFINRYDLNRHMIYNTLLMVEGKQLDRLKQRSEKVLAHPTPSKWLQKRLYDYRFFLAFAEQDAEAMKAALEPLFDKKTARMAAKETLSYFDFYLQPQIVTYAKIASMHGFDLGIDHEIAPRDLIVYDPLPADEYQDIFDFMKQYDLSYPYEYLQDWIDYYTFKTDKLVFGNAKRE

SEQ ID NO: 22695 - protein, 108 aa, Neisseria meningitidis; identical to SEQ ID NO: 6420

SEQ ID NO: 22696 - protein, 233 aa, Neisseria meningitidis; identical to SEQ ID NO: 3223

SEQ ID NO: 22697 - protein, 76 aa, Neisseria meningitidis; identical to SEQ ID NO: 286

SEQ ID NO: 22698 - protein, 504 aa, Neisseria meningitidis; identical to SEQ ID NO: 14975

SEQ ID NO: 22699 - protein, 169 aa, Neisseria meningitidis; identical to SEQ ID NO: 4575

SEQ ID NO: 22700 - protein, 867 aa, Neisseria meningitidis
MSKTVHYLKDYQTPAYHILKTDLHFDINEPQTVVKSRLTVEPQRVGEPLVLDGSAKLLSVKINGAAADYVLEGETLTIAGVPSERFTVEVETEILPVENKSLMGLYASGGNLFTQCEPEGFRKITFYIDRPDVMSKFTTTIVADKKRYPVLLSNGNKIDGGEYSGGRHWVKWEDPFAKPSYLFALVAGDLAVTEDYFTTMSGRNVKIEFYTTEADKPKVGFAVESLKNAMKWDETRFGLEYDLDIFMVVAVGDFNMGAMENKGLNIFNTKFVLADSRTATDTDFEGIESVVGHEYFHNWTGNRVTCRDWFQLSLKEGLTVFRDQEFSGDRASRAVRRIENIRLLRQHQFPEDAGPTAHPVRPASYEEMNNFYTMTVYEKGAEVVRMYHTLLGEEGFQKGMKLYFQRHDGQAVTCDDFRAAMADANGINLDQFALWYSQAGTPVLEAESRLKNNIFELTIKQTVPPTPDMADKQPMMIPVKVGLLNRNGEAMAFDYQGKRATEAVLLLTEAEQTFQFESVTEAVVPSLLRGFSAPVHLNYPYSDDDLLLLLAHDSDAFTRWEAAQTLYRRAVAANLAALSDGIELPKHEKLLAAVEKVISDGLLDNAFKALLLGVPSEAELWDGAENIDPLRYHQAREALLDTLAVRFLPKWHELNRQAAKQENQSYEYSPEAAGWRTLRNVCRAFVLCADPAHIETVAEKYGEMAQNMTHEWGILSAVNGNESDTRNRLLAQFADKFSDDALVMDKYFALVGLSRRSDTLQQVQTALQHPKFSLENPNKARSLIGSFSRNVPHFHAEDGSGYRFIADKVIEIDRFNPQVAARLVQAFNLCNKLEPHRKNLVKQALQRIRAQEGLSKDVGEIVGKILD

SEQ ID NO: 22701 - protein, 329 aa, Neisseria meningitidis
MSTFFQQTAQAMIAKHIDRFPLLKLDQVIDWQPIEQYLNRQKTRYLRDHRGRPAYPLLSMFKAVLLGQWNSLSDPELEHSLITRIDFNLFCRFDELSIPDYSTLCRYRNWLAQDDTLSELLKLINRQLTEKGLKIEKASAAVVDATIIQTAGSKQRQAIEVDEEGQINGQTTPSKDKDARWIKKNGLYKLGYKQHTRTDAEGYIEKLHITPANAHECKHLSPLLEGLPKGTTVYVDKGYDSAENRQHLEEHQLQDGIMRKACRNRPLTEAQTKRNRYVVEQSFGTLHRKFRYARAAYFGLIKVSAQSHLKAMCLNLLKAANRLSAPAAA

SEQ ID NO: 22702 - protein, 113 aa, Neisseria meningitidis; identical to SEQ ID NO: 1729

SEQ ID NO: 22703 - protein, 379 aa, Neisseria meningitidis
MKKTLVAAAILSLALTACGGGSDTAAHPPSAKPEAGQSGKLNIYNWSDYVDPETVAAFEKETGIKTRSDYYDSNETLEAKVLTGKSGYDLTAPSIANVGRQIKAGAYQKIDKAQIPHYGNIDKDLLKMMEAVDPGNEYAVPYFWGINTLAINTQQVKKALGTDKLPENEWDLVFKPEYTAKLKSCGISYFDSAIEQIPLALHYLGKDPNSENPEDIKAAVDMMKAVRGDVKRFSSSGYIDDMAAGNLCAAIGYGGDLNIAKTRAEEAANGVEIKVLTPKTGVGVWVDSFMIPRDAQNVANAHRYIDYTLLPEVAAKNGSFVTYAPASRPARELMDEKYTSDASIFPNKELMEKSFIVSPKSAESAKLGVKLWQGLKAGK

SEQ ID NO: 22704 - protein, 228 aa, Neisseria meningitidis; identical to SEQ ID NO: 19763

SEQ ID NO: 22705 - protein, 265 aa, Neisseria meningitidis; identical to SEQ ID NO: 2138

SEQ ID NO: 22706 - protein, 434 aa, Neisseria meningitidis; identical to SEQ ID NO: 7859

SEQ ID NO: 22707 - protein, 741 aa, Neisseria meningitidis; identical to SEQ ID NO: 13915

SEQ ID NO: 22708 - protein, 315 aa, Neisseria meningitidis; identical to SEQ ID NO: 1791

SEQ ID NO: 22709 - protein, 102 aa, Neisseria meningitidis
VEGIMLLKVVPERTVSADAKTRDPMWDNAALQTSEGVNFIARFLGFFSDGEYRYVDVLQPNHSDIIRYSGKDFPLNQILNHIHPARYAVTFENNVDSKLRRH

SEQ ID NO: 22710 - protein, 91 aa, Neisseria meningitidis
MNASNWSVYLILCENSAFYCGISPNPQQRLAAHTTGKGAKYTRVFKPVAMRIVAGGMDKGTALKQEIAVKKLTAAQKRKLWEQAEKMPSET

SEQ ID NO: 22711 - protein, 351 aa, Neisseria meningitidis; identical to SEQ ID NO: 6464

SEQ ID NO: 22712 - protein, 77 aa, Neisseria meningitidis; identical to SEQ ID NO: 1677

SEQ ID NO: 22713 - protein, 259 aa, Neisseria meningitidis; identical to SEQ ID NO: 9318

SEQ ID NO: 22714 - protein, 325 aa, Neisseria meningitidis; identical to SEQ ID NO: 5588

SEQ ID NO: 22715 - protein, 331 aa, Neisseria meningitidis; identical to SEQ ID NO: 1014

SEQ ID NO: 22716 - protein, 169 aa, Neisseria meningitidis; identical to SEQ ID NO: 2049

SEQ ID NO: 22717 - protein, 64 aa, Neisseria meningitidis; identical to SEQ ID NO: 19744

SEQ ID NO: 22718 - protein, 75 aa, Neisseria meningitidis; identical to SEQ ID NO: 8304

SEQ ID NO: 22719 - protein, 100 aa, Neisseria meningitidis; identical to SEQ ID NO: 6132

SEQ ID NO: 22720 - protein, 232 aa, Neisseria meningitidis; identical to SEQ ID NO: 1935

SEQ ID NO: 22721 - protein, 448 aa, Neisseria meningitidis
MSDNVPTIAAVATAPGRGGVGVIRISGKNLLPMAEALCGKTPKPRVATYADFTDADGQAIDSGLLLFFAAPASFTGEDVIELQGHGGPVVMDMLLNRCLELGARLAEPGEFTKRAFLNDKLDLAQAEGVADLIDASSRSAARLALRSLKGDFSRRIHGLVEDLITLRMLVEATLDFPEEDIDFLEAADARGKLDGLRRAVDDVLANAQQGAILREGLNVVLVGAPNVGKSSLLNALAGDEVAIVTDIAGTTRDAVRERILIDGVPVHIVDTAGLRETDDVVERIGIERSRKAVSEADVALVLVDPREGLNEKTRAILDALPPELKRIEIHSKSDLHAHAAGGFGTGAETVIALSAKTGDGLDALKRTLLREAGWQGESEGLFLARTRHVNALKAAQEELSLAALCGNHQIELFAEHLRLAQVACGEITGEFTADDLLGVIFSRFCIGK

SEQ ID NO: 22722 - protein, 230 aa, Neisseria meningitidis; identical to SEQ ID NO: 14788

SEQ ID NO: 22723 - protein, 273 aa, Neisseria meningitidis
MMRIFSTGGKMDTQAVITHIARWLDEYAARANAKGFVVGVSGGIDSAVVSALAARTGRPTLLLDMPIRQHPGQLERARLHIRNLQRQYANVSAQTVDLTDTFQTFEQTVGTHQTAFANQPLSLANARSRLRMLTLYYYGQIHGLLVTGTGNKIEDFGVGFFTKYGDGGVDISPIADLTKTQVYRLAEALGVDEAIQKAPPTDGLWDTERTDEEQMGASYPELEWAMGVYGTRKPEDFEGRQREVLEIYTRLHRAMQHKINPIPVCRIPPELLG

SEQ ID NO: 22724 - protein, 419 aa, Neisseria meningitidis; identical to SEQ ID NO: 6779

SEQ ID NO: 22725 - protein, 222 aa, Neisseria meningitidis; identical to SEQ ID NO: 14210

SEQ ID NO: 22726 - protein, 616 aa, Neisseria meningitidis
MYLPSMKHSLPLLAALVLAACSSTNTLPADKTPADNIETADLSASVPTRPAEPEGKTLADYGGYPSALDAVKQKNDAAVAAYLENAGDSAIAENVRNEWLKSLGARKQWTLFAQEYAKLEPEGRAQEVECYADSSRNDYTRAAELVKNTGKLPSGCTKLLEQAAASGLLDGNNAWRRVRGLLAGRQTTDARNLAAALGSPFDGGTQGSREYALLNIIGKEARKSPNAAALLSEMESGLSLEQSSFAWGVLGHYQSQSLNVPAALDYYGKVADRRQLTDDQIEWYARAALRARRWDELASVISHMPEKLQKSPTWLYWLARSRAATGNTQEAEKLYKQAAATGRNFYAVLAGEELGRKIDTRNNVPDAGKNSVLRMAEDGAIKRALVLFRNSRTAGDAKMRRQAQAEWRFATRGFDEDKLLTAAQTAFDHGFYDMAVNSAERTDRKLNYTLRYISPFKDTVIRHAQNVNVDPAWVYGLIRQESRFVMGAQSRVGAQGLMQVMPATAHEIAGKIGMDAAQLYTADGNIRMGTWYMADTKRRLQNNEVLATAGYNAGPGRARRWQADTPLEGAVYAETIPFSETRDYVKKVMTNAAYYAALFGAPHIPLKQRMGIVPAR

SEQ ID NO: 22727 - protein, 270 aa, Neisseria meningitidis
MENIGRQRPIGVFDSGIGGLTNVRALMERLPMENIIYFGDTARVPYGTKSKATIENFSMQIVDFLLEHDVKAMVIACNTIAAVVGQKIRQKTGNMPVLDVISAGAKAALSTTRNNKIGIIATNTTVNSNAYARAIHRDNPDTLVRTQAAPLLVPLVEEGWLEHEVTRLTVCEYLKPLLADGIDTLVLGCTHFPLLKPLIGREAGNVALVDSAITTAEETARVLAQEGLLNTDNNNPDYRFYVSDIPLKFRTIGERFLGRTMEQIEMVSLG

SEQ ID NO: 22728 - protein, 392 aa, Neisseria meningitidis
MAKMMKWAAVAAVAAAAVWGGWSYLKPEPQAAYITEAVRRGDISRTVSATGEISPSNLVSVGAQASGQIKKLYVKLGQQVKKGDLIAEINSTSQTNTLNTEKSKLETYQAKLVSAQIALGSAEKKYKRQAALWKENATSKEDLESAQDALAAAKANVAELKALIRQSKISINTAESELGYTRITATMDGTVVAILVEEGQTVNAAQSTPTIVQLANLDMMLNKMQIAEGDITKVKAGQDISFTILSEPDTPIKAKLDSVDPGLTTMSSGGYNSSTDTASNAVYYYARSFVPNPDGKLATGMTTQNTVEIDGVKNVLIIPSLTVKNRGGKAFVRVLGADGKAAEREIRTGMRDSMNTEVKSGLKEGDKVVISEITAAEQQESGERALGGPPRR

SEQ ID NO: 22729 - protein, 173 aa, Neisseria meningitidis; identical to SEQ ID NO: 6851

SEQ ID NO: 22730 - protein, 321 aa, Neisseria meningitidis; identical to SEQ ID NO: 22437

SEQ ID NO: 22731 - protein, 291 aa, Neisseria meningitidis
MFQKHLQKASDSVVGGTLYVVATPIGNLADITLRALAVLQKADIICAEDTRVTAQLLSAYGIQGKLVSVREHNERQMADKIVGYLSDGMVVAQVSDAGTPAVCDPGAKLARRVREVGFKVVPVVGASAVMAALSVAGVAGSDFYFNGFVPPKSGERRKLFAKWVRAAFPVVMFETPHRIGATLADMAELFPERRLMLAREITKTFETFLSGTVGEIQTALSADGNQSRGEMVLVLYPAQDEKHEGLSESAQNIMKILTAELPTKQAAELAAKITGEGKKALYDLALSWKNK

SEQ ID NO: 22732 - protein, 248 aa, Neisseria meningitidis; identical to SEQ ID NO: 14732

SEQ ID NO: 22733 - protein, 115 aa, Neisseria meningitidis; identical to SEQ ID NO: 15103

SEQ ID NO: 22734 - protein, 336 aa, Neisseria meningitidis
MNDNTQTLPPRHLSVAPMLDWTDRHYRYLARQITRNTWLYSEMVNAGAIVYGDKDRFLMFNEGEQPVALQLGGSDPSDLAKAAKAAEVYGYNEVNLNCGCPSPRVQKGSFGACLMNEVGLVADCLNAMQDAVKIPVTVKHRIGVDRQTEYQTVADFVGTLRDKTACKTFIVHARNAWLDGLSPKENRDVPPLKYDYVYRLKQEFPGLEIIINGGITTNEAIAGHLQHVDGVMVGREAYHNPMVMREWDRLFYGDTRSPIEYADLVQRLYTYSQAQIQAGRGTILRHIVRHSLGLMHGLKGARTWRRMLSDATLLKDNDGSLILEAWKEVERANMRE

SEQ ID NO: 22735 - protein, 189 aa, Neisseria meningitidis; identical to SEQ ID NO: 8960

SEQ ID NO: 22736 - protein, 81 aa, Neisseria meningitidis; identical to SEQ ID NO: 6821

SEQ ID NO: 22737 - protein, 139 aa, Neisseria meningitidis; identical to SEQ ID NO: 921

SEQ ID NO: 22738 - protein, 216 aa, Neisseria meningitidis; identical to SEQ ID NO: 15161

SEQ ID NO: 22739 - protein, 199 aa, Neisseria meningitidis; identical to SEQ ID NO: 360

SEQ ID NO: 22740 - protein, 93 aa, Neisseria meningitidis; identical to SEQ ID NO: 7384

SEQ ID NO: 22741 - protein, 213 aa, Neisseria meningitidis; identical to SEQ ID NO: 17750

SEQ ID NO: 22742 - protein, 129 aa, Neisseria meningitidis; identical to SEQ ID NO: 15482

SEQ ID NO: 22743 - protein, 56 aa, Neisseria meningitidis; identical to SEQ ID NO: 326

SEQ ID NO: 22744 - protein, 127 aa, Neisseria meningitidis; identical to SEQ ID NO: 4145

SEQ ID NO: 22745 - protein, 672 aa, Neisseria meningitidis; identical to SEQ ID NO: 21256

SEQ ID NO: 22746 - protein, 397 aa, Neisseria meningitidis; identical to SEQ ID NO: 103

SEQ ID NO: 22747 - protein, 319 aa, Neisseria meningitidis; identical to SEQ ID NO: 6432

SEQ ID NO: 22748 - protein, 852 aa, Neisseria meningitidis
MPANLSSALETFKRQRDAAEAHYLKANRVSVFFREYTAAVETLLAALWVEHFQNSALCLMAVGGFGRGELYPCSDVDLAVVSPAPLSDGIQEQIARFVQTLWDCKLMPSVKSGGIGELCESVRDDITGDTAFLEARFLFGNRQTADELAKKMNAQRNVPAFVEAKLVEMEHRHAKSQGSGAVLEPNIKSCPGGLRDIHTLLWIAKAQGLATDLPDLLKQRILTRAEAGMLSHGYRRLAHIRIHLHLNAKRAEDRLLFDLQPQVAESMGYEGLNLRRQSEELMRVFYRAIKTVKQLGGILTPMLQSRVSSTPLRVTLRIDDDYIQVNNQIAARHTDIFFRRPEHIFKIVEIMQQRNDITALEPQTLRAWWGATRKINRSFYQNSENRHRFAGFFRNGNGLTQTLRFLNLYGVLGRYLPAWEKIVGLLQHDLFHIYPVDDHILTVVRNVRRLALDMHSHELPYASALMQSFEKQDILYLAAFFHDIAKGRGGDHAIQGIADARQFAADHFLTEEESDLLAWLVENHLLMSTVAQKEDIQDPSVLDAFCKRVQTHERLSALYLLTISDIRGTNPKLWNAWRASLLESLFHAAGRYLTGNGGNPHTLFGRRRQEAADLLTRAAVPEKQQKKLWNALGSAYFARHQSREILWHAANLVHDFETPIVRSRILPKSDSFQVMVFMPNGPRLFARLCRIFSRHGFDILAARAFITEHDYILDTFIVQIPSQHAPEDYPDIQSALEAELNSFIHGHTVAEISSHSRRISRRSRYMPIAPSITITPEEDYPDWYSVEITAVNRPFLLADMAEVFFAHNVSLRYAKISTLDERAEDSFTVFSLDLKNPKIQSSLKQTLLEQLS

SEQ ID NO: 22749 - protein, 42 aa, Neisseria meningitidis; identical to SEQ ID NO: 9053

SEQ ID NO: 22750 - protein, 194 aa, Neisseria meningitidis
MISRLTGKLVEKNPPQIVIDVNGVGYEADVSMQTFYNLPPVGESVQLFTQLIIREDAHLLFGFATAEERKTFRQLIKVGGIGAKTALGILSAMTADELARAVAEEDVKRLSSAPGIGKKTAERMVLELRGKLVAHAVTDGLFAAAPAADETEDIVSTLLALGYSEREAKAAVKGVPEGTDVGEGVRLALKNLLK

SEQ ID NO: 22751 - protein, 359 aa, Neisseria meningitidis; identical to SEQ ID NO: 2157

SEQ ID NO: 22752 - protein, 331 aa, Neisseria meningitidis; identical to SEQ ID NO: 12175

SEQ ID NO: 22753 - protein, 415 aa, Neisseria meningitidis
MQLTAVGLNHQTAPLSIREKLAFAAAALPKAVRNLARSNAATEAVILSTCNRTELYCVGDSEEIIRWLADYHSLPIEEIRPYLYALDMQETVRHAFRVACGLDSMVLGEPQILGQIKDAVRVAQEQESMGKKLNALFQKTFSVAKEVRTDTAVGENSVSMASASVKLAEQIFPDIGDLNVLFIGAGEMIELVATYFAAKSPRLMTVANRTLARAQELCDKLGVNAEPCLLSDLPAILHDYDVVVSSTASQLPIVGKGMVERALKQRQSMPLFMLDLAVPRDIEAEVGDLNDAYLYTVDDMVNIVQSGKEARQKAAAAAETLVSEKVAEFVRQQQGRKSVPLIKALRDEGEKARKQVLENAMKQLAKGATAEEVLERLSVQLTNKLLHSPTQTLNKAGEEDKDLVHAVAQIYHLDK

SEQ ID NO: 22754 - protein, 346 aa, Neisseria meningitidis
MQPIRYRTDLTPYNTFGLRAQARAFIALEHADELCDIVRLPEFDRDTVLWLGGGSNILLMQDYAGLVVHMENKGIREIARSDGIVRIEAQAGEIWHDFVLHTVALGLNGLENLSLIPGTVGASPVQNIGAYGVETKDVIHSVRCFDLDTETFVTLSNADCRFAYRESLFKQEGKGRYVIVSVVFALKTHFVPNLDYGDLAAAVAELSAGRVPTAKDVSDAVCAIRNSKLPNPNVLGNVGSFFKNPVIGAEKAAALLEQHPDMPHYPQPDGSVKLAAGWLIDQCRLKGFQIGGAAVHDRQALVLVNKNNASANDVRQLAQHIKFTVFARFQVELHAEPNWLPASFSL

SEQ ID NO: 22755 - protein, 380 aa, Neisseria meningitidis
MNTLYTLFATCPRGLETVLSQELGSLGCTDVQAFDGGVSCRGGLEQAYAANLHSRTASRILLRLTKGTYRNERDIYKLAKNINWFNWFTLQQTFKVKVEAKRANVKSIQFVGLTVKDAVCDAFRDIYDARPSVDKAAPDVRIHAFLDERNVEIFIDTSGEALFKRGYRLDTGEAPLRENLAAGLLLSAGYDGTQPFQDPFCGSGTIAIEAAWIAARRAPGMMRRFGFEKLQNFDKTLWSDLRRRAEAQVKPAFAPISGSDSDRRIIQTALANARSAGVDDIVSFSVADAQSVRPNGVGGIMVSNPPYGVRLEEVRALQALYPQLGTWLKKHYAGWQVGMFTGDREMPKFMRLSPKRKIPLYNGNLDCRLFLIDMVQGSNR

SEQ ID NO: 22756 - protein, 305 aa, Neisseria meningitidis
MVLDGFAAHFDAYLENIVREGKSEHTVAAYRRDLEELFALLAQMPSEAEGGVPQDLSRRDFTAALRRLSQRGLNARTLARKLSSWRQYCVWLVERGLLHTDPAADIKPPKQPERVPKALPQEWLNRMLDLPVDGGDPLAVRDHALFELMYGSGLRVSEIHGLNADDVYLDEAWVHVTGKGRKQRQVPLTGKSVEALKNYLPLRQTASDGKALFTGRNGTRLSQRQIQKRLAQWAAQNGDGRHVSPHMMRHSYAGHLLQASRDIRAVQELLGHSSLSTTQIYTKLDFDHIARLYDEAHPRAKRQDE

SEQ ID NO: 22757 - protein, 428 aa, Neisseria meningitidis; identical to SEQ ID NO: 15089

SEQ ID NO: 22758 - protein, 203 aa, Neisseria meningitidis; identical to SEQ ID NO: 352

SEQ ID NO: 22759 - protein, 206 aa, Neisseria meningitidis; identical to SEQ ID NO: 320

SEQ ID NO: 22760 - protein, 39 aa, Neisseria meningitidis
MCHAELSAWFEDILSSLGIKTPKEEGVIVSKRLRKPEGK

SEQ ID NO: 22761 - protein, 126 aa, Neisseria meningitidis; identical to SEQ ID NO: 13140

SEQ ID NO: 22762 - protein, 106 aa, Neisseria meningitidis; identical to SEQ ID NO: 2510

SEQ ID NO: 22763 - protein, 695 aa, Neisseria meningitidis
MDYLSRLSFGFNKKLPVILQTEVAECGLACLTSILSYYGFHTDLRTLLQKYTLSLKGANLADIMRFGNEMNLTPRALRLELDELSNLQLPCILHWNLNHFVVLCSISKDSIVIMDPAVGMRKIKMDEVSQKFTGIALELFPNTHFEEKKETKKIKILSLLRGISGLKRSLIQMLILAISLEVFALVSPFFMQWVIDHVIVTADKNLLLTLTLGFGLLAILQQLISLLQAWVGMHLSTTLNLQWKANIFKRLLDLPNDYFSKRHLGDVISRFGSIDHIQETLTSTFFVLVLNSLMAVFTFVLMTIYSTQLSLIVLLTLVLYILIRWLAYYPLRNATEENIVHEAKQNSYFMETIRGIQSVKLFDKHYQRHGTWMSLFVNTVNTKLTTDKLSALFEFSNKLLFSMENIIIIYLGASAILDGSFTVGVLMAFLAYKGQFESRTASLVDQYIQIKMLGLHAERLADITLNETETEIIKYNHIPKLDNEQLVLKVENVSFRYADNEPYLFENINLEFKDNEAVVLTGQSGRGKSTLLNILTGSLKPETGTVSINGHDIYQVSPSFIRGLSGIVRQDDVLFAGSIGENISFFDESPNMELIEQCAKMAQIHDDILKMPMGYETLIGDMGNILSGGQKQRVILARALYKRPKILFLDEASSHLDVENEQKINHNLKSLGIMKIMVAHRQETIQSADKILNLG

SEQ ID NO: 22764 - protein, 480 aa, Neisseria meningitidis; identical to SEQ ID NO: 14698

SEQ ID NO: 22765 - protein, 218 aa, Neisseria meningitidis
MTIKIILIDDHTLFRSGIKALLSRQHGFEVIGEAADGLSGIKMISRLQPDVVLLDLDMPGMNGREALSQIISINPQQAVIMLTVSEDSDDLTECIRIGARGYLLKNINADFLLESIRKVAEGDNVFSPEMTAKLVKSLISPQPAQGTQALSSLTPRELEILGYLAAGHSNKIIARHLDLAESTVKVHVQNLLRKLNLSSRVQAAVYAIRHNVPQPVLE

SEQ ID NO: 22766 - protein, 41 aa, Neisseria meningitidis; identical to SEQ ID NO: 15747

SEQ ID NO: 22767 - protein, 65 aa, Neisseria meningitidis; identical to SEQ ID NO: 15698

SEQ ID NO: 22768 - protein, 192 aa, Neisseria meningitidis; identical to SEQ ID NO: 746

SEQ ID NO: 22769 - protein, 162 aa, Neisseria meningitidis; identical to SEQ ID NO: 14583

SEQ ID NO: 22770 - protein, 101 aa, Neisseria meningitidis; identical to SEQ ID NO: 6309

SEQ ID NO: 22771 - protein, 77 aa, Neisseria meningitidis; identical to SEQ ID NO: 5942

SEQ ID NO: 22772 - protein, 210 aa, Neisseria meningitidis
MRKTKTEALKTKEHLMLAALETFYRKGIARTSLNEIAQAAGVTRGALYWHFKNKEDLFDALFQRICDDIENCIAQDAEDAEGGSWAVFRHTLLHFFERLQSNDIYYKFHNILFLKCEHTEQNAAVIAIARKHQAIWREKITAVLTEAVENQDLADDLDKETAVIFIKSTLDGLIWRWLSSGENFDLGKTAPRIIGIMMDNLESHPCLRRK

SEQ ID NO: 22773 - protein, 129 aa, Neisseria meningitidis; identical to SEQ ID NO: 5927

SEQ ID NO: 22774 - protein, 596 aa, Neisseria meningitidis; identical to SEQ ID NO: 6764

SEQ ID NO: 22775 - protein, 119 aa, Neisseria meningitidis; identical to SEQ ID NO: 6994

SEQ ID NO: 22776 - protein, 508 aa, Neisseria meningitidis; identical to SEQ ID NO: 9065

SEQ ID NO: 22777 - protein, 158 aa, Neisseria meningitidis; identical to SEQ ID NO: 15270

SEQ ID NO: 22778 - protein, 159 aa, Neisseria meningitidis; identical to SEQ ID NO: 4893

SEQ ID NO: 22779 - protein, 140 aa, Neisseria meningitidis; identical to SEQ ID NO: 15282

SEQ ID NO: 22780 - protein, 448 aa, Neisseria meningitidis
  misc_feature 2, 3, 4, 443, 444: 'Xaa' is any amino acid
VXXXQPEYAYLKQLQTAKNVDWKQVQLAYDKWDYKQEGLTGAGAAIVVIIVTALTYGYGAAAAGSVTAAGSSTAAAATTTAAATTTVSTAAAMQTAALASLYSQAAVAIINNKGDVGKALKDLGTSDTVKQIVTSALTAGALNQMGADIAQLNSKVRTELFSSTGNQTIANLGGRLATNLSNAGISAGINTAVNGGSLKDNLGNAALGALVNSFQGEAASKIKTTFSDDYVAKQFAHALAGCVSGLVQGKCKDGAIGAAVGEIVAESILGGRNPATLSDAEKHKVISYSKIIAGSVAALNGGDVNTAANAAEVAVVNNALNFDSTPTNAKKHQPQKPDKTALEKIIQSIMPAHAAGAMTNPQDKDAAIWISNIRNGITGPIVITSYGVYAAGWTAPLIGTAGKLAISTCMANPSGCTVMVTQAAEAGAGIATGAVTVGNAWEXXHTLN

SEQ ID NO: 22781 - protein, 457 aa, Neisseria meningitidis; identical to SEQ ID NO: 15320

SEQ ID NO: 22782 - protein, 214 aa, Neisseria meningitidis; identical to SEQ ID NO: 3176

SEQ ID NO: 22783 - protein, 269 aa, Neisseria meningitidis
MRPYATTIYQLFILFIGSVFTMTSCEPVNEKTDQKAVSAQQAKEQTSFNNPEPMTGFEHTVTFDFQGTKMVIPYGYLARYTQDNATKWLSDTPGQDAYSINLIEISVYYKKTDQGWVLEPYNQQNKAHFIQFLRDGLDSVDDIVIRKDACHLNQDLGKSLLDLGFKKIPSVYPEYEAYEDKRSIPENPYIHELQYIKKGENPAIITHQNYHRYGENDYSTDIGSCINGFTVQYYPFIREKQQLTQQELVGYHQQVEQLVQSFVNNSSKK

SEQ ID NO: 22784 - protein, 1201 aa, Neisseria meningitidis
MFHFAFPAQTALRQAITDAYRRNEIEAVQDMLQRAQMSDEERNAASELARRLVTQVRAGRTKAGGVDALMHEFSLSSEEGIALMCLAEALLRIPDNATRDRLIADKISDGNWKSHLNNSPSLFVNAAAWGLLITGKLTATNDKQMSSALSRLIGKGGAPLIRQGVNYAMRLLGKQFVTGQTIEEALQNGKEREKMGYRFSFDMLGEAAYTQADADRYYRDYVEAIHAIGKDAAGQGVYEGNGISVKLSAIHPRYSRAQHGRVMGELLPRLKELFLLGKKYDIGINIDAEEANRLELSLDLMEALVSDPDLAGYKGIGFVVQAYQKRCPFVIDYLIDLARRNNQKLMIRLVKGAYWDSEIKWAQVDGLNGYPTYTRKVHTDISYLACARKLLSAQDAVFPQFATHNAYTLGAIYQMGKGKDFEHQCLHGMGETLYDQVVGPQNLDRRVRVYAPVGTHETLLAYLVRRLLENGANSSFVNQIVDENISIDRLIKSPFDTIAEQGIHLHNALPLPRDLYGKGRLNSQGVDFSNETVLQQLQEQMNKAAAQDFHAASIVNGKARDVGEAQPIKNPADHGDVVGTVSFADAALAQEAVGAAVAAFPEWSATPAAERAACLRRFADLLEQHTPALMMLAVREAGKTLNNAIAEVREAVDFCRYYANEAEHTLPQDAKAVGAIVAISPWNFPLAIFTGEVVSALAAGNTVIAKPAEQTSLIAGYAVSLMHEAGIPTSALQLVLGAGDVGAALTNDARIGGVIFTGSTEVARLINKALAKRGDNPVLIAETGGQNAMIIDSTALAEQVCADVLNSAFDSAGQRCSALRILCVQEDVADRMLDMIKGAMDELVVGKPIQLTTDVGPVIDAEAQQNLLNHINKMKGVAKSYHEVKTAADVDSEKSTFVRPILFELNNLNELQREVFGPVLHVVRYRADKLDSVIDQINSKGYALTHGVHSRIEGTVRHIRSRIEAGNVYVNRNIVGAVVGVQPFGGHGLSGTGPKAGGSFYLQKLTRIPEWVAPTLSQIGQADEAALKRLEALVHKLPFNAEEKKAAAAALGHARIRTLRRAETVLTGPTGERNSISWHAPKRVWIHGGSTVQAFAALTELAASGIQAVVEPDSPLASYTADLEGLLLVNGKPETAGISHVAALSPLDSARKQELAAHDGALIRILPSENGLDILQVFEEISCSVNTTAAGGNASLMAVAD

SEQ ID NO: 22785 - protein, 475 aa, Neisseria meningitidis
MIHTEPSAQPSTMDTAAFLKHIESAFRRIFSDGIDLMRYLPEDKWLALKQAGLLLPFLDKKYGGRKGSQFEIQEVLRIAGHYGVPVTLRTGIEGALVLQPLQEFGDEAQVAQGLEMIFKGEGGGLGVTEPETSGAAIAREMQSYYEYIDGQTIYVNAAKYWQGNSQSDFLLVAAKERKNGKLAKVIDLLLVPKTYIRCETLASEGLRAVRYAVNRIDAEMPATAVMKLSQSDAAGLRAFQNIFIRSRLQLIGMTHGIMEYILENLERYVRNDIKFVDYERREIRRRHQVSEILYRYVCHSVSPVAPVAHQLMEANIVKTLATEYTYAAAQMLQKLLGAKGFERGHTAGNIAIDIRPFTIFEGPNDMLYAEIYDQFVRATAEEKEAGMKLDKNQTLLDRLQTDARFAAVARDYTLPEDIRSFLQEHTLTDACALQKVFIGKIIARLFVFVQAKHEDTAAFLLNDIRKDILDCRYCG

SEQ ID NO: 22786 - protein, 156 aa, Neisseria meningitidis
LNITVLAVGTKMPRWVDEAVAEYAKRFGRDVAYALKEIKPEKRGAGVNAAQGMAAEEKRILEAIPQGAFLVVLDERGKAPTSVELAEHLKSWQQNGEHVCFVIGGADGMTDRLKQQARMMMRLSSLTLPHGMVRVLLTEQLYRAASILHNHPYHRE

SEQ ID NO: 22787 - protein, 172 aa, Neisseria meningitidis; identical to SEQ ID NO: 471

SEQ ID NO: 22788 - protein, 140 aa, Neisseria meningitidis; identical to SEQ ID NO: 5192

SEQ ID NO: 22789 - protein, 291 aa, Neisseria meningitidis
MPTVRFTESVSKHDLDALFEWAKASYGAESCWKTLYLNRLPLGNLSPEWAERVKKDWEAGCSESSDGIFLNADGWSDMGGRLQHLARTWNKAGLLHGWRNECFDLTDGGGNPLFTLERAAFRPFGLLSRAVHLNGLTESDGRWHFWIGKRSPHKAVDPDKLDNIAAGGVSGGEMPSEAVCRESSEEAGLDKTLFPFIRPVSRLHSLRPVSRGVHNEILYVFDAVLPETFLPENQDGEVACFEKMDIGSLVATMLSGNMMHDAQLVTLDAFCRYGLIDAAHPLSEWLDGIRL

SEQ ID NO: 22790 - protein, 718 aa, Neisseria meningitidis; identical to SEQ ID NO: 6011

SEQ ID NO: 22791 - protein, 370 aa, Neisseria meningitidis
MSTFFQQTAQAMIAKHIDRFPLLKLDQVIDWQPIEQYLNRQKNRYLRDHRGRPAYPLLSMFKAVLPGQWHSLSDPELEHSLITRIDFNLFCRFDELSIPDYSTLCRYRNWLAQDDTLSELLKLINRQLTEKGLKIEKASAAVVDATIIQTAGSKQRQTIEVDEEGQISGQTTPSKDSDARWIKKNGLYKLGYKQHTRTDAEGYIEKLHITPANAHECKHLSPLLEGLPKGTTVYADKGYDSAENRQHLEECQLLDGIMRKACRNRPLAEAQTKRNRYLSKTRYSGLNLNQDKATKPQTVQIVRQGEATPYWFKFNPLYVVEQSFGTLHRKFRYARAAYFGLIKVSAQSHLKAMCLNLLKAANRLSAPAAA

SEQ ID NO: 22792 - protein, 237 aa, Neisseria meningitidis; identical to SEQ ID NO: 6270

SEQ ID NO: 22793 - protein, 300 aa, Neisseria meningitidis; identical to SEQ ID NO: 2507

SEQ ID NO: 22794 - protein, 269 aa, Neisseria meningitidis
MRPYATTIYQLFILFIGSVFTMTSCEPVNEKTDQKAVSAQQAKEQTSFNNPEPMTGFEHTVTFDFQGTKMVIPYGYLARYTQDNATKWLSDTPGQDAYSINLIEISVYYKKTDQGWVLEPYNQQNKAHFIQFLRDGLDSVDDIVIRKDACSLSTTMGERLLTYGVKKMPSAYPEYEAYEDKRHIPENPYFHEFYYIKKGENPAIITHRNYHRYGENDYSTSVGSCINGFTVRYYPFIREKQQLTQQELVGYHQQVEQLVQSFVNNSSKK

SEQ ID NO: 22795 - protein, 113 aa, Neisseria meningitidis; identical to SEQ ID NO: 14617

SEQ ID NO: 22796 - protein, 757 aa, Neisseria meningitidis
MNITQILSQELSATAAQITAAVELLDDGATVPFIARYRKEATGGLDDTQLRRLAERLQYLRELEERKAVVLKSIEEQGKLSDDLRAQIEAADNKTALEDLYLPYKPKRRTKAQIAREHGLQPLADVLLAEQPLDVEAAAQGYLNENVPDAKAALDGARAILMEQFAEDAELIGTLRDKLWNEAEIHAQVVGGKETEGEKFSDYFDHREPIRAMPSHRALAVLRGRNEGVLNIALKYQPDDTPITQQSEYEQIIARRFKVSDGHKWLRDTVRLTWRAKIFLSLELEALNRLKEAADTDAITVFARNLKDLLLAAPAGRLTTLGLDPGYRNGVKCAVVDDTGKLLDTVIVYLHQENNMLATLSRLIKQHGVKLIAIGNGTASRETDKIAGELVREMSKMGLHKIVVSEAGASIYSASELAAREFPDLDVSLRGAVSIARRLQDPLAELVKIDPKSIGVGQYQHDVNQSQLAKSLDAVVEDCVNAVGVDVNTASAPLLARISGLNQTLAQNIVAYRDENGAFDSRKKLLKVPRLGEKTFEQAAGFLRINGGKEPLDASAVHPEAYPVVAKMLAQQGISAAELIGNRERVKQIKASDFTDERFGLPTILDILSELEKPGRDPRGEFQTASFAEGIHEISDLQVGMILEGVVSNVANFGAFVDIGVHQDGLVHISALSNKFVQDPREVVKAGDVVKVKVLEVDAARKRIALTMRLDDEPGGAKHKMPSENRSRERTAGRKPQRNDRAPANSAMADAFAKLKR

SEQ ID NO: 22797 - protein, 160 aa, Neisseria meningitidis; identical to SEQ ID NO: 182

SEQ ID NO: 22798 - protein, 354 aa, Neisseria meningitidis; identical to SEQ ID NO: 14321

SEQ ID NO: 22799 - protein, 112 aa, Neisseria meningitidis; identical to SEQ ID NO: 16021

SEQ ID NO: 22800 - protein, 566 aa, Neisseria meningitidis
MSVKIQTRSVNTDVFNHLLTAGADPLIARLCASRGVQSPAELDDKLASLLPYQTLTNCEAAAGRLADAVERKEKILIVADYDADGATACSVGMSGLAAMGAKVDFLVPNRFEHGYGLTPELAEIAAEQGVDLLITVDNGIASIAGVARAQALGLDVIVTDHHLPAETVPDCIIVNPNQKGCGFPSKSLAGVGVIFYVLMALRAELRRRNYFSDGIKEPNLGELLDLVALGTVADVVPLDHNNRILVSQGLKRMRSGKMRPGIRALFEVARRDWRKAQPFDMGFALGPRINAAGRLDDMSVGIACLLAQDDAEAQELAAQLNNLNIERREIEQSMLQDALNAFPETLPPGQTTLVAYRDDFHQGVVGIVASRLKDRFYRPTIVFAPADNGEVRGSGRSIPNLHLRDALDLVSKRHPDLILKFGGHAMAAGLSILEHNIPAFQTAFEEAVREMVCEDDLSQTFITDGSLPARDITLEQAQNLARHVWGQGFAPPSFTDEFHVVRQQPLGAEGKHKKVWLQKDGYEFEAMFWRCSEDIPEYIRTVYRLVANEWRNNLELQLYIDYWEAA

SEQ ID NO: 22801 - protein, 97 aa, Neisseria meningitidis; identical to SEQ ID NO: 910

SEQ ID NO: 22802 - protein, 237 aa, Neisseria meningitidis; identical to SEQ ID NO: 6806

SEQ ID NO: 22803 - protein, 462 aa, Neisseria meningitidis; identical to SEQ ID NO: 8923

SEQ ID NO: 22804 - protein, 190 aa, Neisseria meningitidis; identical to SEQ ID NO: 4848

SEQ ID NO: 22805 - protein, 100 aa, Neisseria meningitidis; identical to SEQ ID NO: 1675

SEQ ID NO: 22806 - protein, 201 aa, Neisseria meningitidis; identical to SEQ ID NO: 2273

SEQ ID NO: 22807 - protein, 130 aa, Neisseria meningitidis
MYSFEANANAVKISETVSVDTGQGAKIHKFVPKNSKTYSSDLIKTVDLTHIPTGAKARINAKITASISRAGVLAGVGKLARLGAKFSTRAVPYVGTALLAHDVYETFKEDIQARGYQYDPETDKFAKVSG

SEQ ID NO: 22808 - protein, 103 aa, Neisseria meningitidis; identical to SEQ ID NO: 392

SEQ ID NO: 22809 - protein, 147 aa, Neisseria meningitidis; identical to SEQ ID NO: 2466

SEQ ID NO: 22810 - protein, 83 aa, Neisseria meningitidis; identical to SEQ ID NO: 5347

SEQ ID NO: 22811 - protein, 216 aa, Neisseria meningitidis; identical to SEQ ID NO: 4887

SEQ ID NO: 22812 - protein, 177 aa, Neisseria meningitidis
MFPPDKTLFLCLSALLLASCGTTSGKHRQPKPKQTVRQIQAVRISHIDRTQGSQELMLHSLGLIGTPYKWGGSSTATGFDCSGMIQFVYKNALNVKLPRTARDMAAASRKIPDSRLKAGDLVFFNTGGAHRYSHVGLYIGNGEFIHAPSSGKTIRTEKLSTPFYAKNYLGVHTFFTE

SEQ ID NO: 22813 - protein, 115 aa, Neisseria meningitidis; identical to SEQ ID NO: 7399

SEQ ID NO: 22814 - protein, 487 aa, Neisseria meningitidis; identical to SEQ ID NO: 6113

SEQ ID NO: 22815 - protein, 424 aa, Neisseria meningitidis; identical to SEQ ID NO: 4741

SEQ ID NO: 22816 - protein, 469 aa, Neisseria meningitidis; identical to SEQ ID NO: 15880

SEQ ID NO: 22817 - protein, 384 aa, Neisseria meningitidis; identical to SEQ ID NO: 6554

SEQ ID NO: 22818 - protein, 344 aa, Neisseria meningitidis; identical to SEQ ID NO: 6064

SEQ ID NO: 22819 - protein, 225 aa, Neisseria meningitidis; identical to SEQ ID NO: 7182

SEQ ID NO: 22820 - protein, 542 aa, Neisseria meningitidis; identical to SEQ ID NO: 16970

SEQ ID NO: 22821 - protein, 431 aa, Neisseria meningitidis
MLDIQLLRSNTAAVAERLARRGYDFDTARFDALEERRKSVQVKTEELQASRNSISKQIGALKGQGKHEEAQAAMDQVAQIKTDLEQAAADLEAVQKELDAWLLSIPNLPHEDVPFGKDETENVEVRKVGTPREFDFEIKDHVDLGEPLGLDFEGGAKLSGARFTVMRGQIARLHRALAQFMLDTHTLQHGYTEHYTPYIVDDTTLQGTGQLPKFAEDLFHVTRGGDETKTTQYLIPTAEVTLTNTVADSIIPSEQLPLKLTAHSPCFRSEAGSYGKDTRGLIRQHQFDKVEMVQIVHPEKSYEALEEMVGHAENILKALELPYRVITLCTGDMGFGAAKTYDLEVWVPAQNTYREISSCSNCEDFQARRLKARFKDENGKNRLVHTLNGSGLAVGRTLVAVLENHQNADGSINIPAALQPYMGGVAKLEVK

SEQ ID NO: 22822 - protein, 102 aa, Neisseria meningitidis; identical to SEQ ID NO: 1826

SEQ ID NO: 22823 - protein, 301 aa, Neisseria meningitidis; identical to SEQ ID NO: 2409

SEQ ID NO: 22824 - protein, 96 aa, Neisseria meningitidis; identical to SEQ ID NO: 1755

SEQ ID NO: 22825 - protein, 413 aa, Neisseria meningitidis; identical to SEQ ID NO: 13940

SEQ ID NO: 22826 - protein, 171 aa, Neisseria meningitidis
MKRTKKYPFLTLQRQRFHLNFENASSAAGIPAERDFYRWAWSALKNEYRRADISLILLDEEEARAYNRDYRGKDYATNVLSFALNEGEILPCQVSEKLYGDLIICPQVVLKEAAEQGKTPERHFAHLTIHGTLHLMGYDHIEDDEAEIMEAEEIRLMRAAGFPNPYQEDGH

SEQ ID NO: 22827 - protein, 206 aa, Neisseria meningitidis; identical to SEQ ID NO: 6659

SEQ ID NO: 22828 - protein, 262 aa, Neisseria meningitidis; identical to SEQ ID NO: 256

SEQ ID NO: 22829 - protein, 305 aa, Neisseria meningitidis; identical to SEQ ID NO: 6970

SEQ ID NO: 22830 - protein, 389 aa, Neisseria meningitidis; identical to SEQ ID NO: 1971

SEQ ID NO: 22831 - protein, 151 aa, Neisseria meningitidis; identical to SEQ ID NO: 4906

SEQ ID NO: 22832 - protein, 431 aa, Neisseria meningitidis
MIRPDFQEYLPSYYFSSVNPHTVYPKLQCRLKTDTCIIGGGLSGLCTALPLAEQGHETVVLEAARIGFGASGRSGGQVISDYACGMEEIEKQVGLERAQWFWQQSLQAVELVDERVRKHAVDCDWQRGYATVAVRPQHWEELQQWHEHAQRHYGASHYQLWDKAELKQQLDSDMYQGAQFDPLSGHLHPLTYTLGIARAAAEAGAQIFEQSPMTCIEPHQNGWLVYTPEGSVECKNVVYAVNTYAGLNPIFRPLERKAIAVSTFIIATEPLGARAKGLIRNNMAVCDNRHILDYYRLSADGRLLFGGKDNEFIDNPERMTELVRQDMLKVFPQLADVKIEYSWGGECDITANLVPHFGRLAPNVFYAQGYSGHGMAITGIAGLAVAEAILGDECRLKPFERLRQPNIILQPFLRKLGSFLGSKYYQWKDSR

SEQ ID NO: 22833 - protein, 219 aa, Neisseria meningitidis; identical to SEQ ID NO: 15082

SEQ ID NO: 22834 - protein, 384 aa, Neisseria meningitidis; identical to SEQ ID NO: 7860

SEQ ID NO: 22835 - protein, 393 aa, Neisseria meningitidis; identical to SEQ ID NO: 5005

SEQ ID NO: 22836 - protein, 459 aa, Neisseria meningitidis
MQDYGISVCLTLTPYLQHELFSAMKSYFSKYILPVSLFTLPLSLSPSVSAFTLPEAWRAAQQHSADFQASHYQRDAVRARQQQAKAAFLPHVSANASYQRQPPSISSTRETQGWSVQVGQTLFDAAKFAQYRQSRFDTQAAEQRFDAAREELLLKVAESYFNVLLSRDTVAAHAAEKEAYAQQVRQAQALFNKGAATALDIHEAKAGYDNALAQEIAVLAEKQTYENQLNDYTGLDSKQIEAIDTANLLARYLPKLERYSLDEWQRIALSNNHEYRMQQLALQSSGQALRAAQNSRYPTVSAHVGYQNNLYTSSAQNNDYHYRGKGMSVGVQLNLPLYTGGELSGKIHEAEAQYGAAEAQLTATERHIKLAVRQAYTESGAARYQIMAQERVLESSRLKLKSTETGQQYGIRNRLEVIRERQEVAQAEQKLAQARYKFMLAYLRLVKESGLGLETVFAE

SEQ ID NO: 22837 - protein, 381 aa, Neisseria meningitidis
MTETQSLELAKELISRPSVTPDDQNCQKLLAERLHKIGFAAEELHFGDTKNIWLRRGTKAPVVCFAGHTDVVPTGPVEKWDSPPFEPAERDGRLYGRGAADMKTGIACFVTACERFVAEHPDHQGSIALLITSDEEGDALDGTTKVVDVLKARDELIDYCIVGEPTAVDKLGDMIKNGRRGSLSGNLTVKGKQGHIAYPHLAINPVHTFAPALLELTQEVWDEGNKYFPPTSFQISNINGGTGATNVIPGELSVKFNFRFSTESTEAGLKQRVHAILDKHGVQYDLQWSCSGQPFLTHAGKLTDVARAAIAEICGVETELSTTGGTSDGRFIKAIAKELIELGPSNATIHQINENVRLNDIPKLSAVYEGILARLLAGNAV

SEQ ID NO: 22838 - protein, 731 aa, Neisseria meningitidis
MCKPNYGGIVLLPLLLASCIGGNFGVQPVVESTPTAYPVTFKSKDVPTPPPAGSSVEITPVNQPAVGAAMRLPRRNIAAFDKNGNEIPDSKQAEEYLPLKEEDILFLDGTPKEQADKLKKEINGRYPNVTIYTSDLKDAVYKYEHVRAGYVYTRFGTDEIEQNSGGKRVAHRLGYDGFVYYSGERPSQSLPSAGTVEYSGNWQYMTDAKRHRAGQAVGIDNLGYITFYGNDVGATSYAAKDVDEREKHPAKYTVDFDKKTLTGQLIKNQYVQKKTDEKKPLTIYNITAELDGNRFTGSASVNPELKTSHSGKEYLFFHDNANQRLEGGFFGDNGEELAGRFISNDNSVFGVFAGKQKTDASNASDTNPALPSGKHTKILDSLKISVDEATDDHARKFAISTMPDFGHPDKLLVEGREIPLVSQEKIIELADGRKMTVRACCDFLTYVKLGRIKTERPAVQPKAQDEEGDEEDTGVDSVEEGEDEIDDEDEVSEEDAEEIEEEADEVEEEEAEADEAEETEEESPTEESGSGSNAILPTPEAPKGRDIDLFLKGIRTAETDIPQTGKAHYTGTWEARIGEPIQWDNHADKAAKAVFTVDFGEKSISGKLTEQNGVEPAFYIENGKIEGNGFHATAHTRESGINLSGTGSTKPQSFKASNLRVEGGFYGPQAAELGGTIFNNDGKSLGITENIENEVEVEVEADVGKQLEPDEVKHKFGVVFGAKKDMQEVEK

SEQ ID NO: 22839 - protein, 461 aa, Neisseria meningitidis; identical to SEQ ID NO: 19902

SEQ ID NO: 22840 - protein, 97 aa, Neisseria meningitidis; identical to SEQ ID NO: 6454

SEQ ID NO: 22841 - protein, 218 aa, Neisseria meningitidis
MKNKTKVWDFPTRLFHWLLAASLPFMWYSAKTGGDMLQWHTRVGLFILFLLVFRLCWGIWGSDTARFSRFVRGWSGIRDYLKNGIPEHIQPGHNPLGALMVVALLAAVSFQVGTGLFAADENTFSTNGYLNHLVSEHTGSLMRKIHLNFFKLLAVFSAIHIAAVAAYRVFKKKNLVLPMITGFKYIEGKTSIRFAGKTALAAALSVAALVAAAILLLS

SEQ ID NO: 22842 - protein, 101 aa, Neisseria meningitidis; identical to SEQ ID NO: 12949

SEQ ID NO: 22843 - protein, 206 aa, Neisseria meningitidis; identical to SEQ ID NO: 7075

SEQ ID NO: 22844 - protein, 107 aa, Neisseria meningitidis; identical to SEQ ID NO: 7717

SEQ ID NO: 22845 - protein, 165 aa, Neisseria meningitidis; identical to SEQ ID NO: 2055

SEQ ID NO: 22846 - protein, 223 aa, Neisseria meningitidis; identical to SEQ ID NO: 1947

SEQ ID NO: 22847 - protein, 229 aa, Neisseria meningitidis; identical to SEQ ID NO: 2235

SEQ ID NO: 22848 - protein, 51 aa, Neisseria meningitidis; identical to SEQ ID NO: 1536

SEQ ID NO: 22849 - protein, 531 aa, Neisseria meningitidis; identical to SEQ ID NO: 6044

SEQ ID NO: 22850 - protein, 81 aa, Neisseria meningitidis
MTEQEIYRLLRDTLTELFEIEPERITPDTNLYEDLEIDSIDAIDLIDRIKRETGRKLQAEDFRNVRTVNDVVQAVLKIQAG

SEQ ID NO: 22851 - protein, 459 aa, Neisseria meningitidis; identical to SEQ ID NO: 10798

SEQ ID NO: 22852 - protein, 258 aa, Neisseria meningitidis; identical to SEQ ID NO: 8194

SEQ ID NO: 22853 - protein, 125 aa, Neisseria meningitidis; identical to SEQ ID NO: 17372

SEQ ID NO: 22854 - protein, 216 aa, Neisseria meningitidis
LLKLINRQLTEKNLKVEKASAAVIDATIIQTAGSKQRQAIEVDEEGQISGQTTPSKDSDARWIKKNGLYKLGYKQHTRTDAEGYIEKLHITPANAHECKHLPPLLEGLPKGTTVYADKGYDSAENRQHLEERQLLDGIMRKACRNRPLTETQTKHNRYLSKIRYVVEQSFGTLHRKFRYARAAYFGLIKVSAQSHLKAMCLNLLKAANRLSAPAAA

SEQ ID NO: 22855 - protein, 364 aa, Neisseria meningitidis
MKTNLLNYDLQGLTRHFADMGEKPFRAKQVMRWMHQSGAQNFNEMTDLAKSLRHKLNEQAGIEIPKLMMSQKSSDGTRKWLLDVGTGNGVETVFIPESDRGTLCISSQVGCALECTFCSTGRQGFNRNLTAAEIIGQLWWANKAMGVTPKNERVISNVVMMGMGEPMANFDNVVTALSIMLDDHGYGLSRRRVTVSTSGMVPQMDRLRDVMPVALAVSLHASNDEVRNQIVPLNKKYPLKELMAACQRYLVKAPRDFITFEYVMLDGINDKAQHARELIELVTDVPCKFNLIPFNPFPNSGYERSSNENIRVFRDILQQAGFVVTVRKTRGDDIDAACGQLAGQVQDKTRRQQKWQQILIGQQG

SEQ ID NO: 22856 - protein, 310 aa, Neisseria meningitidis
MKQNRTFTFPDFRTVYSYAPLYRLQHLKYTLRKFFGKKEIYAFEQFVNASPIRQGLFLHCPQNAYPLLREFVDRRFNCKRRLDAMTADFLMAEKLFGTDILHQMEDYRFHLVLAHLSDGISLWLNRNDNCVEEGAWSLSLRDEAGNRLYMATFAFVGTHLLTASVQGPAGEEAKDTVRRITKQLHGLRPQQLMVTALQYFAAVLGLDGAMGIAQKHQVKLRWKLKKRVKMNYDAFWQEYGASLERDGYWHLPQTPARKDLADIESKKRSMYRKRYEMLDNMVAEMKDSLKTEARGISDGIQTEKPLRRTA

SEQ ID NO: 22857 - protein, 363 aa, Neisseria meningitidis
MSLKCGIVGLPNVGKSTLFNALTQSGIEAANYPFCTIEPNVGIVEVPDPRMAELAKIVNPQKMQPAIVEFVDIAGLVAGASKGEGLGNQFLANIRETDAIVNVVRCFDDDNIVHVAGRVDPIADIETIGTELALADLASVEKAIVREEKRARSGDKDAQKLVDLCKKLLPHLDEGKPVRSFGLDAEERAMLKPLFLLTAKPAMYVGNVAEDGFENNPHLDRLKELAAKENAPVVAVCAAMESEIAELEDDEKAEFLAEMGLEEPGLNRLIRAGYDLLGLQTYFTAGVKEVRAWTIHKGDTAPQAAGVIHTDFERGFIRAQVIAYDDFVSLGGEAKAKEAGKMRVEGKEYVVQDGDVMHFLFNV

SEQ ID NO: 22858 - protein, 351 aa, Neisseria meningitidis
MPSETRLPNFIRTLIFALSFIFLNACSEQTAQTVTLQGETMGTTYTVKYLSNNRDKLPSPAEIQKRIDDALKEVNRQMSTYQPDSEISRFNQHTAGKPLRISSDFAYVTAEAVRLNRLTHGALDVTVGPLVNLWGFGPDKSVTREPSPEQIKQAASYTGIDKIILKQGKDYASLSKTHPKAYLDLSSIAKGFGVDKVAGELEKYGIQNYLVEIGGELHGKGKNARGEPWRIGIEQPNIVQGGNTQIIVPLNNRSLATSGDYRIFHVDKNGKRLSHIINPNNKRPISHNLASISVVADSAMTADGLSTGLFVLGETEALKLAEQEKLSVFLIVRDKGGYRTAMSSEFEKLLR

SEQ ID NO: 22859 - protein, 266 aa, Neisseria meningitidis; identical to SEQ ID NO: 14691

SEQ ID NO: 22860 - protein, 320 aa, Neisseria meningitidis
MQARLLIPILFSVFILSACGTLTGIPSHGGGKRFAVEQELVAASARAAVKDMDLQALHGRKVALYIATMGDQGSGSLTGGRYSIDALIRGEYINSPAVRTDYTYPRYETTAETTSGGLTGLTTSLSTLNAPALSRTQSDGSGSKSSLGLNIGGMGDYRNETLTTNPRDTAFLSHLVQTVFFLRGIDVVSPANADTDVFINIDVFGTIRNRTEMHLYNAETLKAQTKLEYFAVDRTNKKLLIKPKTNAFEAAYKENYALWMGPYKVSKGIKPTEGLMVDFSDIQPYGNHMGNSAPSVEADNSHEGYGYSDEAVRRHRQGQP

SEQ ID NO: 22861 - protein, 921 aa, Neisseria meningitidis; identical to SEQ ID NO: 9329

SEQ ID NO: 22862 - protein, 227 aa, Neisseria meningitidis; identical to SEQ ID NO: 598

SEQ ID NO: 22863 - protein, 41 aa, Neisseria meningitidis; identical to SEQ ID NO: 6542

SEQ ID NO: 22864 - protein, 202 aa, Neisseria meningitidis; identical to SEQ ID NO: 597

SEQ ID NO: 22865 - protein, 258 aa, Neisseria meningitidis; identical to SEQ ID NO: 3585

SEQ ID NO: 22866 - protein, 308 aa, Neisseria meningitidis
MSFAFFFPGQGSQSLGMMNGFAGHAVVKNTFAEASAILGQDLWAMINGSDAEIIGQTVNTQPIMLAAGVAVYRAYLEAGGKTPAAVAGHSLGEYTALVAAGALDFADAVKLVRLRAELMQSAVPQGVGAMAAILGLEDEQVKQICAESAQGEVVEAVNFNSPGQVVIAGNTAAVERAMLAAKEAGAKRALPLPVSVPSHCSLMKPAADKLAEALKTVEIKQPQIRVIHNADVAAYDDVDKIKDALVRQLYSPVRWTETVNALVSDGIAESAECGPGKVLAGLAKRINKAAACSALTDAGQIAAFIEAH

SEQ ID NO: 22867 - protein, 408 aa, Neisseria meningitidis; identical to SEQ ID NO: 1777

SEQ ID NO: 22868 - protein, 183 aa, Neisseria meningitidis; identical to SEQ ID NO: 1316

SEQ ID NO: 22869 - protein, 245 aa, Neisseria meningitidis; identical to SEQ ID NO: 3451

SEQ ID NO: 22870 - protein, 299 aa, Neisseria meningitidis
LAADRTIPEPSKTRYLRDYRGRPAYPLLSMFKAVLLGQWHSLSDPELEHSLITRIDFNLFCRFDELSIPDYSTLCRYRNWLAQDNTLSELLELINRQLTEKGLKVEKASAAVIDATIIQTAGSKQRQAIEVDEEGQINGQTTPSKDKDARWIKKNGLYKLGYKQHTRTDAEGYIEKLHITPANAHECKHLSPLLEGLPKGTTVYVDKGYDSAENRQHLEEHQLQDGIMRKACRNRPLTEAQTKRNRYVVEQSFGTLHRKFRYARAAYFGLIKVSAQSHLKAMCLNLLKAANRLSAPAAA

SEQ ID NO: 22871 - protein, 376 aa, Neisseria meningitidis; identical to SEQ ID NO: 2312

SEQ ID NO: 22872 - protein, 324 aa, Neisseria meningitidis
MTEYPGIGSPLFYGVFFAAVLVMIALDMFSLKKNGSHKVGVKEALAWSGLWVAVSCLFAGWLYFELAGNPGYGAAVAKEKVLEFFTGYILEKSLAVDNIFVFLMIFGYFKVAPQFQHRVLLYGVLGALVLRTVMIFVGAALVRQFEWILYLFGAFLLYTGIHMMKPEGDEKEDLANSRLLNAVKKVVPVGTEFHGEKFFTVENGKKIATPLFLVLVMIELSDVVFAVDSIPAVFAVTTDPFIVLTSNIFAILGLRAMYFLLADVAERFIFLKYGLAFVLGFIGVKMLIMHWVHIPISVSLSVVFGALGASILTSLIYTKKQPDK

SEQ ID NO: 22873 - protein, 295 aa, Neisseria meningitidis; identical to SEQ ID NO: 6246

SEQ ID NO: 22874 - protein, 373 aa, Neisseria meningitidis; identical to SEQ ID NO: 20438

SEQ ID NO: 22875 - protein, 246 aa, Neisseria meningitidis; identical to SEQ ID NO: 3525

SEQ ID NO: 22876 - protein, 433 aa, Neisseria meningitidis
MPSETARPLYADTCAAHTLVWFRQNLRIRDNAALCAAVAEGLPIIGIWIDDAETDNPRRAAFYRQSAAELAQGLAGRGIPLYTAASPAELVRLAVRLNIRTVIADESHTFADKLADNALWHELDKHGIALTFVNDRAVFGKTDLIPDGGTAYADFDRYREVWLDRFSKQPPAGPDLFAAYRQPFPENLSAPQPAALSDGIFLPQNSGETAAWRQWRRFLEQADSYSVLKDFPSRKHTSLMGAYLSAGCISPRLLARESLERRLNAWADNIIRRDFFLQLALQHTDDDPSDGNPEHTLRLTLWQQGQTGIPIIDAAMRCLHKTGSLHPALRRLSADFFCHVLNLPRREGEIWFARQLTDFDAAINQGNWWLAASRHTCPDIAAAAHKTDPDGTFVRRHIPELAHLSADTVHTPWRFACSVDTHGYPAYPVAGIP

SEQ ID NO: 22877 - protein, 521 aa, Neisseria meningitidis; identical to SEQ ID NO: 6486

SEQ ID NO: 22878 - protein, 256 aa, Neisseria meningitidis; identical to SEQ ID NO: 3311

SEQ ID NO: 22879 - protein, 252 aa, Neisseria meningitidis
MITIRNVSYRIGTRPILDNVSLDIPEGGITALVGPNGAGKSTLFSFMARLRPLESGSIAYRGKNLADTPTAELAKTLSILTQENSIMSRITVRDLLMFGRYPYHQGRPTAECRRIVNGAIEEFHLQDLSDRYLTELSGGQRQRAMIAMVFCQSTDYVLLDEPLNNLDMYHARSLMQILQKLTREHKRTTVAVLHDINQAAAYADHVVAMKNGKAVLTGTPEEVFTVHNIKELFDMDVDVLDYEGKKLIVHHI

SEQ ID NO: 22880 - protein, 154 aa, Neisseria meningitidis
MKCPFCAHPDTRVADSRLMEERNAVRRRRHCPNCGKRFGTLETAELKMPAVIGPDKKRSPFNAQRLRNDLTAAARKSALTPEQIDETVRLTEHRLYTSGQRDIPSAALADMVLKELLRQDTEAAVRFAALHKRFDNPADFASWLAQAVKTDRKA

SEQ ID NO: 22881 - protein, 174 aa, Neisseria meningitidis
LRSSEMDILLKYWKPVGVLLLIVLIFTAWHFDRAEKYRMGREAAAAEISNRLKDGYIEQAKQARSAEQKAAAAFAERQTKLEEEKQNAEKTVAAMRLELNRLRHYAAAQNRNRNLPATATAATASDGASDSQGWLLFGQCAEKYAGLAETADGHAADLREWQAYGHAVSSQRAE

SEQ ID NO: 22882 - protein, 261 aa, Neisseria meningitidis; identical to SEQ ID NO: 6798

SEQ ID NO: 22883 - protein, 150 aa, Neisseria meningitidis; identical to SEQ ID NO: 2445

SEQ ID NO: 22884 - protein, 160 aa, Neisseria meningitidis; identical to SEQ ID NO: 2526

SEQ ID NO: 22885 - protein, 226 aa, Neisseria meningitidis; identical to SEQ ID NO: 15274

SEQ ID NO: 22886 - protein, 124 aa, Neisseria meningitidis; identical to SEQ ID NO: 2472

SEQ ID NO: 22887 - protein, 427 aa, Neisseria meningitidis; identical to SEQ ID NO: 7408

SEQ ID NO: 22888 - protein, 188 aa, Neisseria meningitidis; identical to SEQ ID NO: 7019

SEQ ID NO: 22889 - protein, 628 aa, Neisseria meningitidis
LGISRKISLILSILAVCLPMHAHASDLANDSFIRQVLDRQHFEPDGKYHLFGSRGELAERSGHIGLGNIQSHQLGNLMIQQAAIKGNIGYIVRFSDHGHEVHSPFDNHASHSDSDEAGSPVDGFSLYRIHWDGYEHHPADGYDGPQGGGYPAPKGARDIYSYDIKGVAQNIRLNLTDNRSTGQRLADRFHNAGAMLTQGVGDGFKRATRYSPELDRSGNAAEAFNGTADIVKNIIGAAGEIVGAGDAVQGISEGSNIAVMHGLGLLSTENKMARINDLADMAQLKDYAAAAIRDWAVQNPNAAQGIEAVSNIFMAAIPIKGIGAVRGKYGLGGITAHPIKRSQMGAIALPKGKSAVSDNFADAAYAKYPSPYHSRNIRSNLEQRYGKENITSSTVPPSNGKNVKLADQRHPKTGVPFDGKGFPNFEKHVKYDTKLDIQELSGGGIPKAKPVFDAKPRWEVDRKLNKLTTREQVEKNVQETRRRSQSSQFKAHAQREWENKTGLDFNHFIGGDINKKGTVTGGHSLTRGDVRVIQQTSAPDKHGVYQATVEIKKPDGSWEVKTKKGGKVMTKHTMFPKDWDEARIRAEVTSAWESRIMLKDNKWQGTSKSGIKIEGFTEPNRTAYPIYE

SEQ ID NO: 22890 - protein, 406 aa, Neisseria meningitidis
MTLFCEQVPYPRLAEAFGTPLYVYSQSALTEAFEHYQTAFAELSPLVCYAVKANGNLSIIKHFASLGSGFDIVSGGELARVLAAGGDAAKTIFSGVGKSEAEIEFALNAGVKCFNMESIPEIDRIQKVAARLGKTASVSLRVNPDVDAKTHPYISTGLKANKFGIAYADALKAYRHVAQQPNLKIIGIDCHIGSQLTDLSPLVEACERILVLVDQLADEGIVLEHLDLGGGVGIVYQDENVPDLGAYAQAVQKLIGTRRLKLILEPGRSLVGNAGALLTRVEFVKYGEEKNFVMVDAAMNDLMRPALYDAYHHIEAVEPKNIAPLTANIVGPICETGDFLGKDRTIACEEGDLLLIRSAGAYGASMASNYNARNRAAEVLVDGNEYRLIRRRETLEQQMANELACL

SEQ ID NO: 22891 - protein, 222 aa, Neisseria meningitidis; identical to SEQ ID NO: 7279

SEQ ID NO: 22892 - protein, 63 aa, Neisseria meningitidis; identical to SEQ ID NO: 7354

SEQ ID NO: 22893 - protein, 1913 aa, Neisseria meningitidis
MNKGLHRIIFSKKHSTMVAVAETANSQGKGKQAGSSVSVSLKTSGDLCGKLKTTLKTLVCSLVSLSMVLPAHAQITTDKSAPKNQQVVILKTNTGAPLVNIQTPNGRGLSHNRYTQFDVDNKGAVLNNDRNNNPFLVKGSAQLILNEVRGTASKLNGIVTVGGQKADVIIANPNGITVNGGGFKNVGRGILTTGAPQIGKDGALTGFDVRQGTLTVGAAGWNDKGGADYTGVLARAVALQGKLQGKNLAVSTGPQKVDYASGEISAGTAAGTKPTIALDTAALGGMYADSITLIANEKGVGVKNAGTLEAAKQLIVTSSGRIENSGRIATTADGTEASPTYLSIETTEKGAAGTFISNGGRIESKGLLVIETGEDISLRNGAVVQNNGSRPATTVLNAGHNLVIESKTNVNNAKGPATLSADGRTMINDATIQAGSSVYSSTKGDTELGGNTRIIAENVTVLSNGSISSAAVIEAQDTAHIESGKPLSLETSTVASNIRLNNGNIKGGKQVVLMADGDIQAKASNLNASGNLYIHAGKDLDLNADKDLSTQSISLRADNTALISSNGNTLTAEKNLDIQAGSLSVRQSNLQSSGGNVQMSATKGNISLNQSWINASQNIDTAALQGNIISDGLTAVAEVGRVSLLANGNVDFNGLNTLIAEGDINAGSVGKGRLKMDNTDIYASAGDVKLVAGGQLDLGNGTVNGGHISLDSNKGSMVVQNVHLNARASLKVDADQTLTINNSKLNSGHNTQINTNHGHMTLNQLDAHSRRHMSISAQGKGKGKDSGQILQNDQQNSKSTLAADGVLSLNSSALQVLDNTTLRGGAINIKAGGGIIKRGHIDWETQDTATMRSAELKPLSGMMSIESGGNNPLTVEPGNRIVSAGDLAVKHNGTFQISARAGNNGNPSAQTASVSAKGNIGIVAGEVDIDAANIAAGKDLALVATKGNISLNSIRNTFSNYQLKTDKHNITQQLTDVEQELSKLTSDPKYRKAQDLPQMLRRKYKRRDKVFGDSEARLRGLRAKINAADEAWAELQSPVKALLERKQLLQQALLTVSQPGSGHENQGSTLSGQNIKLLAAGGIRIQGSKVAATQQANIQAAGFLPAPAAEELQEGRLQSAIDISGVFDTFEYGQQGSDKYGYAIFSRPSEISGKTGVTLSAPNANENSRISLSAANIEAENGKIKIQSYGDQYYYARQSELYTFERRSYKTGKWYNRKHITEVKEHKNAKPDAVNLSASQGIDIKSGGSIDAYATAFDAPKGSINIEAGRKLTLYAVEELNYDKLDSQKRRRFLGISYSKAHDTTTQVMKTALPSRVVAESANLQSGWDTKLQGTQFETTLGGATIRAGVGEQARADAKIILEGIKSSIHTETVSSSKSTLWQKQAGWGSNIETLQLPSFTGPVAPVLTAPGGYIADIPKGNLKTEIEKLAKQPEYAYLKQLQVAKNINWNQVQLAYDRWDYKQEGLTEAGAAIIALAVTVVTSGAGTGAVLGLNGAAAAATDAAFASLASQASVSFINNKGNIGNTLKELGRSSTVKNLVVAAATAGVSNKIGASSLATWSETPWVNNLNVNLANAGSAALINTAVNGGSLKDNLEANILAALVNTAHGEAASKIKQLDQHYIVHKIAHAIAGCAAAAANKGKCQDGAIGAAVGEIVGEALVKNTDFSGMTASEIEKAKANITAYAKLVAGATVGVTGGNVDVAANASETAVKNNALDIIWDIGNLVWDGGKWIYAKSIGDKQMAREAAIDFGVDAAAAAVPFVPAGATKISRGGAYVLKAGDEAVDTAKAIQEIQKQTGIKLTYDKVNKVWTTPAGLDYGLDAKHGNRIKHVLAHTIPNPNKPVHSVFNVSRKEVLPLVDEAWRMKGNPLPNDSSVYLVDMKKPIGTKGETKVRIVVQKGTNKIISAYPQK

SEQ ID NO: 22894 - protein, 275 aa, Neisseria meningitidis; identical to SEQ ID NO: 67

SEQ ID NO: 22895 - protein, 630 aa, Neisseria meningitidis; identical to SEQ ID NO: 5130

SEQ ID NO: 22896 - protein, 144 aa, Neisseria meningitidis; identical to SEQ ID NO: 4528

SEQ ID NO: 22897 - protein, 122 aa, Neisseria meningitidis; identical to SEQ ID NO: 2347

SEQ ID NO: 22898 - protein, 353 aa, Neisseria meningitidis
MDWHERFPELEAQLGAPIEDYAPPKHWTRKQLRSMGRVSYLCVDAAEQALTDAGLLGDESITDGRMGVACGSSSGSTKDIGDVGELLLTGMSRNFSANTYVRMMPYTAAANIGIFFGLKGRIIPTSSACSSGSQGIGYAYEAIKYGLTDMMLAGGGEEFFPSEVYVFDSLYAASRRNGEPEKTPRPYDANRDGLVIGEGAGIFVLEELEHAKRRGAIIYAELVGYGANSDAYHISTPRPDAQGAILAFQTALQHAGLAPEDIGWINLHGTGTHHNDSMESRAVAAVFGNNTPCTSTKPQTGHTLGAAGAIEAAFAWGFADRQSNPEGKLPPQLWDGQNDPDLPAINLTGSGSF

SEQ ID NO: 22899 - protein, 148 aa, Neisseria meningitidis; identical to SEQ ID NO: 4019

SEQ ID NO: 22900 - protein, 704 aa, Neisseria meningitidis; identical to SEQ ID NO: 7337

SEQ ID NO: 22901 - protein, 251 aa, Neisseria meningitidis; identical to SEQ ID NO: 2955

SEQ ID NO: 22902 - protein, 307 aa, Neisseria meningitidis; identical to SEQ ID NO: 14155

SEQ ID NO: 22903 - protein, 410 aa, Neisseria meningitidis; identical to SEQ ID NO: 14901

SEQ ID NO: 22904 - protein, 177 aa, Neisseria meningitidis; identical to SEQ ID NO: 8138

SEQ ID NO: 22905 - protein, 462 aa, Neisseria meningitidis
MNAVVVAVIVMLVLSLSRVHVVLSLTVGAFVGGAVAGMPLQNIADAAGQVSQAGIIPVFNKGLEGGAKIALSYAMLGAFAMAITHSGLPQQLAGAVVRKLNRGGMPDSVRSGEGAVKWLLLSIILVMGMMSQNIIPIHIAFIPMIVPPLLLVFNRLKIDRRLIACVITFGLVTTYMFLPYGFGAIFLNEILLGNIHSAAPQLDVKNINVMAAMAIPALGMLAGLLLAFVHYRKPSLYQSNNADTAGNADAANRPQPSAYRSLAAAAAIAVCFAIQLMYEDSLVLGAMLGFAVFMMLGVINRDKANDVFGEGIKMMAMVGFIMIAAQGFAAVMNATGHIQPLVESSMAIFGNSKGMAALAMLAVGLLVTMGIGSSFSTLPIIAAIYVPLCVGLGFSPLATVAIVGTAGALGDAGSPASDSTLGPTMGLNADGQHDHIRDSVIPTFIHYNIPLLIAGWIAAMVL

SEQ ID NO: 22906 - protein, 219 aa, Neisseria meningitidis; identical to SEQ ID NO: 13997

SEQ ID NO: 22907 - protein, 429 aa, Neisseria meningitidis; identical to SEQ ID NO: 2821

SEQ ID NO: 22908 - protein, 522 aa, Neisseria meningitidis; identical to SEQ ID NO: 14570

SEQ ID NO: 22909 - protein, 307 aa, Neisseria meningitidis; identical to SEQ ID NO: 6517

SEQ ID NO: 22910 - protein, 469 aa, Neisseria meningitidis
MKYISTRGETAHKPFSEVLLMGLAPDGGLMLPEHYPQIGRETLDKWRGLAYPELAFEIMRLFVTDIPEDDLRDILNRTYTEAAFGTKEITPVRTLSDGIKIQALSNGPTLAFKDMAMQFLGNAFEYVLNKEGKKLNILGATSGDTGSAAEYALRGKKGVNVFMLSPDGKMSAFQRAQMYSLQDGNIHNIAVKGMFDDCQDIVKAVQNDAAFKEKYHIGTVNSINWGRIVAQVVYYFAGYFKATQSNDEQVSFCVPSGNFGNVCAGHIAKQMGLPVRRLIVATNENDVLDEFFKTGAYRPRNSAHTYVTSSPSMDISKASNFERFVFDLMDRDPQEINTLWAEVAAGKGFDLRFALDKVGGKYGFTSGKSTHADRLATIRQVYEQDQELIDPHTADGVKVAREVREEGETVVCLETALAAKFDATIREAVGDVAIPRPAALEGLEKLPQRVQTVPNSADAVKGIIEQTLN

SEQ ID NO: 22911 - protein, 671 aa, Neisseria meningitidis
MMKLNPQQLEAVRYLGGPLLVLAGAGSGKTGVITQKIKHLIVNVGYLPHTVAAITFTNKAAAEMQERVAKMLPKPQTRGLTICTFHSLGMKILREEANHIGYKKNFSILDSTDSAKIIGELLGGTGKEAVFKAQHQISLWKNDLKTPEDVVQTASNAWEQQTARLYASYQETLQSYQAVDFDDLIRLPAVLLQQNSEVRNKWQRRLRYLLVDECQDTNTCQFTLMKLLTGAEGMFTAVGDDDQSIYAWRGANMENLRKMQENYPQMKVIKLEQNYRSTARILKIANKVIENNPKLFTKKLWSQFGEGEIVKVVACQSEQHEADWVVSQIVKQKLVGGDKTQYADFAVLYRGNHQARIFEEALRGARIPYRLSGGQSFFDKAEIKDVLSYVRLLANPNDDPAFLRAVTTPKRGIGDVTLGKLNTYAHEHECSLYEAAQNEEALALLNNTNRQHLQTFMDMFGSYRAKAETGEAGELINNLLEEIDYKNHLMQNEEGKAGEIKWRNVGDLVSWFARKGGEDGKNIIELAQTIALMTLLEGKSEEEVDAVKLSTLHASKGLEYPYVFLVGCEEGVLPHNDSIEEGNVEEERRLMYVGITRAKRQLTLTHCIKRKKQGIWQFPEPSRFIDEMPQEDLKILGRKGGEPIVSKEEGRRNLADIIGRLDSMKKGGPAD

SEQ ID NO: 22912 - protein, 284 aa, Neisseria meningitidis; identical to SEQ ID NO: 15986

SEQ ID NO: 22913 - protein, 321 aa, Neisseria meningitidis; identical to SEQ ID NO: 22437

SEQ ID NO: 22914 - protein, 327 aa, Neisseria meningitidis; identical to SEQ ID NO: 6287

SEQ ID NO: 22915 - protein, 299 aa, Neisseria meningitidis; identical to SEQ ID NO: 5911

SEQ ID NO: 22916 - protein, 204 aa, Neisseria meningitidis; identical to SEQ ID NO: 13454

SEQ ID NO: 22917 - protein, 274 aa, Neisseria meningitidis
MIKKTIGGIIPIFTAVFIPASAGAADLMLAQEYKGQDIAGWAMSEKLDGVRAYWDGKHLISRQGYAFTPPKGFTAQFPPYPLDGELYSGRGQFEQISATVRSVSSDWRGIRLHVFDVPKAQGNLYQRLAVATQWLKTHPNAPITIIPQIKVRDRQHAMDFLKQIEAQGGEGVMLRQPESRYSGGRSSQLLKLKSQYDDECTVTRHYEGKGRNAGRLGAVGCKNRHGEFRIGSGFKDKDRDNPPKIGTLITYRYRGFTRKGTPKFATFVRVRTDR

SEQ ID NO: 22918 - protein, 278 aa, Neisseria meningitidis; identical to SEQ ID NO: 3986

SEQ ID NO: 22919 - protein, 144 aa, Neisseria meningitidis; identical to SEQ ID NO: 5717

SEQ ID NO: 22920 - protein, 119 aa, Neisseria meningitidis; identical to SEQ ID NO: 6447

SEQ ID NO: 22921 - protein, 671 aa, Neisseria meningitidis
MKSYPDPYRHFEDLDSAETQNFAAEANAETRARFLNNDKARALSDGILAQLQDTRQIPFCQEHRARMYHFHQDAEYPKGVYRVCTAATYRSGYPEWKILFSVADFDELLGDDVYLGGVSHLVEQPNRALLTLSKSGGDTAYTLEVDLEAGELVEGGFHFPAGKNHVSWRDENSVWVCPAWGERQLTESGYPREVWLVERGKSFEESLPVYQIDKGAMMVNAWRYLDPQGSPIDLIEASDGFYTKTYLQVSSEGEAKPLNLPNDCDVAGYLAGHLLLTLRKDWHRANQSYPSGALVAVKLNRGELGAAQLLFAPDETQALESVETTKRFVVASLLENVQGRLKAWRFADGKWQEVELPRLPSGALEMTDQPWGGDVVYLAAGDFTTPLTLFALDLNVMELTVMRRQPQQFDSDGINVQQFWTTSADGERIPYFHVGKNAAPDTPTLVYAYGGFGVPELPHYLGSIGKYWLEEGNAFVLANIRGGGEFGPRWHQAAQGISKHKSVDDLLAVVRDLSERGISSPQHIGLQGGSNGGLITAAAFVREPQSIGALVCEVPLTDMIRYPLLSAGSSWTDEYGNPQKYEVCKRRLGELSPYHNLSDGIDYPPALITTSLSDDRVHPAHALKFYAKLRETSPQSWLYSPDGGGHTGNGTQREAADELACVLLFLKEFLG

SEQ ID NO: 22922 - protein, 147 aa, Neisseria meningitidis; identical to SEQ ID NO: 1095

SEQ ID NO: 22923 - protein, 526 aa, Neisseria meningitidis
  misc_feature 521, 522: 'Xaa' is any amino acid
MIYGSMPSEKLTIFQTAFVMQVNIQIPCMLYRRGSVKPPLFEAPRLLPSFTDPVVPKLSAPGGYIVDIPKGNLKTEIEKLAKQPEYAYLKQLQTAKNVDWKQVQLAYDKWDYKQEGLTGAGAAIVVIIVTALTYGYGAAAAGSVTAAGSSTAAAATTTAAATTTVSTAAAMQTAALASLYSQAAVAIINNKGDVGKALKDLGTSDTVKQIVTSALTAGALNQMGADIAQLNSKVRTELFSSTGNQTIANLGGRLATNLSNAGISAGINTAVNGGSLKDNLGNAALGALVNSFQGEAASKIKTTFSDDYVAKQFAHALAGCVSGLVQGKCKDGAIGAAVGEIVAESILGGRNPATLSDAEKHKVISYSKIIAGSVAALNGGDVNTAANAAEVAVVNNALNFDSTPTNAKKHQPQKPDKTALEKIIQSIMPAHAAGAMTNPQDKDAAIWISNIRNGITGPIVITSYGVYAAGWTAPLIGTAGKLAISTCMANPSGCTVMVTQAAEAGAGIATGAVTVGNAWEXXHTLN

SEQ ID NO: 22924 - protein, 235 aa, Neisseria meningitidis; identical to SEQ ID NO: 5939

SEQ ID NO: 22925 - protein, 135 aa, Neisseria meningitidis; identical to SEQ ID NO: 4758

SEQ ID NO: 22926 - protein, 130 aa, Neisseria meningitidis; identical to SEQ ID NO: 425

SEQ ID NO: 22927 - protein, 110 aa, Neisseria meningitidis
MQILSFQADIAERMLEGTEGESVNENAQFVRTDNGYWIAWHEGVAALLAPDTPPGIPCFWVEGAESLEELCAMVERGEFDEVEEFDGDDDEWLETAQGCGHHGDACACGH

SEQ ID NO: 22928 - protein, 344 aa, Neisseria meningitidis
MGAGAAFAALVWLVFALGDTLTPFAVAAVLAYVLDPLVEWLQKKGLNRASASMSVMVFSLILLLALLLIIVPMLVGQFNNLASRLPQLIGFMQNTLLPWLKNTIGGYVEIDQASIIAWLQAHTGELSNALKAWFPVLMRQGGNIVSSIGNLLLLPLLLYYFLLDWQRWSCGIAKLVPRRFAGAYTRITGNLNEVLGEFLRGQLLVMLIMGLVYGLGLVLVGLDSGFAIGMVAGILVFVPYLGAFTGLLLATVAALLQFGSWNGILSVWAVFAVGQFLESFFITPKIVGDRIGLSPFWVIFSLMAFGQLMGFVGMLAGLPLAAVTLVLLREGVQKYFAGSFYRGR

SEQ ID NO: 22929 - protein, 88 aa, Neisseria meningitidis; identical to SEQ ID NO: 15524

SEQ ID NO: 22930 - protein, 231 aa, Neisseria meningitidis; identical to SEQ ID NO: 15038

SEQ ID NO: 22931 - protein, 402 aa, Neisseria meningitidis; identical to SEQ ID NO: 2438

SEQ ID NO: 22932 - protein, 65 aa, Neisseria meningitidis; identical to SEQ ID NO: 981

SEQ ID NO: 22933 - protein, 180 aa, Neisseria meningitidis; identical to SEQ ID NO: 5401

SEQ ID NO: 22934 - protein, 157 aa, Neisseria meningitidis; identical to SEQ ID NO: 140

SEQ ID NO: 22935 - protein, 222 aa, Neisseria meningitidis; identical to SEQ ID NO: 197

SEQ ID NO: 22936 - protein, 659 aa, Neisseria meningitidis; identical to SEQ ID NO: 19669

SEQ ID NO: 22937 - protein, 215 aa, Neisseria meningitidis; identical to SEQ ID NO: 8650

SEQ ID NO: 22938 - protein, 62 aa, Neisseria meningitidis
LTLKYTIFLSTSHHSNQTKATHRHTHVGSTAGQTTIRSGGDTTLKGAQLIGIGIQADPQLQP

SEQ ID NO: 22939 - protein, 157 aa, Neisseria meningitidis; identical to SEQ ID NO: 14248

SEQ ID NO: 22940 - protein, 517 aa, Neisseria meningitidis; identical to SEQ ID NO: 8070

SEQ ID NO: 22941 - protein, 339 aa, Neisseria meningitidis
MKKILVTGGTGFIGSHTVVSLLKSGHQVVILDNLCNSSINILPRLKTITGQEIPFYQGDIRDREILRRIFAENRIDSVIHFAGLKAVGESVAEPMKYYDNNVSGSLVLAEEMARAGVFKIVFSSSATVYGDPGKVPYTEDMQPGDTTSPYGTSKSMVERILTDIQKADPRWSVILLRYFNPIGAHESGLIGEQPNGIPNNLLPYICQVASGRLPQLSVFGGDYPTPDGTGMRDYIHVMDLAEGHVAAMQAKSNVAGTHLLNLGSGRASSVLEIIRAFEAASGLTIPYEVKPRRAGDLACFYADPSYAKAQIGWQTQRDLTQMMEDSWRWVSNNPNGYDD

SEQ ID NO: 22942 - protein, 318 aa, Neisseria meningitidis; identical to SEQ ID NO: 562

SEQ ID NO: 22943 - protein, 431 aa, Neisseria meningitidis; identical to SEQ ID NO: 14882

SEQ ID NO: 22944 - protein, 91 aa, Neisseria meningitidis; identical to SEQ ID NO: 5612

SEQ ID NO: 22945 - protein, 81 aa, Neisseria meningitidis; identical to SEQ ID NO: 7714

SEQ ID NO: 22946 - protein, 428 aa, Neisseria meningitidis; identical to SEQ ID NO: 5940

SEQ ID NO: 22947 - protein, 119 aa, Neisseria meningitidis; identical to SEQ ID NO: 420

SEQ ID NO: 22948 - protein, 366 aa, Neisseria meningitidis; identical to SEQ ID NO: 6944

SEQ ID NO: 22949 - protein, 864 aa, Neisseria meningitidis
MSKSAVSPMMQQYLGIKAQHTDKLVFYRMGDFYEMFFDDAVEAAKLLDITLTTRGQVDGEPVKMAGVPFHAAEQYLARLVKLGKSVAICEQVGEVGAGKGPVERKVVRIVTPGTLTDSALLEDKETNRIVAVSPDKKYIGLAWASLQSGEFKTKLTTVDKLDDELARLQAAEILLPDSKNAPQLQTASGVTRLNAWQFAADAGEKLLTEYFGCQDLRGFGLDGKEHAVAIGAAGALLNYIRLTQNLMPQHLDGLSLETDSQYIGMDAATRRNLEITQTLSGKKSPTLMSTLDLCATHMGSRLLALWLHHPLRNRAHIRARQEAVAALESQYKPLQCRLKNIADIERIAARIAVGNARPRDLASLRDSLFELAQIDLSANGSSLLETLKAVFPENLSTAEQLRQAILPEPSVWLKDGNVINHGFHPELDELRRIQNHGDEFLLDLEAKERERTGLSTLKVEFNRVHGFYIELSKTQAEQAPADYQRRQTLKNAERFITPELKAFEDKVLTAQEQALALEKQLFDGVLKNLQTALPQLQKAAKAAAALDVLSTFSALAKERNFVRPEFADYPVIHIENGRHPVVEQQVRHFTANHTDLDHKHRLMLLTGPNMGGKSTYMRQVALIVLLAHTGCFVPADAATIGPIDQIFTRIGASDDLASNRSTFMVEMSETAYILHHATEQSLVLMDEVGRGTSTFDGLALAHAVAEHLLQKNKSFSLFATHYFELTYLPEAHAAAVNMHLSALEQGQDIVFLHQIQPGPAGKSYGIAVAKLAGLPVRALKSAQKHLNGLENQAAANRPQLDIFSTMPSEKGDEPNVGNFVDKSEEKHFEGILAAALEKLDPDSLTPREALSELYRLKDLCKSVS

SEQ ID NO: 22950 - protein, 761 aa, Neisseria meningitidis
MQLLAAEGIHQHQLNVQKSTRFIGIKVGKSNYSKNELNETKLPVRVIAQTAKTRSGWDTVLEGTEFKTTLAGADIQAGVGEKARADAKIILKGIVNRIQSEEKLETNSTVWQKQAGRGSTIETLKLPSFESPTPPKLSAPGGYIVDIPKGNLKTEIEKLSKQPEYAYLKQLQVAKNINWNQVQLAYDRWDYKQEGLTEAGAAIIALAVTVVTSGAGTGAVLGLNGAAAAATDAAFASLASQASVSFINNKGDVGKTLKELGRSSTVKNLVVAAATAGVADKIGASALNNVSDKQWINNLTVNLANAGSAALINTAVNGGSLKDNLEANILAALVNTAHGEAASKIKQLDQHYIVHKIAHAIAGCAAAAANKGKCQDGAIGAAVGEIVGEALTNGKNPDTLTAKEREQILAYSKLVAGTVSGVVGGDVNAAANAAEVAVKNNQLSDKEGREFDNEMTACAKQNNPQLCRKNTVKKYQNVADKRLAASIAICTDISRSTECRTIRKQHLIDSRSLHSSWEAGLIGKDDEWYKLFSKSYTQADLALQSYHLNTAAKSWLQSGNTKPLSEWMSDQGYTLISGVNPRFIPIPRGFVKQNTPITNVKYPEGISFDTNLKRHLANADGFSQKQGIKGAHNRTNFMAELNSRGGRVKSETQTDIEGITRIKYEIPTLDRTGKPDGGFKEISSIKTVYNPKKFSDDKILQMAQNAASQGYSKASKIAQNERTKSISERKNVIQFSETFDGIKFRSYFDVNTGRITNIHPE

SEQ ID NO: 22951 - protein, 268 aa, Neisseria meningitidis; identical to SEQ ID NO: 8872

SEQ ID NO: 22952 - protein, 143 aa, Neisseria meningitidis; identical to SEQ ID NO: 12396

SEQ ID NO: 22953 - protein, 102 aa, Neisseria meningitidis; identical to SEQ ID NO: 427

SEQ ID NO: 22954 - protein, 129 aa, Neisseria meningitidis
MKNVQKGFTLLELMIAVAILGILTLITYPSYKTYIRRIRLTEVRTTLLHNAQTMERYYRQKGTFKTYDKNKLKQNEYFDITLSEVSPDHFTLKATPNPTTNDGETCFVTLNDGGTIAASGTNQSCPGFD

SEQ ID NO: 22955 - protein, 74 aa, Neisseria meningitidis; identical to SEQ ID NO: 15629

SEQ ID NO: 22956 - protein, 47 aa, Neisseria meningitidis
MIWDLLYCVMSAMQPTKKNSWIGYMELSGLSLPKVFQQTPPEDQSAV

SEQ ID NO: 22957 - protein, 107 aa, Neisseria meningitidis
MIIDEKSTSDVLKQYQELGFDLAKPTIIEFFIEGSQKNLQSIESQIISYRQDVQISIEQNEFGGMWTCYCSVNIVPSLENILAIETTLFGIAQKNDCNYEGFGSYGN

SEQ ID NO: 22958 - protein, 1822 aa, Neisseria meningitidis
MKTKRFKINAISLSIFLAYALTPYSEAALVRDDVDYQIFRDFAENKGKFFVGATDLSVKNKQGQNIGNALSNVPMIDFSVADVNKRIATVVDPQYAVSVKHAKAEVHTFYYGQYNGHNDVADKENEYRVVEQNNYEPHKAWSASNLGRLEDYNMARFNKFVTEVAPIAPTDAGGGLDTYKDKNRFSSFVRVGAGRQLVYEKGAYHQEGNEKGYDLRDLSQAYRYAIAGTPYKDINIDQTMNTEGLIGFGNHNTHYSAEELKQALSQDALTNYGVLGDSGSPLFAFDKQKNQWVFLGTYDYWAGYGKKSWQEWNIYKKEFADKIKQRDNAGTIKGYGEHHWKTTGTNSHIGSTAVRLANNERDANNGQNVTFENNGTLVLDQNINQGAGGLFFKGDYTVKGANNDITWLGAGIDVADGKKVVWQVKNPNGDRLAKIGKGTLEINGTGVNQGQLKVGDGTVILNQKADSNQKVQAFSQVGIVSGRGTLVLNSSNQINPDNLYFGFRGGRLDANGNDLTFEHIRNVDEGARIVNHNTDRASTITLTGKSLITAPQNLSVYEIRNDYDDDDYYGYYSYRKPIPQGKDLYYKNYRYYALKSGGSVNAPMPENGQTENNDWILMGSTQEEAKKNAMNHKNNQRISGFSGFFGEENGKGHNGALNLNFNGKSAQNRFLLTGGTNLNGKISVTQGNVLLSGRPTPHARDFVNKSSARKDAHFSKNNEVVFEDDWINRTFKAAEITVNQSASFSSGRNVSNITANITATDNAKVNLGYKNGDEVCVRSDYTGYVTCNTDNLSDKALNSFGATQINGNVNLSQNAALVLGKAALWGQIQGQGNSSVSLNQHSKWHLTGDSQVHNLSLADSHIHLNNASDAQSANKYHTLKINHLSGNGHFHYLTHLAKNLGDKVLVKESASGHYQLHVQDKTGEPNQEGLNLFDASSVRDRSRLSVSLANNHVDLGALRYTIKTENGITRLYNPYAENRRRVKPAPSPATNTASQAQKATQTDGAQIAKPQNIVVAPPSPQANQAEEAKRQQAKAEQVKRQQAEAERKSAKLAKQKAEAEREARELATRQKAEQERSSAELARRHEKEREAAELSAKQKVEAEREAQALAVRRKAEAEEAKRQAAELARRHEKEREAAELSAKQRVGEEERRQTAQSQPQRRKRRAAPQDYMAASQDRPKRRGHRSVQQNNVEIAQAQAELARRQQEERKAAELLAKQRAEAEREAQALAARRKAEAEEAKRQAAELAHRQEAERKAAELSANQKAAAEAQALAARQQKALARQQEEARKAAELAVKQKAETERKTAELAKQRAAAEAAKRQQEARQTAELARRQEAERQAAELSAKQKAETDREAAESAKRKAEEEEHRQAAQSQPQRRKRRAAPQDYMAASQNRPKRRGRRSTLPAPPSPSFDSSAYAAPRALHNPDWYENDYEEIPLDALEDEDVSESVDTSDKQPQDNTELHEKYENDYEEIPLDALEDEDVSESVDTSDKQPQDNTELHEKVETVSLQPRAAQPRAQAAAQPQAQADAVSTNTNSALSDAMASTQSILLDTGASLTRHIAQKSRADAEKNSVWMSNIGYGRDYASAQYRRFSSKRTQTQIGIDRSLSENMQIGGVLTYSDSQHTFDQASGKNTFVQANLYGKYYLNDAWYVAGDIGAGSLRSRLQTQQKANFNRTSIQTGLTLGNTLKINQFEIVPSAGIRYSRLSSADYKLGNDSVKVSSMSVKTLTAGLDFAYRFKVGNLTVKPLLSAAYFANYGKGGVNVGGNSFVYKADNQQQYSAGAALLYRNVTLNVNGSITKGKQLEKQKSGQIKIQIRF

SEQ ID NO: 22959 - protein, 405 aa, Neisseria meningitidis; identical to SEQ ID NO: 3566

SEQ ID NO: 22960 - protein, 274 aa, Neisseria meningitidis
MKWLFTLLAVLNIAVFGGTVGYKLAVKATGGVPENRAVENTPPATPAADNAAASVEDTAALLKPGDILTEEQAEQLRLKKEAEQKKLREKKQREEKARREKLAAEKAQAERENGAADALCAAQASLTMDEDDYHRIKGLLGKWSHVASRSVEKRTAKAKPADKTYRVVLPVSADAENQAAELSAKGFNPIPFDGALSLGVGNSRENAQALQNRLAGAGFGGAYIVEHFAEADRQDDSLSVSRMTVLFTGVNAADADEIRKITSLYGKLNLKSCK

SEQ ID NO: 22961 - protein, 279 aa, Neisseria meningitidis; identical to SEQ ID NO: 2627

SEQ ID NO: 22962 - protein, 628 aa, Neisseria meningitidis
MIYPKTYDVIVVGGGHAGTEAALAAARMGAQTLLLTHNIETLGQMSCNPSIGGIGKGHLVRELDALGGAMALATDKSGIQFRRLNASKGAAVRATRAQADRILYKAAIREMLENQENLDLFQQAVEDVTLDGERISGVITAMGVEFKARAVVLTAGTFLSGKIHIGLEHYEGGRAGDPAAKSLGGRLRELKLPQGRLKTGTPPRIDGRTIDFSQLTEQPGDTPVPVMSVRGNAEMHPRQVSCWITHTNTQTHDIIRSGFDRSPMFTGKIEGVGPRYCPSIEDKINRFADKDSHQIFLEPEGLTTHEYYPNGISTSLPFDIQIALVRSMKGLENAHILRPGYAIEYDYFDPRNLKASLETKTIAGLFFAGQINGTTGYEEAAAQGLLAGANAVQYVREQDPLLLRREQAYLGVLVDDLITKGVNEPYRMFTSRAEYRLQLREDNADMRLTEDGYKIGLVSEAQWRMFNEKREAVEREIQRLKTTWYTPQKLAEGEQIRVFGQKLSREANLHDLLRRPNLDYAALMTLEGAMPSENLSAEVIEQVEIQVKYQGYIDRQNEEIDSRRDIETLKLPDGIDYGKVKGLSAEVQQKLNQHKPETVGQASRISGVTPAAVALLMVHLKRGFKDAK

SEQ ID NO: 22963 - protein, 280 aa, Neisseria meningitidis
MQNHVISLSTAAERRAHIAATFGARGIPFQFFDALMPSERLEQAMAELVPGLSAHPYLSGVEKACFMSHAVLWKQALDEGLPYVAVFEDDVLLGKDAEKFLAEDTWLEERFDKDSAFIVRLETMFAKVIVRPDKVLNYENRSFPLLESEHWGTAGYIISREAMRFFLERFAVLPAEWIKAVDWMMFTYFFDKEGMPVYQVNPALCTQELHYAKFLSKNSMLGSDLEKDREQERRHRRSLKVMFDLKRALGKFGREKKKRMERQRQAELEKAYGRRVISFK

SEQ ID NO: 22964 - protein, 99 aa, Neisseria meningitidis; identical to SEQ ID NO: 2699

SEQ ID NO: 22965 - protein, 478 aa, Neisseria meningitidis
MPLLSVEFALFFLAFLPIYWGLAKYPSVQNLLLLAAGMGWLYHIGPVFAAIVVLYSSCVYLLGELLRSDRENTRRFWLGCGIAVSLTVLGFFKYFDFFRPLIAQYAGQGGAIDILMPLGLSYYTFQSLAYLVYCFRAPHAARFEWHELLLHLSFFPTVTSGPIIRAAAFKSADGEQAGALAQIRTRQPRSPVRPALAVSLILLGIAKKWWLAGMLAENWVSPVFENPAQFDGWGVLGGVYGYTFQLFLDFSGYSDLVIGMAMLLGFRLPKNFSAPLRALNIRAFWDKWHISLSTWIRDYIYIPLGGSKKGFLRTQLNLMAAMVLSGIWHGYGWNFLIWGALHGTALVLLNTGDRYFGRNALCRLKYLAPLSWFVTFHFVCLSFVVFNTASPDDAGAVFNALFANANGWNAPQQANMLLLASFASVMLLYPYLQRAFDGAVKGLEKIPMWLWFIPVSAVLLLIIVLAPSGIPGFIYANF

SEQ ID NO: 22966 - protein, 307 aa, Neisseria meningitidis; identical to SEQ ID NO: 6131

SEQ ID NO: 22967 - protein, 146 aa, Neisseria meningitidis; identical to SEQ ID NO: 6527

SEQ ID NO: 22968 - protein, 211 aa, Neisseria meningitidis; identical to SEQ ID NO: 6559

SEQ ID NO: 22969 - protein, 397 aa, Neisseria meningitidis
MNPKHLIAFSALFAATQANALPVASVSLDTVTVSPSAPYTDTNGLLTDYGNAAASPWMKKLRSVAQGSGETFRILQIGDSHTAGDFFTDSLRKRLQKTWGDGGIGWVYPANVKGQRMAAVRHNGNWQSLTSRSAAADFPLGGILAHTGSGGSMTLTASDGKTGKQRISLFAKPLLAEQTLTVNGNTVSANGGGWQVLDTGAALPLTIQTEMPWDIGFINIENPAGGITVSAMGINGAQLTQWSKWRADRMNDLAQTGADLVILSYGTNEAFGDNIDIADTEQKWLDTVRQIHDSLPAAGILIIGAPESLKNTLGVCGTRPVRLTEVQQMQRRVARQGQTMFWSWQNAMGGICSMKNWLNQGWAAKDGVHFSAKGYRRAAEMLADSLEELVRAAAIRQ

SEQ ID NO: 22970 - protein, 372 aa, Neisseria meningitidis; identical to SEQ ID NO: 3260

SEQ ID NO: 22971 - protein, 469 aa, Neisseria meningitidis; identical to SEQ ID NO: 14555

SEQ ID NO: 22972 - protein, 337 aa, Neisseria meningitidis
LQPLVSVLICAYNAEKYFAQSLAAVVNQTWRNLEILIVDDGSTDGTPAIARRFQEQDGRIRIISNPRNLGFIASLNIGLDALAKSGMGEYIVRTDADDIAAPDWIEKIVGEMEKDADIVAMGSYLEILAEENNKSVLAAIARNGEIWKNPLTHQEITSAFPLRNPIHNNTMIMRRSVIDGGLRFDPAYIHAEDYKFWYEVGKLGRLANYPEALVKYRFHQDQTSSKHNLQQRQTAWKIKEEIRAGYWKAAGITVGSDCPNYRLLKSTAYALHEKALSGQDIGYLRLFLYENFLSLEKYSLTDLLDFLTDRVMRKLFAAPQYRKILKKMLRPWKYRSY

SEQ ID NO: 22973 - protein, 151 aa, Neisseria meningitidis; identical to SEQ ID NO: 6340

SEQ ID NO: 22974 - protein, 868 aa, Neisseria meningitidis
MAANQRYRKPLPGTDLEYYDARAACEDIKPGSYDKLPYTSRILAENLVNRADKVDLPTLQSWLGQLIEGKQEIDFPWYPARVVCHDILGQTALVDLAGLRDAIAEKGGDPAKVNPVVQTQLIVDHSLAVECGGYDPDAFRKNRQIEDRRNEDRFHFINWTKTAFENVDVIPAGNGIMHQINLEKMSPVVQVKNGVAFPDTCVGTDSHTPHVDSLGVISVGVGGLEAETVMLGRASMMRLPDIVGVELTGKRRPGITATDIVLALTEFLRKERVVGAFVEFFGEGARSLSIGDRATISNMTPEFGATAAMFAIDEQTIDYLKLTGRDDAQVKLVETYAKTAGLWADALKTAVYPRVLKFDLSSVTRNMAGPSNPHARFATADLAAKGLAKPYEEPSDGQMPDGAVIIAAITSCTNTSNPRNVVAAALLARNANRLGLQRKPWVKSSFAPGSKVAEIYLKEAGLLPEMEKLGFGIVAFACTTCNGMSGALDPKIQKEIIDRDLYATAVLSGNRNFDGRIHPYAKQAFLASPPLVVAYALAGSIRFDIENDVLGVADGREIRLKDIWPTDEEIDAVVAEYVKPQQFRDVYVPMFDTGKAQKAPSPLYDWRPMSTYIRRPPYWEGALAGERTLRGMRPLAILPDNITTDHLSPSNAILAVSAAGEYLAKMGLPEEDFNSYATHRGDHLTAQRATFANPKLFNEMVKNEDGSVRQGSFARVEPEGETMRMWEAIETYMNRKQPLIIIAGADYGQGSSRDWAAKGVRLAGVEAIAAEGFERIHRTNLIGMGVLPLQFKPGTNRHTLQLDGTETYDVIGERTPRCDLTLVIHRKNGETVEVPVTCRLDTAEEVLVYEAGGVLQRFAQDFLEGNAA

SEQ ID NO: 22975 - protein, 548 aa, Neisseria meningitidis; identical to SEQ ID NO: 14641

SEQ ID NO: 22976 - protein, 185 aa, Neisseria meningitidis; identical to SEQ ID NO: 7784

SEQ ID NO: 22977 - protein, 752 aa, Neisseria meningitidis
MYTRIMEISPWTLRSAKLEKEHKRLQESLTSLGNGYMGMRGSFEETYSADSHLGTYIAGVWFPDKTRVGWWKNGYPKYFGKAINAFNFSKVKIFVDGQEVDLAKNDVAGFSVELDMRHGVLRRSFTVFGVRFNVCKFLSVAQKELAVIRWEAVSVDGKTHQVRIDSIIDADVKNEDSNYEEKFWQVLDKGVSDSLSYIAAQTVANPFGVEQFIVNAEQTFAGSFKALGGSQTDWQVSNSFEVEVGGTPKTFEKRVIVTTSRDYQGLEAVKAAGRALSEKVAGVAFETLLDAHKAGWLHRWEIADVVIEGSDEAQQGIRFNLFQLFSTYYGEDARLNIGPKGFTGEKYGGATYWDTEAYAVPLYLALAEPEVTRNLLQYRRNQLPQAQHNAREQGLAGALYPMVTFTGIECHNEWEITFEEIHRNGAIPYAIYNYTNYTGDEGYLAKEGLEVLVEVSRFWADRVHFSKRNGKYMIHGVTGPNEYENNINNNWYTNTLAAWVLDYTREALAKYPRPDLNVRAAELEKWADISANMYRPHDEELGVFVQHDGFLDKDIRPVSALSPDDLPLNQKWSWDKILRSPFIKQADVLQGIYFFGDRFNIDEKRRNFDFYEPMTVHESSLSPCIHSILAAELGKEEKAVEMYRRTARLDLDNYNNDTEDGLHITSMTGSWLAIVQGFAQMKTWGGTLSFAPFLPGAWTGYAFHINYRGRLIKVAVGKENVVFTLLKGEPLDLQVYGKDITLNGSHTVALEK

SEQ ID NO: 22978 - protein, 1029 aa, Neisseria meningitidis
MNQNHFSLKILTVMLLSAYGGSFADGVVPVSDGNTVSLDTVNVRGSHALSGKTEKTRSYTIDRMSTATGMRIAGKDTPQSVSVITRSRLDDKAVHTLEEAMKNTTGVNVVRDSGLQTRFLSRGFYIDQIGEDGITVNVAGRSGYTAKIDVSPSTDLAVYDHIEVVRGATGLTQSNSEPGGTVNLIRKRPTASFKHTGELTADHRGSRRAVLDVSGSLNKANTLRGRLVGAEEYKKSFKDRVWGRKHMVYGIAEADAGDSSVLTLGGMYQKSREVPDFSGIILPCENQKTASFSSTPACNRPLQLPRNTYLGEDWSRLRADKYNLFSGFKHVFDNGWQLNAEVSYTKNESDAKVGQFFLKNEHAAGLSGEDAVGFLTERNEVIPFEPKDKALEKLKAYRDETAKEYRERKDDFVKNRFDNTAFEQYRSRRAAERKAGFDKCMSAPFALDFICQGSWGDPGVDADKAEFVDKALAKEGIFNNAAQRFPNSLYDSSFNRKATANRRYSYMPLRHTKDDRQWGIKLDLTGTYGLFGREHDFFVGYAYGDEKIRSEYLEIYERRHRVRPNTGATHGVYAGSCQEEPDGDLSSPLVRGHKEPDWQAYDEKGNRTVYAEECRNAKKIKTEPKLDAEGKQVYYYDEYSGSRTPVYVDVYELDEKGNKIQETNPDGTPAFTGFSGTVPVWKTVKVADDHVPALYNYAKYLNTNKTHSLTASTRFNVTGRLHLLGGLHYTRYETSQTKDMPVRYGQPASDFQTASSIKADQDHYTAKMQGHKLTPYAGITYDLTPQQSIYGSYTKIFKQQDNVDVSAKTVLPPLVGTNYEVGWKGAFLQGRLNASFALFYLEQKNRTVVDFGYVPGAGGKQGSFQTVAKPIGKVVSRGAEFELSGELNEDWKVFAGYTYNKSRYRNAAEVNAERLAKNSSADPYNFSNFTPVHIFRFGTSFHIPNTGLTVGGGVSAQSGTSSLYNIRQGGYGLIDGFVRYELGKHAKLSLIGTNLNGRTYFENNYNRTRGANNFYGEPRTVSMKLDWQF

SEQ ID NO: 22979 - protein, 92 aa, Neisseria meningitidis; identical to SEQ ID NO: 32

SEQ ID NO: 22980 - protein, 230 aa, Neisseria meningitidis
VQADLAYAAERITHDYPKPTGANNTSTVSDYFRNIRAHSIHPRVSVGYDFGGWRIAADYASYRKWNNNKYSVNTKEVQRNNNAGNWQELKTENQENGSFHAVSSLGLSAIYDFKLNDKFDKFKPYIGARVAYGHVKHQVHSVRKETTTTFSKAGAGATEPGKIISGPISKPAYHESHSISSLGLGVIAGVGFDITPKLTLDTGYRYHNWGRLENTRFKTHEVSLGVRYRF

SEQ ID NO: 22981 - protein, 489 aa, Neisseria meningitidis; identical to SEQ ID NO: 7627

SEQ ID NO: 22982 - protein, 270 aa, Neisseria meningitidis; identical to SEQ ID NO: 16348

SEQ ID NO: 22983 - protein, 128 aa, Neisseria meningitidis; identical to SEQ ID NO: 1074

SEQ ID NO: 22984 - protein, 207 aa, Neisseria meningitidis
MERKERLRAGIAAMGLDISEMAQDRLLVYVDLLKKWNKTYNLTALRDEEKMIVHHLLDSLTLLPHIEGVQTMLDVGSGGGQPGIPAAVCRPDVQITLLDANTKKTAFLQQAVIELGLDNVRVVSGRVEAVSDVRADVVTSRAFAELADFVSWTVHLLKDGGYWAAMKGVYPQEEIGRLPQDVCVEKVQRLDVPGLDAERHIVILSKR

SEQ ID NO: 22985 - protein, 798 aa, Neisseria meningitidis; identical to SEQ ID NO: 6178

SEQ ID NO: 22986 - protein, 498 aa, Neisseria meningitidis; identical to SEQ ID NO: 15517

SEQ ID NO: 22987 - protein, 261 aa, Neisseria meningitidis; identical to SEQ ID NO: 3244

SEQ ID NO: 22988 - protein, 287 aa, Neisseria meningitidis; identical to SEQ ID NO: 7964

SEQ ID NO: 22989 - protein, 236 aa, Neisseria meningitidis; identical to SEQ ID NO: 2130

SEQ ID NO: 22990 - protein, 151 aa, Neisseria meningitidis
LDLYKLGYKQHTRTDAEGYIEKLHITPANANECKHLSPLLEGLPEGTTVYADKGYDGAENRQHLEEHQLLDGIMRKACRNRPLSETQTKRNRYLSKTRYVVEQSFGTLHRKFRYARAAYFGLLKVSAQSHLKAMCLNLLKAANRLSAPAAA

SEQ ID NO: 22991 - protein, 57 aa, Neisseria meningitidis; identical to SEQ ID NO: 2122

SEQ ID NO: 22992 - protein, 89 aa, Neisseria meningitidis; identical to SEQ ID NO: 494

SEQ ID NO: 22993 - protein, 259 aa, Neisseria meningitidis; identical to SEQ ID NO: 14490

SEQ ID NO: 22994 - protein, 283 aa, Neisseria meningitidis
MHILLTALLKCLSLLPLSCLHTLGNRLGHLAFYLLKEDRARIVANMRQAGMNPDPKTVKAVFAETAKGGLELAPAFFRKPEDIETMFKAVHGWEHVQQALDKHEGLLFITPHIGSYDLGGRYISQRLPFPLTAMYKPPKIKAIDKIMQAGRVRGKGKTAPTSIQGVKQIIKALRSGEATIVLPDHVPSPQEGGEGVWVDFFGKPAYTMTLAAKLANVKGVKTLFFCCERLPDGQGFDLHIRPVQGELNGDKAHDAAVFNRNAEYWIRRFPTQYLFMYNRYKMP

SEQ ID NO: 22995 - protein, 140 aa, Neisseria meningitidis; identical to SEQ ID NO: 8657

SEQ ID NO: 22996 - protein, 116 aa, Neisseria meningitidis; identical to SEQ ID NO: 4624

SEQ ID NO: 22997 - protein, 962 aa, Neisseria meningitidis
MSNTTVEQFAAELKRPVEDLLKQLKEAGVSKNSGSDSLTLDDKQLLNAYLTKKNGSNGGTISIRRTKTEVSTVDGVKVETRKRGRTVNIPSAEELAAQVKAAQTQAAPVRPEQTAEDAAKARAEAATRAEARAKAEAEAAKLKAAKAGNKAKPAAQKPTEAKAETAPVAAETKPAEESKAEKAQADKMPSEKPAESKEKAAKPKHERNGKGKDAKKPAKPAAPAVPQPVVSAEEQAQRDEEARRAAALRAHQEALLKEKQERQARREAMKQQAEQQAKAAQEAKTGRQRPAKPAEKQQAAAPAVENKPVNPAKAKKEDRRNRDDEGQGRNAKGKGGKGGRDRNNARNGDDERVRGGKKGKKLKLEPNQHAFQAPTEPVVHEVLVPETITVADLAHKMAVKGVEVVKALMKMGMMVTINQSIDQDTALIVVEELGHIGKPAAADDPEAFLDEGAEAVEAEALPRPPVVTVMGHVDHGKTSLLDYIRRTKVVQGEAGGITQHIGAYHVETPRGVITFLDTPGHEAFTAMRARGAKATDIVILVVAADDGVMPQTIEAIAHAKAAGVPIVVAVNKIDKDTANPERIRQELTQHEVIPDDWGGTVQFIDVSAKKGTNIDALLEAVLLEAEVLELTAPVDAPAKGIIVEARLDKGRGAVATLLVQSGTLKKGDMLLAGTAFGKIRAMVDENGKSITEAGPSIPVEILGLSDVPNAGEDAMALADEKKAREIALFRQGKYRDVRLAKQQAAKLENMFNNMGENQAQSLSVIIKADVQGSYEALAGSLKKLSTDEVKVNVLHSGVGGITESDVNLAIASGAFIIGFNVRADASSRKLAENENVEIRYYNIIYDAIDDVKAAMSGMLSPEEKEQVTGTVEIRQVISVSKVGNIAGCMVTDGVVKRDSHVRLIRNNVVIHTGELASLKRYKDDVKEVRMGFECGLMIKGYNEIMEGDQLECFDIVEVARTL

SEQ ID NO: 22998 - protein, 185 aa, Neisseria meningitidis; identical to SEQ ID NO: 7373

SEQ ID NO: 22999 - protein, 286 aa, Neisseria meningitidis
MKPYSANPNLTEPRWLRVLLIAAALGFLLLMLVVPLVAVFYEALKGGWDLYLKSLNDPEAWSAIKLTLITALIVVPVNAVLGVAMAWLLTRFDFRGKQLLTTLLDLPFSVSPVVAGLMFVLLFGAHTALGGWLEAQGIQIIFAIPGIILATLFVTFPFVAREIIPLMQAQGDSEEQAALILGASGWQMFWRVTLPNIKWALLYGIILTNARAMGEFGAVSVVSGHIRGETNTVPLLVEIFYNEYNFTGAFALSGVLALLALATLAVQNIITKLQDKKLAAAERNAV

SEQ ID NO: 23000 - protein, 324 aa, Neisseria meningitidis
MLENLPYFQRHLPEDLAKVNEVINRAVQSDVALISQIGTYIISAGGKRLRPIMTILAGKAVGYDDEKLYSLAAMVEFIHTSTLLHDDVVDESDLRRGRATANNLFGNAAAVLVGDFLYTRAFQLMVASGSMRVLEVMADATNIIAEGEVMQLMNIGNTDITEEQYIQVIQYKTAKLFEAAAQVGAILGKASPEHEQALKDYGMYVGTAFQIIDDVLDYSGETEETGKNVGDDLAEGKPTLPLIYLMRQGSEQVANDVRTALENADRSYFEKIHDYVVRSDALAYSIGEARKAVDCAVTALDALPDSEVKDAMIQLAKESLVRVS

SEQ ID NO: 23001 - protein, 204 aa, Neisseria meningitidis
MKNNDCFRLKNPQSGMALIEVLVAMLVLTIGILALLSVQLRTVASVREAETQTIVSQITQNLMEGMLMNPTIDSDSNKKNYNLYMGNHHTLSAVDGDFAVDAVKSKKDLAKAQLDRFGYELKNALPDAAAIYYAICKDSLGVAPTLSAGSTFSSNCDASANGDTLIKVLWVNDSAGDSDIAHTNLETNGNNIVYTYQARVGGRE

SEQ ID NO: 23002 - protein, 469 aa, Neisseria meningitidis; identical to SEQ ID NO: 6096

SEQ ID NO: 23003 - protein, 83 aa, Neisseria meningitidis; identical to SEQ ID NO: 15092

SEQ ID NO: 23004 - protein, 321 aa, Neisseria meningitidis
MSYTQLTQGERYHIQYLSRHCTVTEIAKQLNRHKSTISREIRRHRTQGQQYSAEKAQRQSRTIKQRKRQPYKLDSQLIQHIDTLIRRKLSPEQVCAYLCKHHRITLHHSTIYRYLRQDKSNGSTLWQHLRICSKPYRKRYGSTWTRGKVPNRVGIENRPAIVDQKSRIGDWEADTIVGKGQKSALLTLVERVTRYTIICKLDSLKAEDTARAAVRTLKAHKDRVHTITMDNGKEFYQHTKITKALKAETYFCRPYHSWEKGLNENTNGLIRQYFPKQTDFRNISDREIRRVQDELNHRPRKTLGYETPSVLFLNLFQPLIH

SEQ ID NO: 23005 - protein, 252 aa, Neisseria meningitidis
MNPKTPPDHTEDAVRLSKRMAQLGLCSRREADGYIEQGWVTVNGKTAVLGQKVSPADRIELNKKAHEQQAARITILLNKPVGYVSAQAEKGYKSAAELITSENRWEGDTGRIRFDPKHKIGLAPAGRLDIDSVGLLVLTQDGRIAKQLIGENSGSEKEYLVRVRGKLDEKGLALLNHGLSLDGEKLRPAQVEWQNEDQLRFVLKQGKKRQIRRMCELVGLRVVGLKRIRMGKVKLGRLPPGKWRYLAPGESF

SEQ ID NO: 23006 - protein, 127 aa, Neisseria meningitidis; identical to SEQ ID NO: 1080

SEQ ID NO: 23007 - protein, 71 aa, Neisseria meningitidis; identical to SEQ ID NO: 14434

SEQ ID NO: 23008 - protein, 512 aa, Neisseria meningitidis
MNMLGALAKVGSLTMVSRVLGFVRDTVIARAFGAGMATDAFFVAFKLPNLLRRVFAEGAFAQAFVPILAEYKETRSKEATEAFIRHVAGMLSFVLVIVTALGILAAPWVIYVSAPGFAKDADKFQLSIDLLRITFPYILLISLSSFVGSVLNSYHKFSIPAFTPTFLNVSFIVFALFFVPYFDPPVTALAWAVFVGGILQLGFQLPWLAKLGFLKLPKLSFKDAAVNRVMKQMAPAILGVSVAQISLVINTIFASYLQSGSVSWMYYADRMMELPSGVLGAALGTILLPTLSKHSANQDTEQFSALLDWGLRLCMLLTLPAAVGLAVLSFPLVATLFMYREFTLFDAQMTQHALIAYSFGLIGLIMIKVLAPGFYARQNIKTPVKIAIFTLICTQLMNLAFIGPLKHVGLSLAIGLGACINAGLLFFLLRRHGIYQPGKGWAAFLAKMLLSLAVMGGGLYAAQIWLPFDWAHAGGMQKAARLFILIAVGGGLYFASLAALGFRPRHFKRVES

SEQ ID NO: 23009 - protein, 134 aa, Neisseria meningitidis
MTAQPCPICTAQDEDILLQTPKLRVIAVHNDSGSPAFCRVIWRKHIAEMTDLSAAERGELMEIVYKVEAAMRQVFRPAKINLASLGNVVPHLHWHIIARFENDASFPAPIWANPVRKHGMTLPQDWTEQLKKLL

SEQ ID NO: 23010 - protein, 291 aa, Neisseria meningitidis; identical to SEQ ID NO: 2469

SEQ ID NO: 23011 - protein, 318 aa, Neisseria meningitidis; identical to SEQ ID NO: 15595

SEQ ID NO: 23012 - protein, 96 aa, Neisseria meningitidis
VEYFMLLATDGEDVHEARMAARPEHLKRLETLKSEGRLLTAGPNPLPEDSNRVSGSLIVAQFESLDAAEAWAEDDPYVHAGVYSEVLIKPFKAVFK

SEQ ID NO: 23013 - protein, 392 aa, Neisseria meningitidis; identical to SEQ ID NO: 276

SEQ ID NO: 23014 - protein, 352 aa, Neisseria meningitidis; identical to SEQ ID NO: 327

SEQ ID NO: 23015 - protein, 466 aa, Neisseria meningitidis; identical to SEQ ID NO: 7726

SEQ ID NO: 23016 - protein, 216 aa, Neisseria meningitidis; identical to SEQ ID NO: 7459

SEQ ID NO: 23017 - protein, 255 aa, Neisseria meningitidis; identical to SEQ ID NO: 7390

SEQ ID NO: 23018 - protein, 189 aa, Neisseria meningitidis
MVRRLIIGISGASGFQYGVKALELLRAQDVETHLVVSKGAEMARASETAYARDEVYALADFVHPIGNIGACIASGTFKTDGMLVAPCSMRTLASVAHGFGDNLLTRAADVVLKERRRLVLMVRETPLNLAHLDNMKRVTEMGGVVFPPVPAMYRKPQTADDIVTHSVAHALSLFGIDTPDSAEWQGIAD

SEQ ID NO: 23019 - protein, 124 aa, Neisseria meningitidis; identical to SEQ ID NO: 16238

SEQ ID NO: 23020 - protein, 468 aa, Neisseria meningitidis
MTAAPDILYRQAAALLEQSNTAQALPLLQQAAEQGYTEAAFVLGNHLLQNGQPEQALSWLEAAAAQRHPKALFSLLQQREHNGTPTGQLLNDYAWLGEQGHSEAQLILMRYHAQRNDPQSLYWAELAAARYAAPAYYHLARHHQRQGDVETAIEQYEKAAALGVTAACWQLGQIYFYGTGVSPNHAQAEHYLEPAAQAGHIAAQTLLADLLAAQRKPEALEWYRRAADKEQAEAQSKLAQYALTGELSERDPFQAARYAKAAAEKNHPEALKIMGDLYRYGLGIKADNHIAHDYYHRAAALGSAAAAQKLISDAALYHPQQYEQIKTAALQQQQTETIYRLAETQAHAIGRPADYNAARKNYMEAAEFHHKNAAAALGRIYHYGLGTAQDPRAAAHWYAIAAEQNHPSAQYHLACFYYHGQGVGCHVPTACYWLQAAISNGHTSAESLISLLEQWRREAHHAIGQKAV

SEQ ID NO: 23021 - protein, 92 aa, Neisseria meningitidis; identical to SEQ ID NO: 2199

SEQ ID NO: 23022 - protein, 44 aa, Neisseria meningitidis; identical to SEQ ID NO: 6328

SEQ ID NO: 23023 - protein, 96 aa, Neisseria meningitidis; identical to SEQ ID NO: 6139

SEQ ID NO: 23024 - protein, 241 aa, Neisseria meningitidis
MSEGMMSPVLYLIPTPLGTPDTPCLLPHEQRAVVGLTDFVVEAEKTARAHLKHLGVTMPIRELNLQTLNEHTDLKTLPELLKPLQEGRSMGIVSEAGCPAVADPGANLVALAHKHGFEVRPLVGPSSLLLALMASGANGQNFAFKGYLPSEKNERIQSLKALEQRSRQQNETQLFIETPYRNDVLLADAVENLHPETRLCTATDLTLPTQSVVSKTVADWRRMKEMPNLKKRPTIFVMYAG

SEQ ID NO: 23025 - protein, 321 aa, Neisseria meningitidis; identical to SEQ ID NO: 22437

SEQ ID NO: 23026 - protein, 514 aa, Neisseria meningitidis; identical to SEQ ID NO: 13965

SEQ ID NO: 23027 - protein, 206 aa, Neisseria meningitidis; identical to SEQ ID NO: 15079

SEQ ID NO: 23028 - protein, 1067 aa, Neisseria meningitidis
MAKFFIDRPIFAWVISIFIIAAGIFGIKSLPVSQYPSVAAPTITLHATYPGASAQVMEDSVLSVIERHMNGVEGLDYMSTSADSSGSGSVSLTFTPDTDENLAQVEVQNKLSEVLSTLPATVQQYGVTVSKARSNFLMIVMLSSDVQSTEEMNDYAQRNIVPELQRIEGVGQVRLFGAQRAMRIWVDPKKLQNYNLSFADIGSALSAQNVQISAGSIGSLPAVRGQTVTATVTAQGQLGTAEEFGNVILRANTDGSNVYLKDVARVGLGMEDYSSSTRLNGVNTTGMAVMLSNSGNAMATAKAVKERMATLEKYFPQGMSWKTPYDTSKFVEISIEKVIHTLIEAMVLVFVVMYLFLQNIRYTLIPTIVVPISLLGGFAFISYMGMSINVLTMFAMVLVIGIVVDDAIVVVENVERIMAGEGLPPKEATKKAMGQISGAVIGITAVLISVFVPLAMFSGATGNIYKQFALTMASSIAFSAFLALTLTPALCATMLKTIPKGHHEEKKGFFGWFNKKFNSWTHGYEGRVAKVLRKTFRMMVVYIGLAVVGVFLFMRLPTSFLPTEDQGFVMVSVQLPAGATQERTNATLAQVTQLAKSIPEIENIITVSGFSFSGSGQNMAMGFAILKDWNERTAPGSDAVAIAGKLTGMMMGTLKDGFGIAVVPPPILELGNGSGLSINLQDRNNTGHTALLAKRNELIQKMRASGLFDPSTVRAGGLEDSPQLKIDINRAAAAAQGISFADIRTALASALSSSYVSDFPNQGRLQRVMVQADEDARMQPADILNLTVPNKSGVAVPLSTIATVSWENGTEQSVRFNGYPSMKLSASPATGVSTGQAMAAVQKMVDELGGGYSFEWGGQSREEAKGGSQTLILYGLAVAAVFLVLAALYESWSIPLAVILVIPLGLIGAAAGVTGRNLFEGLLGSVPSFANDIYFQVGFVTVMGLSAKNAILIIEFAKDLQAQGKSAVEAALEAARLRFRPIIMTSFAFILGVVPLYIAGGASSASQRAIGTTVFWGMLIGTLLSVFLVPLFYVVVRKFFKETAHEHEMAVKHAAEAGITGSDDSQH

SEQ ID NO: 23029 - protein, 191 aa, Neisseria meningitidis; identical to SEQ ID NO: 1730

SEQ ID NO: 23030 - protein, 1447 aa, Neisseria meningitidis
MKTTDKRTTETHRKAPKTGRIRFSPAYLAICLSFGILPQAWAGHTYFGINYQYYRDFAENKGKFAVGAKDIEVYNKKGELVGKSMTKAPMIDFSVVSRNGVAALVGDQYIVSVAHNGGYNNVDFGAEGRNPDQHRFSYQIVKRNNYKPDNSHPYNGDYHMPRLHKFVTDAEPVEMTSDMRGNTYSDKEKYPERVRIGSGHHYWRYDDDKHGDLSYSGAWLIGGNTHMQGWGNNGVVSLSGDVRHANDYGPMPIAGAAGDSGSPMFIYDKTNNKWLLNGVLQTGYPYSGRENGFQLIRKDWFYDDIYRGDTHTVFFEPRSNGHFSFTSNNNGTGTVTETNEKVSNPKLKVQTVRLFDESLNETDKEPVYAAGGVNQYRPRLNNGENLSFIDYGNGKLILSNNINQGAGGLYFEGDFTVSPENNETWQGAGVHISEDSTVTWKVNGVANDRLSKIGKGTLHVQAKGENQGSISVGDGTVILDQQADDKGKKQAFSEIGLVSGRGTVQLNADNQFNPDKLYFGFRGGRLDLNGHSLSFHRIQNTDEGAMIVNHNATTTSTVTITGNESITQPSGKNINRLNYSKEIAYNGWFGEKDTTKTNGRLNLVYQPAAEDRTLLLSGGTNLNGNITQTNGKLFFSGRPTPHAYNHLGSGWSKMEGIPQGEIVWDNDWINRTFKAENFHIQGGQAVISRNVAKVEGDWHLSNHAQAVFGVAPHQSHTICTRSDWTGLTNCVEKTITDDKVIASLTKTDISGNVSLADHAHLNLTGLATLNGNLSANGDTRYTVSHNATQNGNLSLVGNAQATFNQATLNGNTSASGNASFNLSNNAAQNGSLTLSDNAKANVSHSALNGNVSLADKAVFHFENSRFTGQLSGSKDTALHLKDSEWTLPSGTELGNLNLDNATITLNSAYRHDAAGAQTGSVSDTPRRRSRRSLLSVTPPTSVESRFNTLTVNGKLNGQGTFRFMSELFGYRSDKLKLAESSEGTYTLAVNNTGNEPASLEQLTVVEGKDNKPLSENLNFTLQNEHVDAGAWRYQLIRKDGEFRLHNPVKEQELSDKLGKAEAKKQAEKDNAQSLDALIAAGRDAVEKTESVAEPARQAGGENVGIMQAEEEKKRVQADKDTALAKQREAETRPATTAFPRARRARRDLPQLQPQPQPQPQRDLISRYANSGLSEFSATLNSVFAVQDELDRVFAEDRRNAVWTSGIRDTKHYRSQDFRAYRQQTDLRQIGMQKNLGSGRVGILFSHNRTENTFDDGIGNSARLAHGAVFGQYGIDRFYIGISAGAGFSSGSLSDGIGGKIRRRVLHYGIQARYRAGFGGFGIEPHIGATRYFVQKADYRYENVNIATPGLAFNRYRAGIKADYSFKPAQHISITPYLSLSYTDAASGKVRTRVNTAVLAQDFGKTRSAEWGVNAEIKGFTLSLHAAAAKGPQLEAQHSAGIKLGYRW

SEQ ID NO: 23031 - protein, 92 aa, Neisseria meningitidis; identical to SEQ ID NO: 600

SEQ ID NO: 23032 - protein, 68 aa, Neisseria meningitidis; identical to SEQ ID NO: 15227

SEQ ID NO: 23033 - protein, 228 aa, Neisseria meningitidis
MYAFTAAQQQKALFRLVLFHILIIAASNYLVQFPFQIFGIHTTWGAFSFPFIFLATDLTVRIFGSHLARRIIFWVMFPALLLSYVFSVLFHNGSWTGLGALSEFNTFVGRIALASFAAYALGQILDIFVFNKLRRLKAWWIAPTASTVIGNALDTLVFFAVAFYASSDGFMAANWQGIALVDYLFKLTVCGLFFLPAYGVILNLLTKKLTTLQTKQAQDRPAPSLQNP

SEQ ID NO: 23034 - protein, 272 aa, Neisseria meningitidis; identical to SEQ ID NO: 1395

SEQ ID NO: 23035 - protein, 330 aa, Neisseria meningitidis; identical to SEQ ID NO: 3133

SEQ ID NO: 23036 - protein, 225 aa, Neisseria meningitidis; identical to SEQ ID NO: 15175

SEQ ID NO: 23037 - protein, 369 aa, Neisseria meningitidis
MFSDTDISMMETALRLAALGRFSTSPNPRVGCVIAHGSQVVGQGFHVKAGEPHAEVHALHQAGEMAQGATAFVTLEPCSHYGRTPPCAEALVRAGVSRVVAAMRDPNPLVAGKGLALLEAAGIKTECGLLEHQARELNRGFLSRIERRRPFVRLKCAVSLDGKTALSDGSSFWITGEDARADVQVLRAESCAVLTGIGTVLADNPRLNVRAFPTLRQPARIVLDSRLRLPLDSHLLTDGQSPTYIATLERDEDKLRPYRKHAHVRILMPSETAGGKIDLNSLMRLLADEGIGELIVEAGSELTSAFLAEDLADEIVLYRSPKILGSGKDLFSLPENRAALSAPPLWMPVSTEILGHDIKTVFRKNGNAF

SEQ ID NO: 23038 - protein, 66 aa, Neisseria meningitidis; identical to SEQ ID NO: 2062

SEQ ID NO: 23039 - protein, 420 aa, Neisseria meningitidis; identical to SEQ ID NO: 2546

SEQ ID NO: 23040 - protein, 65 aa, Neisseria meningitidis; identical to SEQ ID NO: 6901

SEQ ID NO: 23041 - protein, 491 aa, Neisseria meningitidis; identical to SEQ ID NO: 14704

SEQ ID NO: 23042 - protein, 180 aa, Neisseria meningitidis; identical to SEQ ID NO: 5949

SEQ ID NO: 23043 - protein, 67 aa, Neisseria meningitidis; identical to SEQ ID NO: 15366

SEQ ID NO: 23044 - protein, 340 aa, Neisseria meningitidis; identical to SEQ ID NO: 2046

SEQ ID NO: 23045 - protein, 226 aa, Neisseria meningitidis; identical to SEQ ID NO: 1949

SEQ ID NO: 23046 - protein, 74 aa, Neisseria meningitidis; identical to SEQ ID NO: 6276

SEQ ID NO: 23047 - protein, 432 aa, Neisseria meningitidis; identical to SEQ ID NO: 2024

SEQ ID NO: 23048 - protein, 280 aa, Neisseria meningitidis
MLVCNPYEVVIHGTTSSGKIFRPSDWAERLCGILSSFTKDHRLSYSKWVRPMLVDNIRCVAVDKKLETDNPQMFRFLMDFAADNDLRVIDCKALLEEREQGGQNDPANERVLLAQAIEEKHAAEKAQEQTASGASYVLREIGADDTATAFAALSVLRSALTDINRFTEQINKVQRPQGYRLLGIFEEGKHNAVAVCGFREACTLASGRHIHIDDIVTLPQSRRKGYASRLLEEVRKIGAETGVTKIHLNVHVNHDRADAHRLYFKNGFEICAYHFRCDPK

SEQ ID NO: 23049 - protein, 268 aa, Neisseria meningitidis; identical to SEQ ID NO: 6283

SEQ ID NO: 23050 - protein, 208 aa, Neisseria meningitidis; identical to SEQ ID NO: 3160

SEQ ID NO: 23051 - protein, 66 aa, Neisseria meningitidis; identical to SEQ ID NO: 1185

SEQ ID NO: 23052 - protein, 395 aa, Neisseria meningitidis; identical to SEQ ID NO: 3616

SEQ ID NO: 23053 - protein, 186 aa, Neisseria meningitidis; identical to SEQ ID NO: 2093

SEQ ID NO: 23054 - protein, 710 aa, Neisseria meningitidis
MSIVSAPLPALSALIILAHYHGIAANPADIQHEFCTSAQSDLNETQWLLAAKSLGLKAKVVRQPIKRLAMATLPALVWCDDGNHFILAKTDGGGEHAQYLIQDLTTNKSAVLSFAEFSNRYSGKLILVASRASVLGSLAKFDFTWFIPAVIKYRRLFFEVLVVSVVLQLFALITPLFFQVVMDKVLVHRGFSTLDVVSVALLVVSLFEIVLGGLRTYLFAHTTSRIDVELGARLFRHLLSLPLSYFEHRRVGDTVARVRELEQIRNFLTGQALTSVLDLAFSFIFLAVMWYYSSTLTWVVLASLPAYAFWSAFISPILRTRLNDKFARNADNQSFLVESITAVGTVKAMAVEPQMTQRWDNQLAAYVASGFRVTKLAVVGQQGVQLIQKLVTVATLWIGARLVIEGKLTVGQLIAFNMLSGQVAAPVIRLAQLWQDFQQVGISVARLGDILNAPTENASSHLALPDIRGEITFEHVDFRYKADGRLILQDLNLRIRAGEVLGIVGRSGSGKSTLTKLVQRLYVPEQGRVLVDGNDLALAAPAWLRRQVGVVLQENVLLNRSIRDNIALTDTGMPLERIIEAAKLAGAHEFIMELPEGYGTVVGEQGAGLSGGQRQRIAIARALITNPRILIFDEATSALDYESERAIMQNMQAICANRTVLIIAHRLSTVKTAHRIIAMDKGRIVEAGTQQELLAKPNGYYRYLYDLQNG

SEQ ID NO: 23055 - protein, 476 aa, Neisseria meningitidis
MTWETVIGLEIHVQLNTKSKIFSGASTAFGAEPNAHAGVVECALPGVLPVMNREVVEKAIKLGLALDAKINRKNVFDRKNYFYPDLPKGYQISQLDLPIVEHGKLEIVVGDDVKTINVTRAHMEEDAGKSVHEGLNGATGIDLNRAGTPLLEVVSEPEMRSAAEAVAYAKALHSLVTWLNICDGNMAEGSFRVDANVSVRPKGQAEFGTRREIKNLNSFRFLEQAINYEAEAQIEILEDGGKVQQATMLFDPEKGETRVMRLKEDAQDYRYFPDPDLLPVIISDAQMQKAKAEMPELPKEMAVRFVADYGVSEYDARLLTASRAQAAYFEEAAKESGQGKPTANWMNGELAAALNKEGMELADSPITAPRLAALVGKIADGTLSSKLAKKAFEAMWAEPEATIAEIIEKHGLQQMTDTGAVEAMVDEVLANNAKAVEQFKSGNEKALNAIVGQVMKASKGKANPAQVQELIKAKLA

SEQ ID NO: 23056 - protein, 341 aa, Neisseria meningitidis
MDYQGKKDRLEEVVGLSEDPELWNDPKRAQEIGKERKILEGIVLTLDNIASGIEDNRMLIEMTVEENDEEGFAAVQEDVAGLEKQMADLEFKRMFNQPADPNNCFIDITAGAGGTEAEDWAGMLFRMYSRYAERKGFKIEILEEDDGEIAGINRATIRVEGEYAYGLLRTETGVHRLVRYSPFDSNNKRHTSFASVFVYPEIDDSIEIEINPADLRIDTYRASGAGGQHINKTDSAVRITHEPTGIVVQCQNDRSQHANKAAAMEMLKSKLYELEMRKRNEEKQALEEGKSDVGWGSQIRSYVLDSSRIKDLRTGYEVGNTKAVLDGDLDGFIEASLKQGV

SEQ ID NO: 23057 - protein, 249 aa, Neisseria meningitidis; identical to SEQ ID NO: 131

SEQ ID NO: 23058 - protein, 468 aa, Neisseria meningitidis
VEFSTKTEILQEQQAGAQLFVCTEEAQLNHPTALALLSSLEEGQNFADTKIPTGNGLQAVAVCCLKSTGRAALNKAAAEAAKWAQNQETVNVDVHVFEEAQAAAVAEAFAIAFGNAAYRFDRYKKEAKPAKFETAVFHSAHEAAVKEALRVAEAQVYGQSLCRDLGNAAPNECTPEFLARTAKAEAEKLGAHAKIIEKDYIKENMGSFWSVAKGSAEAPYLVELSYFGAADKEAAPVVLVGKGITFDTGGISLKPGLNMDEMKFDMCGAATVISTFCAAVKLQLPINLIAVVATCENMPSGAANKPGDVVKSMKGLTIEVLNTDAEGRLILCDALTYAEQFKPKAVIDVATLTGACIVALGHDVSGVMGNNQDLVDSLLVASYNVDDKAWQLPLFETYKDQLKSNFADIPNIGTPGAGTITAATFLSYFTEDYPWAHLDIAGTAWKSGAEKGATGRPVPLLLNYLRNL

SEQ ID NO: 23059 - protein, 66 aa, Neisseria meningitidis; identical to SEQ ID NO: 2062

SEQ ID NO: 23060 - protein, 388 aa, Neisseria meningitidis; identical to SEQ ID NO: 15700

SEQ ID NO: 23061 - protein, 105 aa, Neisseria meningitidis; identical to SEQ ID NO: 15451

SEQ ID NO: 23062 - protein, 134 aa, Neisseria meningitidis; identical to SEQ ID NO: 4298

SEQ ID NO: 23063 - protein, 1144 aa, Neisseria meningitidis; identical to SEQ ID NO: 14737

SEQ ID NO: 23064 - protein, 171 aa, Neisseria meningitidis
LAVQSAEDKYADLKQHIHDIYRRHKGRYGYRRIAAAILHAGTPVNHKKVSRLMAKTGLKAVIRRRKYRSFKGEVGKIAPNILRRCFHAEKPNEKWVTDVTEFNVGGEKIYLSPIMDLFNGEIVSYRIQIRPTFDLAGEILKGAPEKPGSSEKPILHSDQGWQYQMFFIKSS

SEQ ID NO: 23065 - protein, 611 aa, Neisseria meningitidis; identical to SEQ ID NO: 6640

SEQ ID NO: 23066 - protein, 524 aa, Neisseria meningitidis; identical to SEQ ID NO: 2756

SEQ ID NO: 23067 - protein, 222 aa, Neisseria meningitidis; identical to SEQ ID NO: 7101

SEQ ID NO: 23068 - protein, 916 aa, Neisseria meningitidis; identical to SEQ ID NO: 4091

SEQ ID NO: 23069 - protein, 753 aa, Neisseria meningitidis; identical to SEQ ID NO: 14304

SEQ ID NO: 23070 - protein, 201 aa, Neisseria meningitidis; identical to SEQ ID NO: 7524

SEQ ID NO: 23071 - protein, 394 aa, Neisseria meningitidis
MSLHSDILVVGAGPAGLSFAAELAGSGLKVTLIERSPLTVLQNPPYDGREIALTHFSREIMQRLGMWDKIPENEIYPLRDAKVLNGRSDYQLHFPQPTEARGEPADCLGYLISNHNIRRAAYEVVSQLDNITILTDTVVKEVKTSDNEAQVILENGKILTARLLLAADSRFSQTRRQLGISSDMHDYSRTMFVCRMKHTLSNQHTAYECFHYGRTIALLPLEEHLTNTVITVDTDKINSVQNLSPEELAASVKEQLKARLGDMELVSSIHHYPLVGMIAKRFYGKRSALIGDAAVGMHPVTAHGFNLGLSSADILAKLILEAEQRGQDIGAASLLEKYSSKHMLHAQPLYHGTNMMLKLFTNETAPAKLLRGLVLRAGNNFPPLKKLITKQLTG

SEQ ID NO: 23072 - protein, 289 aa, Neisseria meningitidis; identical to SEQ ID NO: 6858

SEQ ID NO: 23073 - protein, 210 aa, Neisseria meningitidis
MTLRYEILSVTPFRQNCTLIWDDESGEAVLTDVGGDVPFLLQALANRKLTLTAIWLTHGHLDHAGGVVEMLKTHKVPVLGPHPDDEFLLQSLPQTTAQYGFPVSPAFAPNRWLEEGETLTVGRYAFQVLHIPGHTPGHIVFYCAEAELLIAGDVLFYETIGRTDFPRGNHADLINNIRNKLFALPETVQVVAGHGRMTSIGHEKRHNPFF

SEQ ID NO: 23074 - protein, 332 aa, Neisseria meningitidis
VAAHIGHIDTDAPLKPLYVIHGEEELLRIEALDALRAAAKKQGYLNREVYTADNAFDWNELLQTAGSAGLFADLKLLELHIPNGKPGKTGGEALQDFAARLPEDTVTLVLLPKLEKTQLQSKWFAALAAKGEVWEAKPVGAAALPQWIRGRLDKIGLGIEADALALFAERVEGNLLAARQEIDKLALLYPKGHTVNIDEAQTAVANVARFDVFQLAGAWMKGDVPRVCRLLDGLQEEGEEPVLLLWAVAEDVRTLIRLAAALKQGQSIQSVRNGLRLWGDKQTLAPLAVKRISVVRLLDALKTCAQIDRIIKGAEEGDAWTVFKRLVVSLAE

SEQ ID NO: 23075 - protein, 161 aa, Neisseria meningitidis; identical to SEQ ID NO: 6695

SEQ ID NO: 23076 - protein, 128 aa, Neisseria meningitidis; identical to SEQ ID NO: 6045

SEQ ID NO: 23077 - protein, 294 aa, Neisseria meningitidis; identical to SEQ ID NO: 4254

SEQ ID NO: 23078 - protein, 103 aa, Neisseria meningitidis; identical to SEQ ID NO: 3787

SEQ ID NO: 23079 - protein, 355 aa, Neisseria meningitidis
MRKILVTGGAGFIGSAVVRHIIRNTQDSVVNLDKLTYAGNLESLTDIADNPRYAFEQVDICDRAELDRIFAQHQPDAVMHLAAESHVDRSIDSAGEFIQTNIVGTFNLLEAARAYWQQMPSEQHEAFRFHHISTDEVYGDLGGTDDLFTETTPYAPSSPYSASKASSDHLVRAWLRTYGLPTIVTNCSNNYGPYHFPEKLIPLMILNALDGKPLPVYGDGMQIRDWLFVEDHARALYQVVTEGVVGETYNIGGHNEKANIEVVKTICALLEELAPEKPAGVARYEDLITYVKDRPGHDVRYAIDAAKIGRELGWQPQETFESGIRKTVEWYLDNKTWWQNVLNGSYRLERLGTGK

SEQ ID NO: 23080 - protein, 129 aa, Neisseria meningitidis; identical to SEQ ID NO: 14100

SEQ ID NO: 23081 - protein, 248 aa, Neisseria meningitidis; identical to SEQ ID NO: 1712

SEQ ID NO: 23082 - protein, 563 aa, Neisseria meningitidis; identical to SEQ ID NO: 17729

SEQ ID NO: 23083 - protein, 212 aa, Neisseria meningitidis; identical to SEQ ID NO: 16264

SEQ ID NO: 23084 - protein, 238 aa, Neisseria meningitidis; identical to SEQ ID NO: 7356

SEQ ID NO: 23085 - protein, 390 aa, Neisseria meningitidis
LITGTPGSGKTLKMVSMMANDEMFKPDENGISRKVFTNIKGLKIPHTYIETDAKKLPKSTDEQLSAHDMYEWIKKPENIGSIVIVDEAQDVWPARSAGSKIPENVQWLNTHRHQGIDIFVLTQGPKLLDQNLRTLVKRHYHIAANKMGLRTLLEWKVCADDPVKMASSAFSSIYTLDKKVYDLYESAEVHTVNKVKRSKWFYALPVIILLIPLFVGLSYKMLSSYGKKQEEPAAQESAATEQQAVLPDKTEGEPVNNGNLTADMFVPTLTEKPESKPIYNGVRQVKTFEYIAGCVQGGRTGCTCYSHQGTALKEVTELMCKDYVKNGLPFNPYKEESQGQEVRQSAQQHSDRAQVATLGGKPLQNLMYDNWQERGKPFEGIGGGVVGSAN

SEQ ID NO: 23086 - protein, 420 aa, Neisseria meningitidis
MSNTQKQLALAKAAKKSVNTADTEEKNRALFAMADSLEAAAADILAANRQDLEAAAGNIPESMTDRLLLDGKRICAMADGIRAVAALPDPVGEILETSTLPNGLEIVKKRVAMGVIGIIYESRPNVTSDAAALALKSGSAVVLRSGKDAFQSARAIVAALKTGLAQTRIDPDALQLIEDTGREGSYEMMRAKDYLDLLIPRGGAGLIRAVVENAVVPVIETGTGIVHIYIDKDADWDKALRIVYNAKTSRPSVCNSMEVLLVHEDIAADFLPKLERLLVRDRIEAGLPPVRFRLDPQAARHIGGEAAGADDFDTEFLDYILAVKTVASVEEAVGHIETHGTHHSDGIVTENRHAADYFTTHIDSAAVYVNASTRFTDGGEFGLGCEMGISTQKLHARGPMGLKELTSYKYIVQGTGQVRE

SEQ ID NO: 23087 - protein, 188 aa, Neisseria meningitidis
MPSEACWRFRRHILIEKMMTLKTAPLKRRFAAMLYEMLLVGAATCLAALFAGIAAIFLNPVSIAVSALVTSILIMGSWWLYFRANWHGQGQTLAMRTWKIGLCDLNGIQPSLYLLRLRFIWACIFIVFIPMLAYAGLRHLLGISPKDAFGAALIWLILPWGFALLNPDRQFLYDFLAGTRLVAVKGKP

SEQ ID NO: 23088 - protein, 685 aa, Neisseria meningitidis
MTRKILVTSALPYANGSIHLGHMVEHIQTDVWVRFQKLRGHECHYCCADDTHGTPVMLAAQKQGIAPEDMIAKVREEHLADFTGFFIGYDNYYSTHSPENKQFSQDIYRALKANGKIESRVIEQLFDPEKQMFLPDRFVKGECPKCHAQDQYGDNCEVCGTTYSPTELINPYSAVSGAKPELRESEHFFFKLDECADFLKAWTSGNNPHDGKPHLQPEALNKMKEWLGEGEETTLSDWDISRDAPYFGFEIPDAPGKYFYVWLDAPVGYMASFKNLCDRIGIDFDEYFKAGSQTEMYHFIGKDILYFHALFWPAMLHFSGHRAPTGVYAHGFLTVDGQKMSKSRGTFITAKSYLEQGLNPEWMRYYIAAKLNSKIEDIDLNLQDFISRVNSDLVGKYVNIAARASGFIAKRFEGRLKDVADSALLAKLTAQSEAIAECYESREYAKALRDIMALADIVNEYVDANKPWELAKQEGQDERLHEVCSELINAFTMLTAYLAPVLPKVAENAAKFLNLEAITWANTRETLGKHAINKYEHLMQRVEQKQVDDLIEANKQSIAAAAVPAAEEGKYEKVAEQASFDDFMKIDMRVAKVLNCEAVEGSTKLLKFDLDFGFEKRIIFSGIAAFYPNPAELNGRMVIAVANFAPRKMAKFGVSEGMILSAATADGKLKLLDVDAGAQPGDKVG

SEQ ID NO: 23089 - protein, 118 aa, Neisseria meningitidis; identical to SEQ ID NO: 367

SEQ ID NO: 23090 - protein, 421 aa, Neisseria meningitidis
MFSFFRRKKKQETPAPDEAQIQETAAKAESEVAQIVENIKEDAESLTESVKGQVESAVETVSGAVEQVKETVAEMLSEAEEAAEKAAEQVEAAKEAVAETISEAVGQVKEDVATTEEHKLSWAARLKQGLTKSRDKMAKSLAGVFGGGQIDEDLYEELETVLITSDMGMEATEYLMKDVRDRVSLKGLKDGNELRGALKEALYDLIKPLEKPLVLPETKEPFVIMLAGINGAGKTTSIGKLAKYFQAQGKSVLLAAGDTFRAAAREQLQAWGERNNVTVISQTTGDSAAVCFDAVQAAKARGIDIVLADTAGRLPTQLHLMEEIKKVKRVLQKAMPDAPHEIIVVLDANIGQNAVNQVKAFDDALGLTGLIVTKLDGTAKGGILAALASDRPVPVRYIGVGEGIDDLRPFDARAFVDALLD

SEQ ID NO: 23091 - protein, 232 aa, Neisseria meningitidis
MKSRHLALGVAALFALAACDSKVQTSVPADSAPAASAAAAPAGLVEGQNYTVLANPIPQQQAGKVEVLEFFGYFCPHCAHLEPVLSKHAKSFKDDMYLRTEHVVWQKEMLTLARLAAAVDMAAADSKDVANSHIFDAMVNQKIKLQNPEVLKKWLGEQTAFDGKKVLAAYESPESQACADKMQELTETFQIDGTPTVIVGGKYKVEFADWESGMNTIDLLADKVREEQKAAQ

SEQ ID NO: 23092 - protein, 256 aa, Neisseria meningitidis; identical to SEQ ID NO: 6198

SEQ ID NO: 23093 - protein, 334 aa, Neisseria meningitidis; identical to SEQ ID NO: 2103

SEQ ID NO: 23094 - protein, 186 aa, Neisseria meningitidis
LYCLRLRRLVLIFVNPLYLHQFHETQVGSVKQLIAHFDRLIDELDKQIDDHTHTHFDGKAQVAEQIKGIGSITTATLMAMLPELRRLSHKRIAGLAGIAPHPRESGETKFKSRCFGGRSAVRKALYMATVAATRFEPLIRDFHQRPLSEGKPYKVAVTACMRKLLTISNARMRDYFAENDTAENGI

SEQ ID NO: 23095 - protein, 131 aa, Neisseria meningitidis; identical to SEQ ID NO: 5580

SEQ ID NO: 23096 - protein, 406 aa, Neisseria meningitidis; identical to SEQ ID NO: 7984

SEQ ID NO: 23097 - protein, 791 aa, Neisseria meningitidis
MNKNIKSLNLREKDPFLSREKQRYEHPLPSREWIIELLERKGVPSKIESLARELSITEDEYVFFERRLKAMARDGQVLINRRGAVCAADKLDLVKCRVEAHKDGFGFAVPLTPAKDGDFVLYERQMRGIMHGDIVTVRPAGIDRRGRREAVVLDIVERAQSKVVGRFYMDRGVAVLEAEDKRLNQSIVLEPDGVARFKPESGQVIVGEIEVYPEQNRPAVAKIIEVLGDYADSGMEIEIAVRKHHLPHQFSEACAKAAKKIPDHVRKSDLKGRVDLRDLPLVTIDGETARDFDDAVFAEKIGRNYRLVVAIADVSHYVRPDDAIDTDAQERSTSVYFPRRVIPMLPENLSNGICSLNPNVERLCMVCDMVITYAGNIKEYRFYPAVMRSHARLTYNQVWKWLSGGIGHPFKAQIDTLYKLFKILQKKRFERGAVEFDSIETQMLFDDNGKIEKIVPVVRNDAHKLIEECMLAANVCAADFLLKNKHTALFRNHLGPTPEKLAALREQLGLLGLQLGGGDNPSPKDYAALAGQFKGRPDAELLQVMMLRSMQQAVYEPHCDGHFGLAYEAYAHFTSPIRRYPDLTVHRAIKAVLNQQTYTPKKSWQALGVHTSFCERRADDASRDVENWLKTYYMRDKVGEVFEGKISGMTSFGIFVTLDGIHIDGLVHISDLGEDYFNFRPEIMAIEGERSGIRFNMGDRVAVRVARADLDDGKIDFVLIAEGSGRGRKVKSSASAKPAGTAGKGKPKTAAEKKTARGGKVRGRGASAAAESGKKAKKPVPIKVKKRKGKS

SEQ ID NO: 23098 - protein, 950 aa, Neisseria meningitidis
MKLSELFNPDEFAARHLSFGDEAALLAAVGEKSMDDFVGNTVPQSIRMPSELDLPDALTEADALAKLKGIASKNVINKSYIGLGYYPTRVPNVILRNVLENPGWYTAYTPYQAEIAQGRLEALLNFQQVCIDLTGFPVAGASLLDEATAAAEAMAMAHRVGKVKSERFFVDERVYPQTLDVMKTRAKYFGFELVVGDFAKADEGEYFGALFQYVGKDGDVQDLQDVIGRLKAKGTIVAVAADIMSLVLLKSPAELGADIALGNTQRFGVPMGFGGPHAAYFAFKDEFKRSAPGRIIGVSKDASGKPALRMALSTREQHIRREKATSNICTAQALLANLAGMYAVYHGPEGVKRIANRIHALASAFADALVSDGLNVVHKVFFDTVTVDFGNKEKADQVFAAALESGYNLRRVNDTQVAAAFHETSACEDLVDLYRAFTGKDTFAFADDVKGRLNAELLRQDDILQHPVFNSYHTEHEMLRYLKKLEDRDLAMNRSMISLGSCTMKLNATAEMLPITWAEFSDIHPYAPEAQTAGYRELLADMENSLKAITGFDAISFQPNSGAQGEYSGMLSIRRYQEANGEGHRNICLIPKSAHGTNPATAAMLGLKVVVVDTDEHGNVNIDDLKAKAEQHRDALSAIMITYPSTHGVYEEGIRDICRIIHENGGQVYMDGANLNAQIGIMQPAEVGADVLHMNLHKTFCIPHGGGGPGMGPIGLKAHLAPFALGHALTDTHSTSAEQTAVAAAAYGSASILPITWMYLTMMGKQGMEQATRWALLNANYVAKRLGEDYPILYTGKNGRVAHECIVDLRPLKAESGITETDIAKRLMDYGFHAPTVSFPVAGTLMIEPTESESKAELDRFIAALKQIKQEVLKVGRGEWPKDDNPLVNAPHTAADITGDWARPYSREEAVFPLPFVREHKFWPFVNRVDDVYGDRNLVCSCPPMENYED

SEQ ID NO: 23099 - protein, 391 aa, Neisseria meningitidis; identical to SEQ ID NO: 7218

SEQ ID NO: 23100 - protein, 230 aa, Neisseria meningitidis; identical to SEQ ID NO: 675

SEQ ID NO: 23101 - protein, 90 aa, Neisseria meningitidis; identical to SEQ ID NO: 14294

SEQ ID NO: 23102 - protein, 218 aa, Neisseria meningitidis; identical to SEQ ID NO: 17130

SEQ ID NO: 23103 - protein, 213 aa, Neisseria meningitidis; identical to SEQ ID NO: 2602

SEQ ID NO: 23104 - protein, 765 aa, Neisseria meningitidis
MLAPELEQILQQLYREARKAHYEFISLEHLLLVLIEEDASVPNVLKLCGADLKVVSEQLAASVAENTPLIPEHLLDTVETRPTLGFQRVMQRAMVHTQSAGKAAVEPLDVLVALMSETDSHTVYFLKLQSVTRFEVLRCIAHGSPDEDEDEDDGNYSSDGMDDDNENRTKPGKNPLSAYTVNLNAEVKAGRIDPLIGRKHEMERLVQILCRRRKNNPLLVGEAGVGKTALAEGLAHQIVNGGIPDALKDAEVYALDMGSLLAGTKYRGDFEARVKSVLKQLEKIPHAILFIDEIHTIIGAGSTSGGTMDASNLLKPALAKGSLRCIGATTYDEYRTIFDKDHALSRRFQKIDVVEPTVSETVQILRGLKPMFEAFHQVRYTQGALEAAAELSARYINERFLPDKAIDVMDEAGAAQRILPKSKQKKVIGKAQIETVIAKVSRIPEKTVSHDDKQVLQFLGRDLKNMVYGQENAIDALVAAVKMSRSGLALPDKPIGSFLFSGPTGVGKTEAAKQLAYSLGVPLQRFDMSEYMERHAVSRLIGAPPGYVGFEQGGLLTEAVNKQPHCVLLLDEIEKAHPDIFNVLLQVMDAGKLTDNNGKSADFRNVILIMTTNAGAESLSRPSLGFTAKRERGDEMQAINKLFTPEFRNRLDAIIPFAPLSEPIIVKVVDKFLLQLEHQLLDKKVEAEFTSALHKYLAEKGFDPQMGARPMHRLIQEKIRKPLADELLFGKLSDGGFVRIDWDAAKEEAVLKFKKSKVKIKTASA

SEQ ID NO: 23105 - protein, 426 aa, Neisseria meningitidis; identical to SEQ ID NO: 14240

SEQ ID NO: 23106 - protein, 59 aa, Neisseria meningitidis
MFWYVIGFCAFVVALLSLWVNAGAFGMQEDDTPQSDYERRLGLGAKLKNKNPDTDEKRQ

SEQ ID NO: 23107 - protein, 236 aa, Neisseria meningitidis
MLFEGLPCLAVWCKNRLSAVLPVGGLNVSENLLEIETHPFDSVLPPKAAVMMMGTFPPKEDKRAMQFHYPNFQNDMWRVYGLVFFGDADYFKVPSNGEAAHSEKAFDAEKIKAFLHERGIASCPTVLKAVRQHGNASDKFLKVVETVDLAAVLAQMPECRHICTTGGKATEILLDIQGGGIKMPKTGETVPFPFAGRDLTLTRLPSTSRAYPLSLAKKAAAYRAFFEMAGLCEKQL

SEQ ID NO: 23108 - protein, 269 aa, Neisseria meningitidis; identical to SEQ ID NO: 15214

SEQ ID NO: 23109 - protein, 160 aa, Neisseria meningitidis; identical to SEQ ID NO: 1608

SEQ ID NO: 23110 - protein, 123 aa, Neisseria meningitidis
MKRQAFFKLMACAAFLSAVSLRLPVLGACYAILSLYAFALYGIDKRRAVRGKRRIPEHRLLLPALFGGWAGAYLGSRIFRHKTAKKRFVVLFRLTVSGNVLATCILIDYFVPPELFVKLGQHL

SEQ ID NO: 23111 - protein, 614 aa, Neisseria meningitidis; identical to SEQ ID NO: 3083

SEQ ID NO: 23112 - protein, 51 aa, Neisseria meningitidis; identical to SEQ ID NO: 3530

SEQ ID NO: 23113 - protein, 163 aa, Neisseria meningitidis; identical to SEQ ID NO: 3672

SEQ ID NO: 23114 - protein, 354 aa, Neisseria meningitidis; identical to SEQ ID NO: 7532

SEQ ID NO: 23115 - protein, 384 aa, Neisseria meningitidis
MDTHTDETKLQNTQAKRKRRLTALTLLFALAAAAAGSAFFLWWQHEEETEDAYVAGRVVQVTPQKGGTVRKVLHDDTDAVKKGDVLAVLDDDNDVLAYERAKNELVQAVRQNRRQNAATSQAGAQVALRRADLARAQDDLRRRSALAESGAVSAEELAHARAAVSQAQAAVKAALAEESSARAALGGDVSLREQPAVQTAIGRLKDAWLNLQRTQIRAPADGQVAKRSVQVGQQVAAGAPLMAVVPLSDVWVDANFKETQLRHMKIGQPAELVSDLYGKQIVYRGRVAGFSAGTGSAFSLIPAQNATGNWIKVVQRVPVRIVLNREDVDRHPLRIGLSMTVKVDTSAAGAPVSKTPGAALPEMESTDWSEVDRTVDEILGQSAP

SEQ ID NO: 23116 - protein, 604 aa, Neisseria meningitidis; identical to SEQ ID NO: 7653

SEQ ID NO: 23117 - protein, 201 aa, Neisseria meningitidis; identical to SEQ ID NO: 7112

SEQ ID NO: 23118 - protein, 415 aa, Neisseria meningitidis
MSQRRVVITGLGQVSPVGNTVAEAWDTLLAGKSGIGAITRFDASDINSRVAGEVRGFDIGQYISAKEARRMDVFIHYGIAAALQAIADSGLDDVENLDKDRIGVNIGSGIGGLPSIEVTGKAVIEGGARKINPFFIPGSLINLISGHVTILKGYRGPSYGMVSACTTGAHAIGDSLRMIKYGDADIMVAGGAEGAISTLGVGGFAAMKALSTRNDDPATASRPWDKGRDGFVIGEGAGILVLEELEHAKKRGAKIYAEIVGFGMSSDAYHITAPNEEGPALAVTRALKDAGINPEDVDYVNAHGTSTPLGDANETKALKRAFGEHAYKTVVSSTKSMTGHLLGAAGGVEAVYSILAIHDGKIPPTINIFEQDVEAGCDLDYCANEARDAEIDVAISNSFGFGGTNGTLVFKRFKG

SEQ ID NO: 23119 - protein, 97 aa, Neisseria meningitidis; identical to SEQ ID NO: 2609

SEQ ID NO: 23120 - protein, 680 aa, Neisseria meningitidis; identical to SEQ ID NO: 14002

SEQ ID NO: 23121 - protein, 188 aa, Neisseria meningitidis; identical to SEQ ID NO: 5680

SEQ ID NO: 23122 - protein, 172 aa, Neisseria meningitidis; identical to SEQ ID NO: 2773

SEQ ID NO: 23123 - protein, 78 aa, Neisseria meningitidis; identical to SEQ ID NO: 1622

SEQ ID NO: 23124 - protein, 258 aa, Neisseria meningitidis; identical to SEQ ID NO: 14545

SEQ ID NO: 23125 - protein, 188 aa, Neisseria meningitidis
LNIKYSGIENRFETAILKKNGVRYGFVSFAPNLAAVKLNDYAKVRKRITKTKQKADIVIVMFHGGAEGKQAEHLPFDTEIFYGENRGNVVEFARLAVDSGADVVFGQGSHVTRAVELYRDRFISYSGGNFATYGAINTSGISGIAPIFKIITDKQGKFISGTIIPITQADDKIPKIDPEKPLSGGLFI

SEQ ID NO: 23126 - protein, 787 aa, Neisseria meningitidis
MQFSYSWLKTQADTELSSDKLEHLLTMSGLEVEEAETAAPAFAGVVVAEVKSVEKHPDADRLNVTRVDAGTGELVQIVCGAPNVKAGIKVPCSLPGAVLPGNFKIKPTKMRGVVSDGMLCSTDELGLPDDGVNGLHILPEDAPVGTNIREYLDLDDTLFTLKITPNRADCLSIKGIAREVSALTGCAFRQPEIHTAPITGSRKQPVQINAPADCGRFISRVIENVNAKAATPDWMKQRLERSGIRSISALVDIGNYVMLEIGQPMHVFDADKLSGSLHIRRAREGETLECLNEKTVSLSENTLVVADEKGVLSLAGLMGGAASAVSDGTQNIVLEAAWFAPEIIAGKSRQYGFGSDSSFRFERGVDYRLQADAMERATELVLQICGGAAGEMVEAQGKLPEAKQVGLRLDRLKTVLGVDIPAEQVETILQHLGLQPEKTAEGFRVTAPSFRFDIEIEADLIEEIGRVYGYENIPDDYTSGRLKMLELPETRRPRFAVYNEMAAHGYREVVSYAFVDEQWEQDFAANADPIRLQNPLAAQYAVMRSTLIGGLVEILQNNLNRKQNRVRVFEIARVFGKGSDGRFVQNERIGGLWYGAAMPEQWGGKTRNADFYDIKADVENLLKNKAVEFVKTGHPALHPGRAANIVSDGKVIGFVGELHPKWLQKYDLPQAPLVFEIDMAAVLECGKTRYRAVSKFQPVRRDLAFVMPEAMSHDDLLLVLKGAANKLVQEISVFDVYRGTGLPEGMKSVAVKVILQDMENTLTDEAVEPLIGKLIGAATAAGARLRS

SEQ ID NO: 23127 - protein, 231 aa, Neisseria meningitidis; identical to SEQ ID NO: 2520

SEQ ID NO: 23128 - protein, 135 aa, Neisseria meningitidis; identical to SEQ ID NO: 803

SEQ ID NO: 23129 - protein, 43 aa, Neisseria meningitidis; identical to SEQ ID NO: 3165

SEQ ID NO: 23130 - protein, 356 aa, Neisseria meningitidis; identical to SEQ ID NO: 5919

SEQ ID NO: 23131 - protein, 200 aa, Neisseria meningitidis
MFNIPAVAVSYLIGSLSFAVIVSKYYGMDDPRTYGSGNPGATNVLRSGKKKAAVLTLLGDAAKGLVAVLLARVLQEPLGLSDSAIAAVALAALVGHMWPVFFGFKGGKGVATALGVLLALSPATALVCALIWLVMAFGFKVSSLAALTATIAAPLAALFFIPHTSWIFVTLAIAILVLLRHKSNILNLIKGKESKIGEKR

SEQ ID NO: 23132 - protein, 1102 aa, Neisseria meningitidis
MNEGEVVLTPEQIQTLRGYAFRGDTYGGWRYLASLGDRYADDAAAIVGKDANLNGLNLWMKKGVENLWDDTVGKKTRLEKFDRVALQHFNQYTKLIHRNYGRLPNTSEIERSYYKAVTENGVSSSAAIDLVINRSLPDMADGYWALGLGIEAERIHNEQAVNNPNGSEWDNRKQLISALDKGFDGSFKEKPFTFLQSVIMDVTKLGVEYTIDGWQKIGGWGNGIINDLYKSVAKREWTGIFEIVNNNIKQFRDLFPNPEGWIDDGHQCFAPWVKETKKRNGKYHVYDPLALDLDGDGIETVATKGFAGALFDHRNQGIRTATGWVAADDGLLVRDLNGNGIIDNGAELFGDNTKLADGSFAKHGYAALAELDSNGDNIINAADAAFQTLRVWQDLNQDGISQANELRTLEELGIQSLDLAYKDVNKNLGNGNTLAQQGSYTKTDGTTAKMGDLLLAADNLHSRFKDKVELTAEQAKAANLAGIGRLRDLREAAALSGDLANMLKAYSAAETKEAQLALLDNLIHKWAETDSNWGKKSPMRLSTDWTQTANEGIALTPSQVAQLKKNALVSLSDKAKAAIDAARDRIAVLDAYTGQDSNTLYYMSEEDALNIVKVTNDTYDHLAKNIYQNLLFQTRLQPYLNQISFKMENDTFTLDFSGLVQAFNHVKETNPQKAFVDLAEMLAYGELRSWYEGRRLMADYVEEAKKAGKFEDYQKVLGQETVALLAKTSGTQADDILQNVGFGHNKNVSLYGNDGNDTLIGGAGNDYLEGGSGSDTYVFGKGFGQDTVYNYDYATGRKDIIRFTDGITADMLTFTREGNHLLIKAKDDSGQVTVQSYFQNDGSGAYRIDEIHFDNGKVLDVATVKELVQQSTDGSDRLYAYQSGNTLNGGLGDDYLYGADGDDLLNGDAGNDSIYSGNGNDTLNGGEGNDALYGYNGNDVLNGGEGNDHLNGEDGNDTLIGGAGNDYLEGGSGSDTYVFGKGFGQDTVYNYHVDKNSDTMHFKGFKAADVHFIRSGSDLVLSASEQDNVRISGFFYGENHRVDTFVFDDAAISNPDFAKYINAGNNLVQSMSVFGSNTAATGGNVDANTQSVQQPLLVTPSA

SEQ ID NO: 23133 - protein, 347 aa, Neisseria meningitidis; identical to SEQ ID NO: 2159

SEQ ID NO: 23134 - protein, 558 aa, Neisseria meningitidis; identical to SEQ ID NO: 1615

SEQ ID NO: 23135 - protein, 283 aa, Neisseria meningitidis; identical to SEQ ID NO: 14093

SEQ ID NO: 23136 - protein, 96 aa, Neisseria meningitidis; identical to SEQ ID NO: 3537

SEQ ID NO: 23137 - protein, 41 aa, Neisseria meningitidis; identical to SEQ ID NO: 19547

SEQ ID NO: 23138 - protein, 208 aa, Neisseria meningitidis
MTQERFPSFFNQAPTITVRDPLAAFLGAAQDGILTYRYADAVRLCGHSCPTVAGAYLMVIKGLKALYGAELPERGSIEAAMQGARDEGTVGVTASVVQLLTGAAPETGFGGIGMQGRFARRNLLSFGAGEINGTLTLRRRDTGKTVAVSLNAALQPFAPQMRDIMPKAVSGSASAEELERFGQLWQARVKAFLTESADDPQFVIVREV

SEQ ID NO: 23139 - protein, 132 aa, Neisseria meningitidis; identical to SEQ ID NO: 1178

SEQ ID NO: 23140 - protein, 336 aa, Neisseria meningitidis
MSDTPATRDFGLIDGRAVTGYVLSNRRGTRVCVLDLGGIVQEFSVLADGVRENLVVSFDDAASYADNPFQINKQIGRVAGRIRGAAFDINGRTYRVEANEGRNALHGGSHGLAVTRFNAVAADGRSVVLRSRLQQSADGYPNDLDLDISYRLDEDDRLTVSYRATALGDTVFDPTLHIYWRLDAGLHDAVLHIPQGGHIPADAEKLPVSTVSDDLEVFDFSRPKPLDAAVAALRRETGRAGFDDAYRVPSDIGRPAAVLQAGRRRRISIYSDRNGLVIFTAAPQDFARHDAGVYDALATEAQTLPDSLNWPEFGNIRLNKGDTREATIAYGIESLS

SEQ ID NO: 23141 - protein, 767 aa, Neisseria meningitidis; identical to SEQ ID NO: 15112

SEQ ID NO: 23142 - protein, 149 aa, Neisseria meningitidis; identical to SEQ ID NO: 4552

SEQ ID NO: 23143 - protein, 556 aa, Neisseria meningitidis; identical to SEQ ID NO: 15389

SEQ ID NO: 23144 - protein, 421 aa, Neisseria meningitidis
MNTLQRRKTHQVRIDHITVGSEAPVVIQSMTNTDTADAKATALQIKELSDAGSEMVRITVNSPEAASKVAEIRRRLDDMGYATPLIGDFHFNGERLLAEFPECGKALSKYRINPGNVGKGVKGDEKFAFMIRTAAENDKAVRIGVNWGSLDQSLAKRMMDANLASSAPKPPEEVTKEALIVSALESAEKAVLLGLPEDKIILSCKVSAVQDLIQVYRELGSRCAYPLHLGLTEAGMGSKGIVASTAALSVLLQEGIGDTIRISLTPEPGSPRTQEVVVGQEILQTMGLRSFTPMVTACPGCGRTTSTVFQELAQDVQNYLRQKMSVWRTAYPGVESLNVAVMGCVVNGPGESKLADIGISLPGTGETPVAPVYVDGERKVTLKGDNIATEFLAIVEEYVKTNYGENGSKRNQNKIIPIQSL

SEQ ID NO: 23145 - protein, 259 aa, Neisseria meningitidis; identical to SEQ ID NO: 2706

SEQ ID NO: 23146 - protein, 106 aa, Neisseria meningitidis; identical to SEQ ID NO: 7008

SEQ ID NO: 23147 - protein, 70 aa, Neisseria meningitidis; identical to SEQ ID NO: 232

SEQ ID NO: 23148 - protein, 69 aa, Neisseria meningitidis; identical to SEQ ID NO: 9123

SEQ ID NO: 23149 - protein, 292 aa, Neisseria meningitidis; identical to SEQ ID NO: 1803

SEQ ID NO: 23150 - protein, 553 aa, Neisseria meningitidis
MLTYTPPDARPPAKTHEKPWLLLLMAFAWLWPGVFSHDLWNPAEPAVYTAVEALAGSPTPLVAHLFGQTDFGIPPVYLWVAAAFKHLLSPWAADSYDAARFAGVFFAVVGLTSCGFAGFNFLGRHHGRSVVLILIGCIGLIPTVHFLNPAAAAFAAAGLVLHGYSLARRRVIAASFLLGTGWTLMSLAAAYPAAFALMLPLPVLMFFRPWQSRRLMLTAVASLAFALPLMTVYPLLLAKTQPALFAQWLDDHVFGTFGGVRHVQTAFSLFYYLKNLLWFALPALPLAVWTVCRTRLFSTDWGILGVVWMLAVLVLLAVNPQRFQDNLVWLLPPLALFGAAQLDSLRRGAAAFVNWFGIMAFGLFAVFLWTGFFAMNYGWPAKLAERAAYFSPYYVPDIDPIPMAVAVLFTPLWLWAITRKNIRGRQAVTNWAAGVTLTWALLMTLFLPWLDAAKSHAPVVRSMEASLSPELKRELSDGIECIDIGGGDLHTRIVWTQYGTLPHRVGDVQCRYRIVRLPQNADASQGWQTVWQGARPRNKDSKFALIRKIGENI

SEQ ID NO: 23151 - protein, 144 aa, Neisseria meningitidis; identical to SEQ ID NO: 17472

SEQ ID NO: 23152 - protein, 129 aa, Neisseria meningitidis
LKAGIRLLSESGKTQTVRNIVVKPKPLKAYNLTVADWHTYFVKGSQAETEGVWVHNACPPKRTGSSKNEKHGDGGRSQISAESRIAELKNKIIPGMHKNERLKIEKTIRNIAKNANRKAKGEEHGRHGR

SEQ ID NO: 23153 - protein, 61 aa, Neisseria meningitidis; identical to SEQ ID NO: 965

SEQ ID NO: 23154 - protein, 37 aa, Neisseria meningitidis; identical to SEQ ID NO: 7611

SEQ ID NO: 23155 - protein, 185 aa, Neisseria meningitidis; identical to SEQ ID NO: 313

SEQ ID NO: 23156 - protein, 164 aa, Neisseria meningitidis; identical to SEQ ID NO: 3532

SEQ ID NO: 23157 - protein, 119 aa, Neisseria meningitidis; identical to SEQ ID NO: 121

SEQ ID NO: 23158 - protein, 112 aa, Neisseria meningitidis; identical to SEQ ID NO: 10404

SEQ ID NO: 23159 - protein, 144 aa, Neisseria meningitidis
MTEPKHEMPTEEQVAARKKAKAKIRTIRIWAWVILALLALTALLSQCAMSKPQAKQKIVESCVKNIPFAEKWQNDLRARGLDSNNTRLAVDYCKCMWEQPLDRLSEKQIRSFGKLGAQEQLDLLGGANAFEARDKQCVADLKSE

SEQ ID NO: 23160 - protein, 498 aa, Neisseria meningitidis
MSLALVYSRALSGMNAPLVEVEAHLANGLPHFNIVGLPDTEVKESRDRVRAAIIQSGFEFPAKKITVNLAPADLPKESGRFDLPIAIGILAASGQVAPEKLAEYEFAGELALSGLLRPVRGALAMAWQGMQAKRAFVLPEENAGQAAVMRGITVYGVRSLGEVAAHLNGIEPLAQTECQVPQMPFEHGGQPDLCDVKGQHTARLALEIAAAGGHSLLMMGPPGTGKSMLSQRLPGILPPLTEDELVEVWALRSLLPNHQQQLDSNRPFRSPHHSASAAAMVGGGSDPRPGEISLAHHGVLFLDELPEFDRKVLEVLREPLENGEIHISRAARQAVYPAKFQLVAAMNPCPCGYLGHPVKPCRCTPESVARYRSKISGPLLDRIDLTIEVPSLSAAELMQQEAGESSASVLERVIAARDKQYARQGKVNAALSVSELDSQARIQKEAQEALGSLLEKLSLSARSFHRIMRVARTLADLAGDEEVGRSHVMKAIGFRRAL

SEQ ID NO: 23161 - protein, 321 aa, Neisseria meningitidis; identical to SEQ ID NO: 17302

SEQ ID NO: 23162 - protein, 121 aa, Neisseria meningitidis; identical to SEQ ID NO: 4117

SEQ ID NO: 23163 - protein, 279 aa, Neisseria meningitidis
MQNHVISLASAAERRAHIADTFGRHDIPFQFFDALMPSEELNRVMAELVPGLAKQHLLSGVEKACFMSHVVLWKQALDEGVPYIAVFEDDVLLGEGVEQFLAEDTWLEERFDPDSAFIVRLETMFMHVLTSPSGVADYCGRAFPLLESEHWGTAGYIISRKAMRFFLDRFAALPSEGLHPVDWMMFGNPDDREGMPVYQLNPALCAQELHYAKFHDQNSALGSLIEHDRLLNRKQQRRDSPANTFKHRLIRALTKISREREKRRQRREQLIGKIIVPFQ

SEQ ID NO: 23164 - protein, 92 aa, Neisseria meningitidis; identical to SEQ ID NO: 1287

SEQ ID NO: 23165 - protein, 71 aa, Neisseria meningitidis
MVAFGEIGLSGEVRPVARGQERLKEAEKLGFKRAIVPKANMPRNAKEFPNLKIYGVSSLQEAIDICRDSRE

SEQ ID NO: 23166 - protein, 168 aa, Neisseria meningitidis
MFEQEDEWISKTQMKKQMNGLQDLGMELTKLSNDTLKKIGLDEDLYEAVVTYKKITSNGALKRQAQFIGRLMRDTDPAPIEAFLAKLRGDDAAHNAFLQRVEQARVRLLADDGALTQFMSDFPHADAGKLRTLIRNTKKEQEQNKPPKNFRALFQELKTVMENGDAEI

SEQ ID NO: 23167 - protein, 48 aa, Neisseria meningitidis; identical to SEQ ID NO: 6016

SEQ ID NO: 23168 - protein, 250 aa, Neisseria meningitidis; identical to SEQ ID NO: 15559

SEQ ID NO: 23169 - protein, 330 aa, Neisseria meningitidis; identical to SEQ ID NO: 19399

SEQ ID NO: 23170 - protein, 385 aa, Neisseria meningitidis
MKFATKAIHSSYDCDEHNRALMPPIYQNSMFALHEIGENVPYRYSRLSNPTRQILEDTVADLEHGAAGFAFSSGMAGIDAVWRTFLQPGDTIVAVADIYGGAYDLLVDVYQKWGVNVVFADLGNPDNLDELLKAHKVKLVWLETPSNPLLRLVDIKALAAKAKATGALVGIDNTFATPYLQQPLDMGCDFVFHSATKYLCGHSDVLMGIVVAKTKELAQPLHDMMVHTGAVAGPLDCWLVLRGIKTLALRMEAHCKNALEIARRLEDHPAIEKVFHPGLPSHEHYELAQAQMPKGIGGVVTVYLKNDTREAANSVIKNMKLVKMASSLGGVESLVNHCYSQSHSGVPHDVKMEMGIRVGLLRFSVGIEDVDDIWNDISAALDTTV

SEQ ID NO: 23171 - protein, 104 aa, Neisseria meningitidis; identical to SEQ ID NO: 2048

SEQ ID NO: 23172 - protein, 754 aa, Neisseria meningitidis; identical to SEQ ID NO: 15328

SEQ ID NO: 23173 - protein, 281 aa, Neisseria meningitidis
VNRTAFCCLSLTAALILTACSSGGGGSGGGGVAADIGTGLADALTAPLDHKDKGLKSLTLEDSIPQNGTLTLSAQGAEKTFKAGDKDNSLNTGKLKNDKISRFDFVQKIEVDGQTITLASGEFQIYKQDHSAVVALQIEKINNPDKIDSLINQRSFLVSGLGGEHTAFNQLPGGKAEYHGKAFSSDDPNGRLHYSIDFTKKQGYGRIEHLKTPEQNVELASAELKADEKSHAVILGDTRYGSEEKGTYHLALFGDRAQEIAGSATVKIGEKVHEIGIAGKQ

SEQ ID NO: 23174 - protein, 278 aa, Neisseria meningitidis; identical to SEQ ID NO: 6961

SEQ ID NO: 23175 - protein, 245 aa, Neisseria meningitidis
MLSARYLHLHEALGLGPMWLKRGAAVLPPKNTPATPAQARPQTVRAAPIRPSQPHNGQARLETMKALETAAVPTRKPAPETGTPLSGVSDGIAPVPAASGITKLAVVSLCPPTEDMVYGQLFHGKAGVLLDNILKAVGLDAAYVHKTSWVKTAAVGNPMPSEQAIADALGQIARELDGCRAPAVLFLGQAFVQPERQAMIETLCGSRPFFIIDHPARLLRQPELKARAWQVLKQLKRALRQGGGS

SEQ ID NO: 23176 - protein, 55 aa, Neisseria meningitidis; identical to SEQ ID NO: 13928

SEQ ID NO: 23177 - protein, 344 aa, Neisseria meningitidis; identical to SEQ ID NO: 7515

SEQ ID NO: 23178 - protein, 283 aa, Neisseria meningitidis; identical to SEQ ID NO: 19158

SEQ ID NO: 23179 - protein, 230 aa, Neisseria meningitidis; identical to SEQ ID NO: 1269

SEQ ID NO: 23180 - protein, 366 aa, Neisseria meningitidis
MTRIAILGGGLSGRLTALQLAEQGYQIALFDKGTRQGEHAVAYVAAAMLAPAAEAVEATPEVIRLGRQSIPLWRGIRCRLNTHTMMQENGSLIVWHGQDKPLSSEFVRHLKRGGVADDEIVRWRADDIAEREPQLGGRFSDGIYLPTEGQLDGRQILSALADALDELNVPCHWEHECAPEDLQAQYDWLIDCRGYGAKTAWNQPPEYTSTLRGIRGEVARVYTPEITLNRPVRLLHPRYPLYIAPKENHIFVIGATQIESESQAPVSVRSGLELLSALYAVHPAFGEADILEIATGLRPTLNHHNPEIRYSLARRLIEINGLFRHGFMISPAVTAAAVRLAVALFDGKDAPERDEESGLAYIRRQD

SEQ ID NO: 23181 - protein, 140 aa, Neisseria meningitidis; identical to SEQ ID NO: 15310

SEQ ID NO: 23182 - protein, 444 aa, Neisseria meningitidis; identical to SEQ ID NO: 14335

SEQ ID NO: 23183 - protein, 391 aa, Neisseria meningitidis; identical to SEQ ID NO: 6209

SEQ ID NO: 23184 - protein, 297 aa, Neisseria meningitidis; identical to SEQ ID NO: 560

SEQ ID NO: 23185 - protein, 239 aa, Neisseria meningitidis; identical to SEQ ID NO: 14417

SEQ ID NO: 23186 - protein, 248 aa, Neisseria meningitidis
MNVLISNDDGYLSEGIAVLARVTAEFANVRVVAPERDRSGVSNSLTLERPLQLKQAQNGFYYVNGTPTDCIHIGQSVFSDFQADFVFSGINRGANMGDDTLYSGTVAAATEAYLMGMPAVAFSLNDASGRYWATAEKALWTLLAHFFKTPPQSPILWNINIPAVAPEDVRGIKIARLGRRHHGQNVIPARNPRGEQIYWIGPVGEVSDREEGTDFGECGAGFITVTPLQIDLTAYPDMAETAAFWHAD

SEQ ID NO: 23187 - protein, 318 aa, Neisseria meningitidis; identical to SEQ ID NO: 562

SEQ ID NO: 23188 - protein, 472 aa, Neisseria meningitidis; identical to SEQ ID NO: 15980

SEQ ID NO: 23189 - protein, 231 aa, Neisseria meningitidis
MKAMILAAGRGERMRPLTDTTPKPLLDVAGKPLIGWHLCRLKQAGFTEIVINHAWLGRQIEDALGDGSAYGVNIAYSPEPAGGLETAGGIAQALPLLGGQPFLVVNGDVLTDIDFTAAFQTALSLPEHISAHLWLVENPPHNPDGDFSLLPDGSVRPEVNGGNGLTFSGVGIYRPEMFDGIEAGSVAKLAPVLRNEMRQNRVSGQKHTGLWLDVGTVCRLKEAQALAGAWK

SEQ ID NO: 23190 - protein, 246 aa, Neisseria meningitidis
MLIVRPSGRAAEDVETCLNAGWRAEVLSPVEIEADAAGLELLSEQYARADAVFWVSPTAVETAVPYLNLSDGIKAQIAVGQGSRRALERCLVRTVIAPDDGNDSEAVLRLPVWNSLPEGARVLFVRGHGGRDFLMNALQEKGFRTEMAEVYFRRHKPLNFQNFQTENIAAAYITSTELVRLLFGQLPPQFSRFFKSLLYFTHHPRIAEALKREGVCSVETVPTLEAALSHSSISVSDGMVFPGTSN

SEQ ID NO: 23191 - protein, 164 aa, Neisseria meningitidis; identical to SEQ ID NO: 14810

SEQ ID NO: 23192 - protein, 423 aa, Neisseria meningitidis; identical to SEQ ID NO: 15306

SEQ ID NO: 23193 - protein, 287 aa, Neisseria meningitidis
MRILLTGSKSQLARCLRDRLPEDWETIATDSASLDITDADAVCNMVKSFQPDAIVNTAAYTAVDKAEGDAAAAFAVNASAVYNLALAAHRAHARFIHISTDYIFDGKGKSPYQESDFTNPSNVYGQSKTAGELLALSANPDSLILRTSWLFSEYGDNFVRTMLNLARERSPLSAVHNQIGCPTYAGDLSAAIIRLLQQSNPVRGIYHYVGGKSVSWYEFAQHIFQAASQQQTSFPIPELTAVSDKEYPTAAPRPAYSILDCRKIENDFGIKPSDWQKALAQVVSKLL

SEQ ID NO: 23194 - protein, 371 aa, Neisseria meningitidis; identical to SEQ ID NO: 8192

SEQ ID NO: 23195 - protein, 151 aa, Neisseria meningitidis; identical to SEQ ID NO: 22990

SEQ ID NO: 23196 - protein, 384 aa, Neisseria meningitidis; identical to SEQ ID NO: 19277

SEQ ID NO: 23197 - protein, 808 aa, Neisseria meningitidis; identical to SEQ ID NO: 4367

SEQ ID NO: 23198 - protein, 291 aa, Neisseria meningitidis; identical to SEQ ID NO: 7133

SEQ ID NO: 23199 - protein, 273 aa, Neisseria meningitidis; identical to SEQ ID NO: 6485

SEQ ID NO: 23200 - protein, 137 aa, Neisseria meningitidis; identical to SEQ ID NO: 5394

SEQ ID NO: 23201 - protein, 456 aa, Neisseria meningitidis; identical to SEQ ID NO: 6557

SEQ ID NO: 23202 - protein, 468 aa, Neisseria meningitidis
MEKNTLSARAPSPWLPLLLAIAIFMQMLDATILNTALPEIAADLNESPLNMQLAVISYTLTVALLIPLSGYLADRFGTKKVFFGSIAVFMLGSALCAASGSLFELTLSRVVQGIGGSMLVPIPRLTILRVYDKSKLLNAINYAVMPALIGPVLGPLAGGYLVEYASWHWIFLLNLPIGLLGFILGRNIMPDIKGSNISLDFKGYLIFSAAACLLLLSAESLSHALPPYFALLPLCGGLLFARRYFRHMKTASKPIYSADLFLIRTFRLGLAGNLFSRLGISSIPFLMPLMFQVAFGFGASLSGWLVAPVALSSLLVKPLIAPLMKRFGYRTVLLWNTKLLAAFIMLLALPDGNSPLWIWIFLSLAIGACNSLQFSAMNTLTLADLRPQQTGSGNSLMAVNQQLSISMGIVAGALILKNWTFLIPASSGLHSAFRMTLLSIGGITLASSLVFKRLHVSDGANLTRNTPS

SEQ ID NO: 23203 - protein, 761 aa, Neisseria meningitidis; identical to SEQ ID NO: 2796

SEQ ID NO: 23204 - protein, 291 aa, Neisseria meningitidis; identical to SEQ ID NO: 827

SEQ ID NO: 23205 - protein, 337 aa, Neisseria meningitidis; identical to SEQ ID NO: 263

SEQ ID NO: 23206 - protein, 751 aa, Neisseria meningitidis; identical to SEQ ID NO: 18832

SEQ ID NO: 23207 - protein, 198 aa, Neisseria meningitidis
MAFITRLFKSSKWLIVPLMLPAFQNVAAEGIDVSRAEARITDGGQLSVSSRFQTELPDQLQQALRRGVPLNFTLSWQLSAPTIASYRFKLGQLIGDDDNIDYKLSFHPLTNRYRVTVGAFSTDYDTLGAALRATGAVANWKVLNKGALSGAEAGETKAEIRLLLSTSKLPKPFQINALTSQNWHLDSGWKPLNIIGNK

SEQ ID NO: 23208 - protein, 376 aa, Neisseria meningitidis
MAKHLPLAVLTALLLAACGGSDKPPAEKPAPAENQNVLKIYNWSEYVDPETVADFEKKNGIKVTYDVYDSDETLESKVLTGKSGYDIVAPSNAFVGRQIKAGAYQKIDKSLIPNYKHLNPEMMRLMDGVDPGHEYAVPFYWGTNTFAINTERVKKALGTDKLPDNQWDLVFDPEYTSKLKQCGISYLDSAAEIYPMVLNYLGKNPNSSNTEDIREATALLKKNRPNIKRFTSSGFIDDLARGDTCVTIGFGGDLNIAKRRAEEAGGKEKIRVMMPKEGVGIWVDSFVIPKDAKNVANAHKYINDFLDPEVSAKNGNFVTYAPSSKPARELMEDEFKNDNTIFPTEEDLKNSFIMVPIQPAALKFMVRQWQDVKAGK

SEQ ID NO: 23209 - protein, 502 aa, Neisseria meningitidis; identical to SEQ ID NO: 7174

SEQ ID NO: 23210 - protein, 362 aa, Neisseria meningitidis
MSDYTQQLQDKKDHLKTLFAGLDVPEWEVYESPDKHYRMRAEFRIWHEGGEMFYAMFEKGQKAGGASLIRCDRFEAASEAVNRLMPELIAVAAQSAELRNRWYAVEFLSTLSGEMLVTMIYHKRLDNEWMQAAQALQQQLDISVIGRSRGQKIVLKQDYVTETLKVGNRDFRYRQIEGSFTQPNAAVCQKMLEWACGAAEGLDGDLLELYCGNGNFTLPLSEKFERVLATEISKTSISAAQWNIEANRIGNIKIARLSAEEFTEAYTGKREFKRLKDGGIALTDYAFSTIFVDPPRAGIDEETLKLVSQFDNIIYISCNPETLRANLDTLVETHAVERAALFDQFPFTHHIESGVLLKKKIL

SEQ ID NO: 23211 - protein, 181 aa, Neisseria meningitidis; identical to SEQ ID NO: 6628

SEQ ID NO: 23212 - protein, 896 aa, Neisseria meningitidis
MSDNRLDTARRHSLFLARQLDNGKLKPEIFLPMLDKVLTEADFQAFADWDKIRAEENEEELARQLRELRRYVVSQIIVRDINRISDLNEVTRTITLFADFAVNAALDFAYAYYRDMYGTPIGRYIKSPQHLSVVAMGKAGGYELNVSSDIDLIFIYPESGDTDGRRERGNQEFFTKVGQKLIALLNDITADGQVFRVDMRLRPDGDSGALVLSETALEQYLITQGREWERYAWCKGRVVTPYPNDIKALVRPFVFRKYLDYSAYEAMRKLHRQISSEVSKKGMADNIKLGAGGIREVEFIAQIFQMIRGGQMRALQLKGTRETLEKLAESGIMPSENVETLLAAYRFLRDVEHRLQYWDDRQTQTLPASPEQRQLLAESMGFDDYADFLNALNQHRNQVNRLFNEILSEPEEQTQSNGEWQWVWQDKPDEEGRRCRLKAHGFDAETVAARLDQIRHGHKYRHLSAHAQPRFDAVVPLFVQAAAAQSNPTDTLMRLLDFLENISRRSAYLAFLNEHPQTLAQLAEIMGQSSWVAAYLNKYPILLDELISAQLLDTAFDWQALAAALSDDLKACGGDTEAQMDTLRRFQHAQVFRLAVQDLAGLWTVESLSDQLSALADTILAAALLCAWADMPKKHRDTPQFAVVGYGKLGGKELGYASDLDLVYLYDDPHPDAGDVYSRLARRLTNWLSAATGAGSLYETDLRLRPNGDAGFLAHSIAAFEKYQRENAWTWEHQSLTRARFICGTSEIQTAFDRIRTEILTAERDQTALAGEIIEMREKMFPTHPPADSNVKYARGGVVDVEFIVQYLILAHARKYPQLLDNYGNIALLNIAADCSLIDKNLAGQSRTAYRFYRQQQHNTKLRDAAKTEVSDELLSHYGNVRKLWREVFGEEAATA

SEQ ID NO: 23213 - protein, 143 aa, Neisseria meningitidis; identical to SEQ ID NO: 6042

SEQ ID NO: 23214 - protein, 422 aa, Neisseria meningitidis
VKPLRRLTNLLAACAVAAAALIQPALAADLAQDPFITDNAQRQHYEPGGKYHLFGDPRGSVSDRTGKINVIQDYTHQMGNLLIQQANINGTIGYHTRFSGHGHEEHAPFDNHAADSASEEKGNVDEGFTVYRLNWEGHEHHPADAYDGPKGGNYPKPTGARDEYTYNVNGVARSIKLNPTDTRDVRQRISDNYNNLGSNFSDRADEANRKMFEHNAKLDRWGNSMEFINGVAAGALNPFISAGEAVDQWMQENPNAAETVEALVNVLPFAKVKNLTKAAKPGKAAVSGDFSDSYKHNTASRLSQSVDGEMFQTRNVDFKAKSIGTKIHDGAQGKHISGHRNYIEGKSTLNQNINPQELLNGIHSGAYPVISKGARGNPVVDFGYPIGSDGKSGLSTNFGTIHSGKNGVHIVPANPKTIKKVQ

SEQ ID NO: 23215 - protein, 93 aa, Neisseria meningitidis; identical to SEQ ID NO: 7643

SEQ ID NO: 23216 - protein, 245 aa, Neisseria meningitidis; identical to SEQ ID NO: 428

SEQ ID NO: 23217 - protein, 105 aa, Neisseria meningitidis; identical to SEQ ID NO: 895

SEQ ID NO: 23218 - protein, 436 aa, Neisseria meningitidis
VANQQTSSGSSKFGDLKKRLLFLFGALIVFRIGAHIPVPGVDAVALAKLYESAGNGILGILNMFSGGSLERFSIFAIGIMPYISASIIVQLASEILPSLKALKKEGEAGRKVITKYTRYGTVLLAILQSLGVASFVFQQGIVVTSSFEFHVSTVVSLVTGTMFLMWLGEQITERGIGNGISLIITAGIASGIPSGIAKLVTLTNQGSMSMLTALFIVFGALLLIYLVVYFESAQRKIPIHYAKRQFNGRAGSQNTHMPFKLNMAGVIPPIFASSIILFPSTLLGWFGSADTNSVLHKIAGLLQHGQLLYMALFAATVIFFCYFYTALVFSSKEMAENLKKSGAFVPGIRPGEQTSRYLEKVVLRLTLFGALYITTICLIPEFLTTVLNVPFYLGGTSLLILVVVTMDFSTQINSYRLTQQYDKLMTRSEMKSFSRK

SEQ ID NO: 23219 - protein, 144 aa, Neisseria meningitidis; identical to SEQ ID NO: 3606

SEQ ID NO: 23220 - protein, 361 aa, Neisseria meningitidis; identical to SEQ ID NO: 7621

SEQ ID NO: 23221 - protein, 81 aa, Neisseria meningitidis; identical to SEQ ID NO: 2079

SEQ ID NO: 23222 - protein, 942 aa, Neisseria meningitidis; identical to SEQ ID NO: 14566

SEQ ID NO: 23223 - protein, 335 aa, Neisseria meningitidis
MYPLARRILFALDAEKAHHFTLDALYTVYKLGLIPVTGNRTKPVKLMGMDLPNPVGLAAGLDKNGEYIDALGALGFGFIEIGTVTPKPQPGNPQPRLFRVPEHQGIINRMGFNNHGIDTMIRNIEKSKFSGVLGINIGKNAVTPIENAADDYLICLEKAYAHASYITVNISSPNTKNLRALQGGDELSALLEALKNKQAQLASVHGKYVPLAVKIAPDLDEAQIEDIAHVVKSVEMDGIIATNTTIDKSSLGSHPLAGEQGGLSGLPVHEKSNRVLKLLADHIDGKLPIIGVGGIMEGRDSADKIRLGATAVQVYSGLIYKGPALVKECLKALAQ

SEQ ID NO: 23224 - protein, 916 aa, Neisseria meningitidis
MLFNATQAEELRVAIVDGQNLLDLDIETLGKEQRKGNIYKGIITRIEPSLEACFVDYGTDRHGFLPFKEVSRSYFQDYEGGRARIQDVLKEGMEVIVQVEKDERGNKGAALTTFISLAGRYLVLMPNNPRGGGVSRRIEGEERQELKAAMAELDIPNGMSIIARTAGIGRSAEELEWDLNYLKQLWQAIEEAGKAHHDPYLLFMESSLLIRAIRDYFRPDIGEILVDNQEVYDQVAEFMSYVMPGNIGRLKLYEDHTPLFSRFQIEHQIESAFSRSVSLPSGGAIVIDHTEALVSIDVNSARATRGADIEDTAFKTNMEAAEEVARQMRLRDLGGLVVIDFIDMENPKHQRDVENVLRDALKKDRARVQMGKLSRFGLLELSRQRLKPALGESSHVACPRCAGTGVIRGIESTALHVLRIIQEEAMKDNTGEVRAQVPVDVATFLLNEKRAELFAMEERLDVNVVLIPNIHLENPHYEINRIRTDDVEEDGEPSYKRVAEPEEDESAKPFGGEKAKAARPEPAVKGVRHTSPAPTAAPEKKTSWWDSFKAWLKRIFGGSETQAAPAAETSEKRSTANRSGSRANNRRQNPRRSKREGSKVEVREVAGKTAGQEARADKAETRNNGNRRRNERGDRAAERANEAEIQSRNVQPAATVADAAPSETEMQTGKRRRNGSRSERSQTAPETAAVAETAVQTAENTPSEPHTAEDKGSKPKSERNRRERDSRDAKERRERNNQRDRRQNGKKRNIPSAAKIEQYLNIHDTADKVRSAAAHVFGETDANAPITVSIADPVAERDLPTASPAVSNGDAPVYDAAEKIRRATAAILPEGATPKAEAQEMPSETATFTAAAEQARETAQTGGLVLIETDPAALKAWAAQPEVQTGRGLRRSEQPKPSEVATVPAEEMIQVETRQG

SEQ ID NO: 23225 - protein, 115 aa, Neisseria meningitidis; identical to SEQ ID NO: 7546

SEQ ID NO: 23226 - protein, 223 aa, Neisseria meningitidis; identical to SEQ ID NO: 7430

SEQ ID NO: 23227 - protein, 245 aa, Neisseria meningitidis
MKQVDLNTDLAEGCGSDEALLQLITSANIACAQHAGSIADIRAALAYAQQNGVRIGAHPGYPDRENFGRTEMNLSEADLRACLNYQLGALQALCRDQGLEMAYVKPHGAMYNQAAKNRALADTVARIVADFDPKLKLMALSGSLLLEAGKAAGLGVISEVFADRRYMPDGTLVPRSRPDAQVDSDEEAIAQVLQMVRDGQVKAVDGSLVAVQADSICLHGDGPHAVVFAEKIRQELLAAGIKVSA

SEQ ID NO: 23228 - protein, 456 aa, Neisseria meningitidis
MINPIASLSPLDGRYTQSVEALRPIFSEYGLMKARVKVELNWLKALAAEPKIAEVPPFSAETLAEIDTVIENFSLEDAAAVKAIEATTNHDVKAIEYWLKKRFAEVPEVAAVSEFIHFACTSEDINNLSHALMLQEAREAVLLPKLAEIIGKLTAMAHDLAAVPMMSRTHGQPATPTTLGKETANVVYRLQRQFKNLQAQEFLGKINGAVGNYNAHMVAYPDVDWETHCRNFVEISLGLTFNPYTIQIEPHDYMAEFFQTLSRINTILIDFNRDVWGYISLGYFKQKVKAGEVGSSTMPHKVNPIDFENSEGNLGMSNAVLGFLSEKLPISRWQRDLTDSTVLRNMGVGVGYAVLGFAAHLRGLNKLEPNPAALAADLDATWELLAEPIQTVMRRYGVANPYEKLKDLTRGKGGITPEVLKGFIESLEIPVEAKAKLLELTPALYVGKAEALAKRI

SEQ ID NO: 23229 - protein, 390 aa, Neisseria meningitidis; identical to SEQ ID NO: 22496

SEQ ID NO: 23230 - protein, 302 aa, Neisseria meningitidis
MNTPQSAIIPDHAQAGIFIEADFAANRLNDIKAACRASLDALTALKARFPDDILGLTIAFGSKAWATFGHTDEGSEIKPFSEMGNGLAPSTQHDMSIHIQSFRQNAAYALAQSVLGAFGDSICVVSEEHGLRLYQDRGLDGFVDGTENPQGDENVREVAIIPEGKPDAGGSYVLLQKYLHDLKKWDAVPVAEQEASVGRGKETDDEFGRDVRLPDSHLGRVNLKENGVGLKIVRRSLPFGKISGEHGLMFTAYCRTLHNIEAQLLSMFGDTDGKTDLLLRHLSAAVSGGYYYAPSVERLQNL

SEQ ID NO: 23231 - protein, 137 aa, Neisseria meningitidis
LFLVQKLTVPHTYTAQGSLRDAVCYPDIDKQHPELIEAMNTCRLGYLVDKLDKTDDWQHKLSPGELQRVAFVRALLSKPKIVLLDEATAALDEPTEALLYRALKQKLPDSIIISIGHRSTLNAFHNMHLDVGNAACG

SEQ ID NO: 23232 - protein, 621 aa, Neisseria meningitidis
MIEKLTFGLFKQEDARSFMRLMAYVRPYKIRIVAALIAIFGVAATESYLAAFIAPLINHGFSAPAAPPELSAAAGIISTLQNWREQFTYMVWGTENKIWTVPLFLIILVVIRGICRFTSTYLMTWVSVMTISKIRKDMFAKMLTLSSRYHQETPSGTVLMNMLNLTEQSVSNASDIFTVLTRDTMIVTGLTIVLLYLNWQLSLIVVLMFPLLSLLSRYYRDRLKHVISDSQKSIGTMNNVIAETHQGHRVVKLFNGQAQAANRFDAVNRTIVRLSKKITQATAAHSPFSELIASIALAVVIFIALWQSQNGYTTIGEFMAFIVAMLQMYAPIKSLANISIPMQTMFLAADGVCAFLDTPPEQDKGTLAPQRVEGRISFRNVDVEYRSDGIKALDNFNLDIRQGERVALVGRSGSGKSTVVNLLPRFVEPSAGNICIDGIDIADIKLDCLRAQFALVSQDVFLFDDTLFENVRYSRPDAGEAEVLFALQTANLQSLIDSSPLGLHQPIGSNGSNLSGGQRQRVAIARAILKDAPILLLDEATSALDNESERLVQQALERLMENRTGIIVAHRLTTIEGADRIIVMDDGKIIEQGTHEQLMSQNGYYTMLRNISNKDAAVRTA

SEQ ID NO: 23233 - protein, 547 aa, Neisseria meningitidis
MDAFTRAWYALERHNQDARHVLLRDRFACEPDRFERMHERLDGMLFDYSKNRLGEDTLQLLCNLADAADLEGKMRALRTGAKVNGSEGRAALHTALRLPDGAGAVYADGRDVLPEIRRELNRALKFAHSLDDGSYQGTTGKRITDFVHIGIGGSDLGPAMCVQALEPFRRHIAVHFAANADPACLDEVLCRLNPETTVFCVASKSFKTPETLLNAQAVKAWYRGAGFSESETARHFCAVSADTAAAAAFGIAAERVFAMYDWVGGRYSVWSPVGLPVMVAVGGARFRELLAGAHAMDSHFFHTPPRRNIPVLMALIAVWYNNFQHADGQTAVPYSHNLRLLPAWLNQLDMESLGKSRASDGSPAVCKTGGIVFGGEGVNCQHAYFQLLHQGTRLIPCDFIVPMTAQGVEDGRSRFTVANAFAQAEALMKGKTLDEARAELADLPEAERERLAPHKEFPGNRPSNSILLERLTPYNLGMLMAAYEHKTFVQGVIWDINPFDQWGVEYGKQLAKTIIGELEGGTSVHDASTEGLMAFYRECRLKGGGAA

SEQ ID NO: 23234 - protein, 277 aa, Neisseria meningitidis
MPHALVLQFPSAETLPSDFPSRLPEPDYADEKRMRFIVEEGFSLSEKDAALLGSRQIDHAVLSDMDFGELGLIVSDMDSTLITIECVDEIAAGVGLKDKVAEITERSMRGELDFEQSLRSRVALLAGLDEQILADVYENVLKLSPGAEFLLDECKRHDVKFLLVSGGFTFFTERLQQRLGFEYQHANVLEIENGRLTGRLKGRIIDAQAKADLLREYRSRLGLQPHQVLAMGDGANDIPMLKEAGIGVAYRAKPKAQAAADACINFGGLERVRGLFG

SEQ ID NO: 23235 - protein, 288 aa, Neisseria meningitidis; identical to SEQ ID NO: 3535

SEQ ID NO: 23236 - protein, 233 aa, Neisseria meningitidis; identical to SEQ ID NO: 6431

SEQ ID NO: 23237 - protein, 206 aa, Neisseria meningitidis; identical to SEQ ID NO: 1164

SEQ ID NO: 23238 - protein, 475 aa, Neisseria meningitidis; identical to SEQ ID NO: 3229

SEQ ID NO: 23239 - protein, 144 aa, Neisseria meningitidis; identical to SEQ ID NO: 8878

SEQ ID NO: 23240 - protein, 374 aa, Neisseria meningitidis; identical to SEQ ID NO: 16979

SEQ ID NO: 23241 - protein, 161 aa, Neisseria meningitidis; identical to SEQ ID NO: 1189

SEQ ID NO: 23242 - protein, 436 aa, Neisseria meningitidis; identical to SEQ ID NO: 6841

SEQ ID NO: 23243 - protein, 238 aa, Neisseria meningitidis; identical to SEQ ID NO: 3469

SEQ ID NO: 23244 - protein, 133 aa, Neisseria meningitidis; identical to SEQ ID NO: 8

SEQ ID NO: 23245 - protein, 433 aa, Neisseria meningitidis; identical to SEQ ID NO: 14229

SEQ ID NO: 23246 - protein, 201 aa, Neisseria meningitidis
MTIYFKNGFYDDTLGSIPEGAVAVRAEEYAALLAGQTQGGQIAADSDGRPVLTPPRPSEYHEWDGKKWKISKAAAAARFAEQKNALAFRLAAKADELKNSLLAGYPQVEIDSFYRQEKEALARQADNNAPTPMLAQIAAARGVELDVLIEKVVEKSARLAVAAGAVIGKRQQLEDKLNAIETAPGLDALEKEIEEWTLNIG

SEQ ID NO: 23247 - protein, 277 aa, Neisseria meningitidis; identical to SEQ ID NO: 7531

SEQ ID NO: 23248 - protein, 262 aa, Neisseria meningitidis; identical to SEQ ID NO: 14406

SEQ ID NO: 23249 - protein, 328 aa, Neisseria meningitidis; identical to SEQ ID NO: 372

SEQ ID NO: 23250 - protein, 99 aa, Neisseria meningitidis
MKKMFVLFCMLFSCAFSLAAVNINAASQQELEALPGIGPAKAKAIAEYRAQNGAFKSVDDLTKVKGIGPAVLAKLKDQASVGAPAPKGPAKPVLPAVKK

SEQ ID NO: 23251 - protein, 443 aa, Neisseria meningitidis
MSGWHTLLQDASYKGVGFDIEVVDESNGKALAEHARPFVQGIDLEDVGTTGRQVQINAVFWGKGYAGRLKKLLDALEQPGGGVLVHPVWGRMHNMIAASWSYRHEADYVDYAGIDITFREAAEAQEIFVFENAFLVELEALIADIDTYREAAIGFVDAVLAVDAGVSALWGSALGIWSAASGTFGAVRRLFDLDKIAFPDRGGYSAAAFKNGSAKLFADISVMVDTGIRREAGLADNAMHHAGWSPRQRFDGAAAVADRAAAIPDNLLTGRFSDGLQNRLNRLTAKQVQPVAQAVRLLSTSSLLSVATALIEAHGEEMTAPDLIEVNRAMRRRMQAEIAALRAVQTAAAESGGLTANAVYTEAYQTAESLRAAAGRLNALVAAVINQKPPLIVRQAPIDGTIHQIAHEFYGDIARAAELVRLNPHIHHPAFIKRGTLVNSYAK

SEQ ID NO: 23252 - protein, 40 aa, Neisseria meningitidis; identical to SEQ ID NO: 1884

SEQ ID NO: 23253 - protein, 92 aa, Neisseria meningitidis; identical to SEQ ID NO: 600

SEQ ID NO: 23254 - protein, 222 aa, Neisseria meningitidis; identical to SEQ ID NO: 6339

SEQ ID NO: 23255 - protein, 250 aa, Neisseria meningitidis; identical to SEQ ID NO: 2637

SEQ ID NO: 23256 - protein, 208 aa, Neisseria meningitidis; identical to SEQ ID NO: 15132

SEQ ID NO: 23257 - protein, 424 aa, Neisseria meningitidis
MPSETSSPRKENETEVHIPAAPFIVKQSGSNALAVCALVLAALGLGTSGFLFVQGQNVLKNQELAFNQKIDKAALGESENAALLKDNLNRQAAIQSELDRLDGNVKANGEQILEMQKSYRELTKGRADWLVDETETILNLAAQQLVLTGNIQTAVGVLEHIDSRLSRFNQAELLPIKQAVSSDLAELKNRPYVDISGTALRLDRLEIAVSGLPLILDGVLKPSVQARNEAVSASWWQNVWDKSLGTLKGLVEIRRLENNDAMLISPEQAYFVRENLRLRLLDARTALMQRNSEVYQGDLNNAETAVRQYFDAKSPATQSWLKELAELKALDVRMTADDGLKNSLNAVRAYRDGTRMTTAENQEAEQATSEPANENTASEPAAASDVKTIEAPSLPSERKPEQPAKKQPVPEKAGRSPSAKGERA

SEQ ID NO: 23258 - protein, 701 aa, Neisseria meningitidis; identical to SEQ ID NO: 6719

SEQ ID NO: 23259 - protein, 581 aa, Neisseria meningitidis; identical to SEQ ID NO: 14479

SEQ ID NO: 23260 - protein, 249 aa, Neisseria meningitidis; identical to SEQ ID NO: 14056

SEQ ID NO: 23261 - protein, 178 aa, Neisseria meningitidis; identical to SEQ ID NO: 7442

SEQ ID NO: 23262 - protein, 207 aa, Neisseria meningitidis; identical to SEQ ID NO: 7731

SEQ ID NO: 23263 - protein, 58 aa, Neisseria meningitidis
MDIVFAADDNYAAYLCVAAKSVEAAHPDTEIRFHVLDAGISEANRAAVAANLRGGGGG

SEQ ID NO: 23264 - protein, 111 aa, Neisseria meningitidis; identical to SEQ ID NO: 14177

SEQ ID NO: 23265 - protein, 138 aa, Neisseria meningitidis; identical to SEQ ID NO: 14452

SEQ ID NO: 23266 - protein, 107 aa, Neisseria meningitidis
VNILASDRNYELNIEIFIDNIIHFQITDESYKVKFSEYLFENKEKNDWDRNPAINYFFEIIDDSYMDWLKEESFDFFEKKYYKAYIFFFSDSVIEVISSTEPVFYSK

SEQ ID NO: 23267 - protein, 58 aa, Neisseria meningitidis
MKSRRFFKALLLIAALVGAFYAGMQTQAYLYEDLCLDLGGGKNPGSYPICVIGKVPAR

SEQ ID NO: 23268 - protein, 41 aa, Neisseria meningitidis; identical to SEQ ID NO: 1263

SEQ ID NO: 23269 - protein, 531 aa, Neisseria meningitidis; identical to SEQ ID NO: 15560

SEQ ID NO: 23270 - protein, 335 aa, Neisseria meningitidis
MSTFFQQTAQAMIAKHINRFPLLKLDQVIDWQPIEQYLNRQKTRYLRDHRGRPAYPLLSMFKAVLLGQWHSLSDPELEHSLITRIDFNLFCRFDELSIPDYSTLCRYRNWLAQDDTLSELLELINRQLTEKGLKIEKASAAVVDATIIQTAGSKQRQTIEVDEEGQVSGQTTPSKDSDARWIKKNGLYKLGYKQHTRTDGEGYIEKLHITPANTHECNHLSPLLEGIAEDTTVYADKGYDSKENRQHLKEHRLLDGIMRKAQRNRPLTEAQTKRNRYLSKTRYVVEQSFGTLHRKFRYARAAYFGLIKVSAQSHLKAMCLNLLKAANRLSVPVAA

SEQ ID NO: 23271 - protein, 553 aa, Neisseria meningitidis; identical to SEQ ID NO: 7086

SEQ ID NO: 23272 - protein, 252 aa, Neisseria meningitidis; identical to SEQ ID NO: 6622

SEQ ID NO: 23273 - protein, 405 aa, Neisseria meningitidis; identical to SEQ ID NO: 8083

SEQ ID NO: 23274 - protein, 529 aa, Neisseria meningitidis
VELKLKRLILILMLGMFSVNSYAERFKYPIGNSDVRLDIDHKKSVVTDFRVDGQRFSGRIIEPSIIEHVPTGARSLEKVPVKFTASVSRASVLAGVGKLARLGAKFSTRAVPYVGTALLAHDVYETFKEDIQAQGYQYDPETDKFVKGYEYSNCLWYEDERRINRTYGCYGVDSSIMRLMSDYSRFPEVKELMESQMYRLARPFWNWHKEELNKLSSLDWNNFVLNSCTFNWNGGDCSVNKGDDYRNGADFSLIRNPKYKEEMDAKKLEEILSLKVDANPDKYIKATGYPGYSEKVEVAPGTKVNMGPVTDRNGNPVQVVATFGRDSQGNTTVDVQVIPRPDLTPGSAEAPNAQPLPEVSPAENPANNPNPNENPGTHPNPEPDPDLNPDANPDTDGQPGTRPDSPAVPGRTNGRDGKDGKDGEDGGLLCKFFPDILACDRLPEPNPAEDLNLPSETVNVEFQKSGIFQDSAQCPAPVTFTVTVLDSSRQFAFSFENACTIAERLRYMLLALAWAVAAFFCIRTVSREV

SEQ ID NO: 23275 - protein, 302 aa, Neisseria meningitidis
MNQTAINRADVRTRFIFDDMPVRGLHVRLENVWQHIVKQKNYPAAIRRALGELLAAGVLLSGNLKNEGTLIVQVQGQGRLKMLVAEATSDRTVRATARWDEAAEIADDESLGDLLGGNGVFVLTLQPKDGEPWQGVVPLEGDGIAQMLMNYMKRSEQLDTHIVLSASDEAAGGLLVQRLPEAVLDEEAWEHVSTLARTLTAEELAELDAQHVLYRLFHETPPRVFEPETFEFSCTCSRGKVSDMLLMLGGEEVGGVVAEQGSIEVDCDFCHSKYVFDETDVNALFGEDVVGVAREQTRHTVQ

SEQ ID NO: 23276 - protein, 841 aa, Neisseria meningitidis
MNPNSKHNTNFTNLLKPSDSDIKQFAAQHIRHLTDLLNRYAYEYYTLDAPSVPDAEYDKLFRELEALELNHPEFKLPDSPTQRVGGEPLAGFAEVRHEVPMLSLTNAFSPQDENGVFDHAEMYAFDQRVRDGLDGGNPEYVIEPKFDGLAISLLYRDGVLVQAATRGDGTTGEDVTQNIKTVANIPLRLHGENTPELIEVRGEVLMQKADFVALNKRQAENGQKPFANPRNAAAGSLRQLDSRITAQRKLHFFPYSVARQQDGFVAEEHIQELAYFQALGFSLPNGNFGCFKNIDEVLAFYEHMQQKRPELPYEIDGMVVKVNSLAQQHELGFISRAPRWAVAHKFPAEEALTIVEAIDVQIGRTGAVTPVARLQPVFVGGVTVTNATLHNQDEVSRKDVRVGDTVVVRRAGDVIPEVVRVIFERRPMRETAVAVSDGIGHRQDDLFAETPSANQTQSVPLHKPYRLPTHCPICRSEIEREEGEAVARCSGGMLCQAQRAQGLIHFASRKAMDIDGLGEKQIEQLVAQDLVRHFADLYRLDIPTLQKMKEAADKTVAESDQMPSEDSSVGASGKHKKPPTKWAENILAGIESGKTPELARFLFALGIRHVGERTAKTLAQAFGTLEHVRRAPEPVLACLPDIGTVVARSIAHFFAQAEQQAMIDELLAAGVAPQTQAVTIPPARHAEPQRWIARLPDFKISENKAQALWELAGKSIEGLQTDKALPTDWQAWRSEPQNAALLENLKTFFAQMPSEDEAAQGSDGINKAVAGKTFVLTGTLPTLKRDQAQALIEAAGGKVSGSVSKKTDYVVAGEAAGSKLEKANALGVSILSEAELLTLLG

SEQ ID NO: 23277 - protein, 693 aa, Neisseria meningitidis
MKSLKTFLIWGIVVLVGVASFTTLALSRGEQVSAVWMVTAAISVYCIAYRFYSLYIANRVMRLDPNRLTPAERHNDGLDYVPTHKGVLFGHHFAAIAGAGPLVGPVLAAQMGYLPGTLWIIFGVVFAGAVQDMMVLFVSMRRDGKSLGDIVKQELGTVPGVIASIGILMIMVIIMAVLALIVVKALVHSPWGTFTIAATMPIALFMGIYTRYIRPGKIGEISIVGFILLMLAVIYGEDVAKSSIGHWFDLDGIQLTWAIMIYGFVASVLPVWLLLTPRDYLSTFLKIGTIAALALGIVIVNPTLQMPAVTHFIDGSGPVFSGALFPFLFITIACGAVSGFHALISSGTTPKMLENETHVRMIGYGGMLMESFVAIMALAAAASLDPGVYFAMNSPAALIGTDANTAAEVITTKLQFPVDAATLLHTAKEVGENTILSRAGGAPTLAVGMAHIMSRLIPGEAMMAFWYHFALLFEALFILTAVDAGTRVARFMIQDLGSIFYKPFGNTDSIPANLIATFFAVALWGYFLYTGVTDPLGGINSLWPLFGIANQMLAGVALIMCAVVLIKMKRDRYVWVVLVPAVGVLFVTCYAGLQKLFHSDPRISFLAHAGKYSDALAKNEILAPAKDIGEMAQIIFNDKINAGLTILFLSVVVIVAAYGLRTALKARKVGWPTAKEIPAVYRDGKQPEAQGEA

SEQ ID NO: 23278 - protein, 469 aa, Neisseria meningitidis; identical to SEQ ID NO: 9639

SEQ ID NO: 23279 - protein, 165 aa, Neisseria meningitidis; identical to SEQ ID NO: 14199

SEQ ID NO: 23280 - protein, 177 aa, Neisseria meningitidis; identical to SEQ ID NO: 6602

SEQ ID NO: 23281 - protein, 184 aa, Neisseria meningitidis; identical to SEQ ID NO: 3342

SEQ ID NO: 23282 - protein, 2704 aa, Neisseria meningitidis
MNRTLYKVVFNKHRNCMIAVAENAKREGKNTADTQAVGILPNDIAGFAGFIHSISVISFSLSLLLGSALILTSSSATAQGIVADKSAPAQQQPTILQTGNGIPQVNIQTPTSAGVSVNQYAQFDVGNRGAILNNSRSNTQTQLGGWIQGNPWLARGEARVVVNQINSSHSSQLNGYIEVGGRRAEVVIANPAGIAVNGGGFINASRATLTTGQPQYQAGDLSGFKIRQGNVVIAGHGLDARDTDYTRILSYHSKIDAPVWGQDVRVVAGQNDVAATGDAHSPILNNAAANTSNNTANNGTHIPLFAIDTGKLGGMYANKITLISTVEQAGIRNQGQWFASAGNVAVNAEGKLVNTGMIAATGENHAVSLHARNVHNSGTVASQDDANIHSQTLDNSGTVLSSGRLTVRNLGRLKNQNNGTIQAARLDMSTGGLDNTGNITQTGSQALDLVSAGKFDNSGKIGVSDVPQTGLNPNPSVIPQIPSTATGSGSSTVSVSKPGSNNPVSPTAPAKNYAVGRIQTTGAFDNAGSINAGGQIDIAAQNGLGNSGSLNAAKLRVSGDSFNNTVKGKLQAHDLAVNTQTAKNSGHLLTQTGKIDNRELHNAGEIAANNLTLIHSGRLSNDKKGNIRAAHLQLDTAGLHNAGNILADSGTVTTKNNLRNTGKVSVARLNTEGQTLDNTRGRIEAETVNIQSQQLTNQSGHITATEQLTINSRNVDNQNGKLLSANQAQLAVSDGLYNQHGEIATNRQLSIHDKNQNTLALNNADGTIQSAGNVSLQAKSLANNGTLTAGNKLDIALTDDFVVERDLTAGKQLNLSIKGRLKNTHTLQAGHTLKLNAGNIDNQVTGKIIGGEQTDITSEQHVDNRGLINSDGLTHIGAGQTLTNTGTGKIYGNHIALDAQILLNREETTEGSTKAGAIAARKRLDIGAKEIHNQEGALLSSEGIFAVGNRLDEQHHAAGMADTFVNGSAGLEVQGDALMSVRNMQNINNHFKTETYLAKAEKQVRDYTVLGQNTYYQAGKDGLFDNSQGQKDQTTATFHLKNGSRIEANQWHVRDYHIETYKERIIENRPAHITVGGDLTASGQNWLNKDSRIVVGGRIITDDLNQKEITNQSTTGKGRTDAVGTQWDSVTKKGWYSGRKRQRRTERNHTPYHDTQLFTHDFDTPVSVIQQNAASPSFQPAASAIKLIDGVSTAAVNGQRIHTGNVVSLNNATVTLPNSSLYTTHPDNKGWLVETDPQFADYRRWLGSDYMLQQLQLDTNHLHKRLGDGYYEQKLVNEQIHQLTGYRRLDGYRSDEEQFKALMDNGLTAAKTFGLTPGIALSAEQVARLTSDIVWMENQTVTLSDGSTQTVLVPKVYALARKGDLNTSGGLISAEQVLLKLQNGNLTNSGTIAGRQAVLIQARNINSNGNIQADQIGLKAEKSINIDGGQVQAGRLLTAQAQNINLNGTTQTSGNERNGNTAIDRMAGINVVGSHTEQVDNRTSDGILSLHASNDINLNAATVSNQVKDGTTQITAGNNLNLGTIRTEHREAYGTLDDENHRHVRQSTEVGSSIRTQNGALLRAGNDLKIRQGELEAEEGKTVLAAGRDVTISEGRQITELDTSVSGKSKGILSSTKTQDRYRFSHDEAVGSNIGGGKMIVAAGQDINVRGSNLISDKGIVLKAGHDIDISTAHNRYTGNEYHESKKSGVMGTGGLGFTIGNLKTTDDTDRTNIVHIGSIIGSLNGDTVTVAGNRYRQTGSTVSSPEGRNTVTAKSIDVESANNQYATDYAHTQEQKGLTVALNVPVVQSAQNFIQAAQNVGKSKNKRVNAMAAANAAWQGYQAAQQMQQFAPSSSAGQGQNNNQSPSISVSITYGEQKSRNEQKRRYTEAAASQIIGKGQTTLAATGSGEQSNINITGSDVIGHAGTTLIADNHIRLQSAKQDGSEQSKNKSSGWNAGVAVKIGNGISFGITAGGNIGKGKEQGGSTTHRHTHVGSTTGKTTIRSGGDTTLKGAQLIGKGIQADTRNLHIESVQDTETSQSKQQNGNVQVTVGYGFSASGSYSQSKVKADHASVTEQSGIYAGEDGYQIKVGNHTDLKGGIITSGKSAEDKGKNLFQTATLTASDIQNHSRYEGKSFGIGGSFDLNGGWDGTVTDKQGRPTDRISLAAGYGSDSDSQSSITKSGINTRNIHITDEAGQLARTGRTAKETEARIYTGIDTETADQHTGRLKNSFDKDAVAKEINLQREVTKEFGRNAAQAVAAVADKLGNTQSYERYQEARTLLEAELQNTDSKAEKAAIRASLGQVNAYLAENQSRYDTWKEGGIGRSILHGAAGGLTTGSLGGILAGSGTSLAAPYLDKAAENLGPAGKAAVNALGGAVIGYAAGGNVGTAAVGANVDWNNRQLHPKEMALADKYAEALKREVEKREGRKISSQEAAMRIRRQILRWVDKGSQDGYTDQSVISLIGMKGEDKALGYTWDYRDYGARNPQTYNDPKLFEEYRRQDKPEYRNLTWLHSGTKDTKIRQGERKNEEFALNVAEGLTSLVNPNPRIKVPILAGIRNLKNIKPTVTGSDPLLAGAGNIRIPANGNVAKGDRIPDTALASKGIKHKNRKDQLEKNKKSGEDFEMEIYQKKVKQGFKPQRQITVKTKSGVKTRLDIISKEGGLDVCTECKASITAPLTKNQKKAFPEIERTGATVVGKGKPGYPKGTKIEPTKVIIERKR

SEQ ID NO: 23283 - protein, 394 aa, Neisseria meningitidis; identical to SEQ ID NO: 15805

SEQ ID NO: 23284 - protein, 714 aa, Neisseria meningitidis
MNNPLVNQAAMVLPVFLLSACLGGGGSFDLDSVDTEAPRPAPKYQDVSSEKPQAQKDQGGYGFAMRFKRRNWHPQANPKEDEKKLSENDWEATGLPSDPKNLPERQKSVIDKVETGSDSNIYSSPYLTQSNHQNGSINGGANLPKNEVTNYKDFKYVYSGWFYKHAKQKIDFQNKIAQQGDDGYIFYHGKEPSRQLPASGTVTYKGVWHFATDTKKGQKFREIIQPSKNQGDRYSGFSGDDGEEYSNKNEVTLQGGQEGYGFTSNLEVDFNNKKLTGKLIRNNRVTNATANDKYTTQYYSLEAQVTGNRFNGKATATDKPKENETKQHPFVSDSSSLSGGFFGPKGKELGFRFLSDDKKVAVVGSAKTQDNTANGNTAAASGGAGAAASGGAADMPSENSKLTTVLDAVELTHGDTAIKNLDNFSNAAQLVVDGIMIPLLPKDSESGNNQANQGTNGGTAFTRKFAHTPKSDEKDAQAGTAANGDQAASNTAGDTNGKTKTYEVEVCCSNLNYLKYGLLTRKTAGNTGEGGNGSPTAAAQTAQGAQSMFLQGERTDENKIPSEQNVVYRGTWYGHIANDTSWSGNASDKEGGNKADFTVNFGEKKINGTLTAENRQAATFTIEGTIQGNGFSGTAKTADSGFDLDQSNTTRTPKAYITNAKVQGGFYGPKAEELGGWFAYPGDSQAQPSASGSGTSAANSATVVFGAKRQQLVQ

SEQ ID NO: 23285 - protein, 289 aa, Neisseria meningitidis; identical to SEQ ID NO: 8166

SEQ ID NO: 23286 - protein, 112 aa, Neisseria meningitidis; identical to SEQ ID NO: 6756

SEQ ID NO: 23287 - protein, 263 aa, Neisseria meningitidis; identical to SEQ ID NO: 5998

SEQ ID NO: 23288 - protein, 234 aa, Neisseria meningitidis
MLRSILAASLLAVSFPTAAEALNYNIVEFSESAGVEVAQDTMSARFQVTAEGRDKNAVNAEFVKKFNNFTRKSKNGSFKTELVSRSAMPRYQYTNGRRIQTGWEERAEFKVEGRDFDELNRFIADIQADAALEYTDFHVSRERRNEVIDQVSKDAILRFKARADKLSGILGTSGYKIVKLNLGHIGSHIAGGGTAQAKMLRAMPMAASVNMEGADSAAPGVEEISISVNGTVQF

SEQ ID NO: 23289 - protein, 178 aa, Neisseria meningitidis; identical to SEQ ID NO: 8890

SEQ ID NO: 23290 - protein, 126 aa, Neisseria meningitidis; identical to SEQ ID NO: 15216

SEQ ID NO: 23291 - protein, 1392 aa, Neisseria meningitidis
MSYSFTEKKRIRKSFAKRENVLEVPFLLATQIDSYAKFLQLENAFDKRTDDGLQAAFNSIFPIVSHNGYARLEFVHYTLGEPLFDIPECQLRGITYAAPLRARIRLVILDKEASKPTVKEVRENEVYMGEIPLMTPSGSFVINGTERVIVSQLHRSPGVFFEHDKGKTHSSGKLLFSARIIPYRGSWLDFEFDPKDLLYFRIDRRRKMPVTILLKALGYNNEQILDIFYDKETFYLSSNGVQTDLVAGRLKGETAKVDILDKEGNVLVAKGKRITAKNIRDITNAGLTRLDVEPESLLGKALAADLIDSETGEVLASANDEITEELLAKFDINGVKEITTLYINELDQGAYISNTLRTDETAGRQAARVAIYRMMRPGEPPTEEAVEQLFNRLFFSEDSYDLSRVGRMKFNTRTYEQKLSEAQQNSWYGRLLNETFAGAAEKGGYVLSVEDIVASIATLVELRNGHGEVDDIDHLGNRRVRSVGELTENQFRSGLARVERAVKERLNQAESENLMPHDLINAKPVSAAIKEFFGSSQLSQFMDQTNPLSEVTHKRRVSALGPGGLTRERAGFEVRDVHPTHYGRVCPIETPEGPNIGLINSLSVYARTNDYGFLETPYRRVIDGKVTEEIDYLSAIEEGRYVIAQANADLDSDGNLIGDLVTCREKGETIMATPDRVQYMDVATGQVVSVAASLIPFLEHDDANRALMGANMQRQAVPCLRPEKPMVGTGIERSVAVDSATAIVARRGGVVEYVDANRVVIRVHDDEATAGEVGVDIYNLVKFTRSNQSTNINQRPAVKAGDVLQRGDLVADGASTDLGELALGQNMTIAFMPWNGYNYEDSILISEKVAADDRYTSIHIEELNVVARDTKLGAEDITRDIPNLSERMQNRLDESGIVYIGAEVEAGDVLVGKVTPKGETQLTPEEKLLRAIFGEKASDVKDTSLRMPTGMSGTVIDVQVFTREGIQRDKRAQSIIDSELKRYRLDLNDQLRIFDNDAFDRIERMIVGQKANGGPMKLAKGSEITTEYLAGLPSRHDWFDIRLTDEDLAKQLELIKLSLQQKREEADELYEIKKKKLTQGDELQPGVQKMVKVFIAIKRRLQAGDKMAGRHGNKGVVSRILPVEDMPYMADGRPVDIVLNPLGVPSRMNIGQILEVHLGWAAKGIGERIDRMLKEQRKASELREFLNKLYNGSGKKEDLDALTDEEIIELASNLRKGASFASPVFDGAKESEIREMLNLAYPSDDPEVEKLGFNDSKTQITLYDGRSGEAFDRKVTVGVMHYLKLHHLVDEKMHARSTGPYSLVTQQPLGGKAQFGGQRFGEMEVWALEAYGAAYTLQEMLTVKSDDVNGRTKMYENIVKGEHKIDAGMPESFNVLVKEIRSLGLDIDLERY

SEQ ID NO: 23292 - protein, 87 aa, Neisseria meningitidis; identical to SEQ ID NO: 932

SEQ ID NO: 23293 - protein, 472 aa, Neisseria meningitidis; identical to SEQ ID NO: 6423

SEQ ID NO: 23294 - protein, 130 aa, Neisseria meningitidis
MPTSTKPYVLRALCEWCSDNSLTPHILVWVNEHTRVPMQYVRDNEIMLNIGATATQNLQIDNDWISFSARFSGQAHDIWIPVGHVLSLFARETSEGMGFELEEYRPDTPPENTPAETAPRPAKKGLKLVK

SEQ ID NO: 23295 - protein, 298 aa, Neisseria meningitidis; identical to SEQ ID NO: 6951

SEQ ID NO: 23296 - protein, 103 aa, Neisseria meningitidis; identical to SEQ ID NO: 2233

SEQ ID NO: 23297 - protein, 377 aa, Neisseria meningitidis
MFKKFKLVLLSFFALVFAFWLGTGIAYEINPRWFLSDTATEIPENPNAFVAKLARLFRNADRAVVIVKESIRTEENLAETVDDGPLQSEKDYLALAIRLSRLKEKAKWFHVTEQEHGEEVWLDYHIGEGGLVAVSLLQRSPEAFVNAEYLYRNDRPFSVNVYGGAAHGENYETTGEYRVVWQPDGSVFDAAGRGKIGEDVYEHCLGCYQMAQVYLAKYRDVANDEQKVWDFREESNRIASDSRNSVFYQNMRELMPRGMKANSLVVGYDADGLPQKVYWSFDNGKKRQSFEYYLKNGNLFIAQSSTVALKADGVTADIQTYHAQQTWYLDGGRIVREEKQGDRLPDFPLNLENLEKEVSRYTEAAARRSGGRRGLSY

SEQ ID NO: 23298 - protein, 319 aa, Neisseria meningitidis; identical to SEQ ID NO: 5570

SEQ ID NO: 23299 - protein, 447 aa, Neisseria meningitidis; identical to SEQ ID NO: 17247

SEQ ID NO: 23300 - protein, 480 aa, Neisseria meningitidis
MNWSDLNLMPAMPEVALLSLLVLLLLADLWVSDDKRRWTHYGALATVAVTAVVQLAVWEQGSTSSFNGMYIADGMSRLAKMVLYALTFALFVYAKPYNQVRGIFKGEFYTLSLFALLGMSVMVSAGHFLTAYIGLELLSLALYALIALRRDSGFAAEAALKYFVLGALASGLLLYGISMVYGATGSLEFAGVLASSFNEEANEWLLKLGLVFIVVAVAFKLGAVPFHMWVPDVYHGAPTSVTALVGTAPKVAAVVFAFRILVTGLGTVHHDWSLMFALLAAASLLVGNLAAIMQTNIKRMLAYSTVSHMGFILLAFMAGAVGFAAGLYYAITYALMAAAGFGVLMVLSDGDNECENISDLAGLNQHRVWLAFLMLLVMFSMAGIPPLMGFYAKFGVIMALLKQGYVWLSVFAVVMSLIGAFYYLRVVKVIYFDVPDHDQPVGSNYAAKFVLTVNAFLLLLWGIMPQTVIDWCAKALENTL

SEQ ID NO: 23301 - protein, 447 aa, Neisseria meningitidis; identical to SEQ ID NO: 7219

SEQ ID NO: 23302 - protein, 360 aa, Neisseria meningitidis
MQTANKKTILVTGGAGFIGSAVVRHIIQNTQDSVVNLDKLTYAGNLESLTDIADNPRYAFEQVDICDRAELDRIFAQHQPDAVMHLAAESHVDRSIDSAGEFIQTNIVGTFNLLEAARAYWQQMPSEQHEAFRFHHISTDEVYGDLGGTDDLFTETTPYAPSSPYSASKASSDHLVRAWLRTYGLPTIVTNCSNNYGPYHFPEKLIPLMILNALDGKPLPVYGDGMQIRDWLFVEDHARALYQVVTEGVVGETYNIGGHNEKANIEVVKTICALLEELAPEKPAGVARYEDLITYVKDRPGHDVRYAIDAAKIGRELGWQPQETFESGIRKTVEWYLDNKTWWQNVLNGSYRLERLGTGK

SEQ ID NO: 23303 - protein, 94 aa, Neisseria meningitidis; identical to SEQ ID NO: 973

SEQ ID NO: 23304 - protein, 238 aa, Neisseria meningitidis
VFNNFLASLPFMTETRADMIVSAFLPMVKAGFAVSLPLAIASFVIGMMIAVAVALVRIMPAGGIVRKILLKLVEFYISVIRGTPLLVQLVIVFYGLPSVGIYIDPIPAAIIGFSLNVGAYASETIRAAILSVPKGQWEAGFSIGMTYMQTFRRIVAPQAFRVAVPPLSNEFIGLFKNTSLAAVVTVTELFRVAQETANRTYDFLPVYIEAALVYWCFCKVLFLIQARLEKRFDRYVAK

SEQ ID NO: 23305 - protein, 664 aa, Neisseria meningitidis
MKRHFMPKILQQTTLHRFFRANTHHPISPSVLQQAGDLIRWLCFSDGISDFRPCRLKPQNPIGGTVMNTVSNYLSALREAMRAQGLDALVIPSADPHLSEYLPEHWQARRELSGFTGSVGTFVLTTDEAGVWVDSRYWEQAAKQLSGSGIVLQKSGQVPPYNEWLAANLPENAAVGIPSDMVSLTGKRTLAQSLTAKNIRIEHPDNLLNQVWTNRPALPAETVFIHDPDYVSETAAEKLARVRAVMAEKGADYHLVSSLDDIAWLTNLRGSDVPFNPVFVSFLLIGKDNAVLFTDRCRLNAEAAAALQTAGITVEPYAQVADKLAQIGGTLLIEPNKTAVSTLVRLPESVRLIEGINPSTLFKSCKSEADIARIREAMEHDGAALCGFFAEFEDIIGNGGSLTEIDVDTMLYRHRSARPGFISLSFDTIAGFNANGALPHYSATPESHSTISGNGLLLIDSGAQYKGGTTDITRVVPVGTPTAEQKRDNTLVLKAHIALAEAVFPENIPSPLIDAICRKPLWQAQCDYGHGTGHGVGYFLNVHEGPQRIAFAAPATPETAMKKGMVTSIEPGLYRPGKWGIRIENLAANQAVATPQETEFGSFLCFETLTLCPIDTRLMDTALMTDGEIDWVNRYHAEVRRRLEPLTEGAAKAWLIKRTEPLAR

SEQ ID NO: 23306 - protein, 264 aa, Neisseria meningitidis; identical to SEQ ID NO: 7645

SEQ ID NO: 23307 - protein, 96 aa, Neisseria meningitidis; identical to SEQ ID NO: 7305

SEQ ID NO: 23308 - protein, 371 aa, Neisseria meningitidis
MIYQRNLIKELSFTAVGIFVVLLAVLVSTQAINLLGRAADGRVAIDAVLALVGFWVIGMTPLLLVLTAFISTLTVLTRYWRDSEMSVWLSCGLALKQWIRPVMQFAVPFAVLVAVMQLWVIPWAELRSREYAEILKQKQELSLVEAGGFNSLGKRNGRVYFVETFDTESGIMKNLFLREQDKNGGDNIIFAKEGNFSLNDNKRTLELRHGYRYSGTPGRADYNQVSFQKLNLIISTTPKLIDPVSHRRTIPTAQLIGSSNPQHQAELMWRISLTVSVLLLCLLAVPLSYFNPRSGHTYNILIAIGLFLIYQNGLTLLFEAVEDGKIHFWLGLLPMHIIMFAVALILLRVRSMPSQPFWQAVGKSLTLKGGK

SEQ ID NO: 23309 - protein, 61 aa, Neisseria meningitidis; identical to SEQ ID NO: 6755

SEQ ID NO: 23310 - protein, 205 aa, Neisseria meningitidis; identical to SEQ ID NO: 2641

SEQ ID NO: 23311 - protein, 346 aa, Neisseria meningitidis; identical to SEQ ID NO: 9459

SEQ ID NO: 23312 - protein, 125 aa, Neisseria meningitidis; identical to SEQ ID NO: 6097

SEQ ID NO: 23313 - protein, 266 aa, Neisseria meningitidis
MNAFNLIIIGDEILHGSSQDKHFAFFKSLLESKGLKLNQVQYLPDEPDLLVRQLRRSFSDGMPTFVTGGIGATPDDHTRQAAAAALDLPVVRHSEAAKFIEGITQKRGEPLDSPEHAQRLKMADFPEGAELVPNPFNNIAGFSIREHYFFPGFPVMAHPMAEWVLETYYADRFNQTERGSRSVYVFEQPESRITPLMEHIEQTYPGVRSYSLPSVGWTHSDGTQVKPHIEFGIKAEGEAVNLLDAAWAEVLHSLEGLGAELKNRVN

SEQ ID NO: 23314 - protein, 436 aa, Neisseria meningitidis; identical to SEQ ID NO: 7990

SEQ ID NO: 23315 - protein, 368 aa, Neisseria meningitidis; identical to SEQ ID NO: 5075

SEQ ID NO: 23316 - protein, 58 aa, Neisseria meningitidis; identical to SEQ ID NO: 2174

SEQ ID NO: 23317 - protein, 89 aa, Neisseria meningitidis
LNTKEILELKARAHHLHPVVMVGQQGLTDAVIKETDAALTAHELIKVRVFGDDRAERIEICTALCEAVDAQPVQHIGKLLVLWRKNIEA

SEQ ID NO: 23318 - protein, 221 aa, Neisseria meningitidis; identical to SEQ ID NO: 11037

SEQ ID NO: 23319 - protein, 252 aa, Neisseria meningitidis
MKKVSVLIVARNEANHIRECIESCRFDKEVIVIDDHSTDNTAEIAEGLGAKVFRRHLNGDFGAQKTFAIEQAGGEWVFLIDADERCTPELSDEISKIVQTGDYAAYFVERRNLFPNHPATHGAMRPDSVCRLMPKKDSSVQGKVHETVQTPYPKRRLKHFMYHYTYDNWEQYFNKFNKYTSISAEKYREQGKPVRFVRDIILRPIWGFFKIYILNKGFLDGKMGWIMSVNHSYYTMIKYVKLYYLYKSGGKF

SEQ ID NO: 23320 - protein, 51 aa, Neisseria meningitidis; identical to SEQ ID NO: 7347

SEQ ID NO: 23321 - protein, 446 aa, Neisseria meningitidis; identical to SEQ ID NO: 11226

SEQ ID NO: 23322 - protein, 121 aa, Neisseria meningitidis; identical to SEQ ID NO: 1070

SEQ ID NO: 23323 - protein, 414 aa, Neisseria meningitidis; identical to SEQ ID NO: 8661

SEQ ID NO: 23324 - protein, 874 aa, Neisseria meningitidis
MKTSELRQKFLKFFETKGHTVVRSSSLVPHDDPTLLFTNAGMNQFKDVFLGFDKRPYSRATTAQKCVRAGGKHNDLENVGYTARHHTFFEMMGNFSFGDYFKRDAIHFAWEFLTSPEWLNIPKDKLLATVYAEDDEAYNIWLNEIGMPSERIVRIGDNKGAKYASDNFWQMGDTGPCGPCSEIFYDHGEEIWGGIPGSPEEDGDRWIEIWNCVFMQFNRDEQGNMNPLPKPSVDTGMGLERMAAVMQHVHSNYEIDLFQDLLKAVARETGAAFSMEEPSLKVIADHIRSCSFLIADGVLPSNEGRGYVLRRIIRRAVRHGYKLGQSKPFFHKLVADLVKEMGGAYPELKEKQAQIEEALKNEESRFAQTLETGMALLENALAKGGKTLDGEIIFKLYDTYGFPYDLTADMARELGIELDEAGFEREMEAQRARARAAQSFKANAQLPYDGQDTEFKGYSERQTESKVLALYKDGEQVDELNEGDSGAVVIDFTPFYAESGGQVGDVGYIFSGENRFEVRDTQKIKAAVFGQFGVQTSGRLKVGDSVTAKVDDEIRNANMRNHSATHLMHKALRDVLGRHVEQKGSLVTAESTRFDISHPQAVTAEEIAEVERRVNEAVLANVAVNAAIMSMEDAQKTGAMMLFGEKYGDEVRVLQMGGFSTELCGGTHVSRTGDIGLFKIISEGGIAAGVRRIEAITGLNALKWAQEQERLVKDIIAETKAQTEKDVLAKIQAGAAHAKALEKELARAKAELAVHAGAKLLDDAKDLGAAKLVAAQIEADAAALREIVTDLTGKSDNAVILLAAVNDGKVSLCAGVSKALTGKVKAGDLVKFAAEQVGGKGGGRPDLAQAGGTDAGKLPAVLDSVKDWVGAKLV

SEQ ID NO: 23325 - protein, 591 aa, Neisseria meningitidis; identical to SEQ ID NO: 18403

SEQ ID NO: 23326 - protein, 71 aa, Neisseria meningitidis; identical to SEQ ID NO: 1003

SEQ ID NO: 23327 - protein, 145 aa, Neisseria meningitidis; identical to SEQ ID NO: 1767

SEQ ID NO: 23328 - protein, 463 aa, Neisseria meningitidis; identical to SEQ ID NO: 7825

SEQ ID NO: 23329 - protein, 378 aa, Neisseria meningitidis; identical to SEQ ID NO: 14916

SEQ ID NO: 23330 - protein, 296 aa, Neisseria meningitidis; identical to SEQ ID NO: 337

SEQ ID NO: 23331 - protein, 371 aa, Neisseria meningitidis; identical to SEQ ID NO: 6570

SEQ ID NO: 23332 - protein, 497 aa, Neisseria meningitidis; identical to SEQ ID NO: 1619

SEQ ID NO: 23333 - protein, 225 aa, Neisseria meningitidis; identical to SEQ ID NO: 6348

SEQ ID NO: 23334 - protein, 356 aa, Neisseria meningitidis
VSAPETENCICLTVPLELAGGRLDAVLAKLLPDYSRSRLTSWIKEGAVIVNDKPSQPKDKMIGGEQICVTVRPSEENLAFVPEPMALDIVYEDDTVIVVNKPAGLVVHPAAGNWTGTLLNGLLAHCPELSQIPRAGIVHRLDKETSGLMVVAKTLSAQNSLVRQLQERTVKRIYRAVANGIVPFDGKIETQIGRDPHNRLKMAVVKFGGKPAVTHVKVLERYLTHSYIECSLETGRTHQIRVHMREANHPLAGDPVYGNPRHPCGDTVKEAVKSLGARQALHAYRLSFTHPESGETVSFEAPIPDDIYHLLSVLRLEAGLDSSLSNEEEWQDKFGADDDDDWNEDDYDVEVVYVRE

SEQ ID NO: 23335 - protein, 153 aa, Neisseria meningitidis; identical to SEQ ID NO: 22492

SEQ ID NO: 23336 - protein, 494 aa, Neisseria meningitidis
MSKPVFKKIALYTLGAISGVAVSLAVQGFAAEKDRRDNEVLPVQSIRTMAEVYGQIKANYYQDKPDADLFEGAMKGMVAGLDPHSEYMDKKGYAEIKESTSGEFGGLGMEIGQEDGFVKVVSPIEDTPAERAGVKSGDFIVKIDNVSTRGMTVSEAVKKMRGKPGTKITLTLSRKNADKPIVVNLTRAIIKVKSVRHHLIEPDYGYIRVSQFQERTVESVNTAAKELLKENKGKPLKGLVLDLRDDPGGLLNGAVGVSAAFLPPDALVVSTKGREGTEGFALKARPEDYIFKAGTDPLAGIPAELKTIPMTVLVNSGSASASEIVAGALQDHKRAVIVGTQSFGKGSVQTLIPLSNGSAVKLTTALYYTPNDRSIQAQGIVPDVEVKDKERIFESREADLVGHIGNPLGGEDVNSETLAVPLEKDADKPAVKEKGKKKKDEDLSSRRIPNPAKDDQLRKALDLVKSPEQWQKSLGLAAKKPVSNKDKKDKKDKK

SEQ ID NO: 23337 - protein, 431 aa, Neisseria meningitidis; identical to SEQ ID NO: 14083

SEQ ID NO: 23338 - protein, 706 aa, Neisseria meningitidis
MFNKHVKTFQYGNHTVTLETGEIARQAAAAVKVSMGDTVVLVAVTTNKEVKEGQDFFPLTVDYLERTYAAGKIPGGFFKREGKQSEKEILTSRLIDRPIRPLFPEGFYHDIQIVAMVVSVDPEIDSDIPAMLGASAALVLSGVPFAGPIGAARVGYVNGVYVLNPTKAELAKSQLDLVVAGTSKAVLMVESEAKILPEDVMLGAVVYGHDQMQAAINAINEFADEVNPEVWDWKAPETNEELVAKVRGIAGETIKEAFKIRQKQARSAKLDEAWNAVKEALITEETDTLVANEIKGIFKHLEADVVRSQILDGQPRIDGRDTRTVRPLNIQTGVLPRTHGSALFTRGETQALAVATLGTSRDEQIIDALSGEYTDRFMLHYNFPPYSTGEVGRVGAPKRREIGHGRLAKRALLAVLPKPEDFSYTMRVVSEITESNGSSSMASVCGGCLSLLSAGVPLKAHVAGIAMGLILEGNKFAVLTDILGDEDHLGDMDFKVAGTTEGVTALQMDIKIQGITKEIMQIALAQAKEARLHILDQMKAAVAGPQELSAHAPRLFTMKINQDKIREVIGKGGETIRSITAETGTEINIAEDGTITIAATTQEAGDAAKKRIEQITAEVEVGKVYEGTVVKILDNNVGAIVSVMPGKDGLVHISQIAHERVRNVGDYLQVGQVVNVKALEVDDRGRVRLSIKALLDAPAREENAAE

SEQ ID NO: 23339 - protein, 758 aa, Neisseria meningitidis
MTTLHFSGFPRVGAFRELKFAQEKYWRKEISEQELLAVAKDLREKNWKHQAAANADYVAAGDFTFYDHILDLQVATGAIPARFGFDSQNLSLEQFFQLARGNKDQFAIEMTKWFDTNYHYLVPEFHANTEFKANAKHYVQQLQEAQALGLKAKPTVVGPLTFLWVGKEKGAVEFDRLSLLPKLLPVYVEILTALVEAGAEWIQIDEPALTVDLPKEWVEAYKDVYATLSKVSAKILLSTYFGSVAEHAALLKSLPVDGLHIDLVRAPEQLDAFADYDKVLSAGIIDGRNIWRANLNKVLETVEPLQAKLGDRLWISSSCSLLHTPFDLSVEEKLKANKPDLYSWLAFTLQKTQELRVLKAALNEGRDSVAEELAASQAAADSRANSSEIHRADVAKRLADLPANADQRKSPFADRIKAQQAWLNLPLLSTTNIGSFPQTTEIRQARAAFKKGELSAADYEAAMKKEIALVVEEQEKLDLDVLVHGEAERNDMVEYFGELLSGFAFTQYGWVQSYGSRCVKPPIIFGDVSRPEAMTVAWSTYAQSLTKRPMKGMLTGPVTILQWSFVRNDIPRSTVCKQIALALNDEVLDLEKAGIKVIQIDEPAIREGLPLKRADWDAYLNWAGESFRLSSAGCEDSTQIHTHMCYSEFNDILPAIAAMDADVITIETSRSDMELLTAFGEFKYPNDIGPGVYDIHSPRVPTEAEVEHLLRKAIEVVPVERLWVNPDCGLKTRGWKETLEQLQVMMNVTHKLRAELAK

SEQ ID NO: 23340 - protein, 389 aa, Neisseria meningitidis
MTAHKILPVLLSIILGVSHATAASPAPNKPAVHAAPTFQTPETLTAAHIVIDLQSRQTLSAKNINTPVEPAALTQLMTAYLVFKNMKSGNIQSEENLKIPESAWASEGSRMFVRPGDTVSTDKLLKGMIALSANDAALTLAGRLGNGSIENFVQQMNKEARRLGMKNTVFKNPTGLSREGQVSTAKDLAQLSEALMRDFPEYYPLFSIKSFKFKNIEQNNRNILLYRDNNVNGLKAGHTESGGYNLAVSYSGNGRHILVITLGSESAETRASDNSKLLNWALQAFDTPKIYPKGKTVAQIQISGGSKKTVRAGFLKEAYITLPHKEAKMAEQILETIQPIPAPVKKGQILGKIKIRQNGYTITEKEIVALENVEKRSRWQRLWMRLTGQ

SEQ ID NO: 23341 - protein, 253 aa, Neisseria meningitidis
MDANKEPNWEKRLENLRQTRRMKAVPTYAPLSRPSETGTDAPVPKLDDESRARVLKAYLKKWQEEHNAAVADCGEEVETDPMIVLQENWLNAQASLQMSVSEKHIESRRRIRFDTKKDSVEFETGQIESGENADEAESGTNEPAVSENGENDAEETLMPVQLNILNPKAVNRREVFCLSEQELTERLIKRLRPHLTDTVNGIIRTAVQKQMAVFTYQLQQMLHEQAGAVVEDVLEHDVRKILNDIKYELKYKR

SEQ ID NO: 23342 - protein, 334 aa, Neisseria meningitidis
MSIKVAINGFGRIGRLALRQIEKAHDIEVVAVNDLTPAEMLLHLFKYDSTQGRFQGTAELKDDAIVVNGKEIKVFANPNPEELPWGELGVDVVLECTGFFTNKTKAEAHIRAGARKVVISAPGGNDVKTVVYGVNQDILDGSETVISAASCTTNCLAPMAAVLQKEFGVVEGLMTTIHAYTGDQNTLDAPHRKGDLRRARAAALNIVPNSTGAAKAIGLVIPELNGKLDGSAQRVPVATGSLTELVSILERPVTKEEINAAMKAAASESYGYNEDQIVSSDVVGIEYGSLFDATQTRVMTVGGKQLVKTVAWYDNEMSYTCQLVRTLEYFAGKI

SEQ ID NO: 23343 - protein, 122 aa, Neisseria meningitidis
MSTFFQQTAQAMIAKHIDRFPLLKLDQVIDWQPIEQYLNRQRTRYLRDHRGRPAYPLLSMFKAVLLGQWHSLSDPELEHSLITRIDFNLFCRFDELSIPDYSTLCRYRNRRRKTTPCPNCSN

SEQ ID NO: 23344 - protein, 459 aa, Neisseria meningitidis
MAKTLKTLYQCTECGGTSPKWQGKCPHCGEWNTLQESLAAPEPKNARFQSWAADTSTVQSLSAVTATEVPRNPTGMGELDRVLGGGLVDGAVILLGGDPGIGKSTLLLQTIAKMAQSRKVLYVSGEESAQQVALRAQRLELPTEGVNLLAEIRMEAIQTALKQHQPEVVVIDSIQTMYSDQITSAPGSVSQVRECAAQLTRMAKQMGIAMILVGHVTKDGAIAGPRVLEHMVDTVLYFEGDQHSNYRMIRAIKNRFGAANELGVFAMTENGLKGVSNPSAIFLASYRDDTPGSCVLVTQEGSRPLLVEIQALVDDAHGFTPKRLTVGLEQNRLAMLLAVLNRHGGIACFDQDVFLNAVGGVKIGEPAADLAVILAMLSSFRNRPLPEKMVAFGEIGLSGEVRPVARGQERLKEAEKLGFKRAIVPKANMPRNAKEFPNLKIYGVSSLQEAIDICRDSRE

SEQ ID NO: 23345 - protein, 657 aa, Neisseria meningitidis
MHPIETPDKTFHDGDGVSELGTILPAWWLNQVQSELLAVLTAAGIQPDKSQPNQLLAALNRLAVVITGDQTVNGQKTFTAQTQFQSGIHLSANQTNWNGGHKAYIGADADNAHIVFGDNTLRLHGANNRISYNNHDIFHKANKPRFAEDIEGKPNTLSGYGIGNFKVETFRGDLNTLKTDGIYSLPTAGGSSNLPVENTACHIQVIAGTRHGWCRQLGYPAYTSDVYERHQTSSANDNWSAWKKLNSDGIPVGAIVSFPKAVRNPAGYLKANGTTFAQNTFPDLYRALGNSNRLPDLSRTDIGITAWFPSDQIPTGWLAFDDIRTRVTKTAYPELYRLLTGKYGSIQNVPQAEDRFIRNAGNSLAVGTKQEDEIKRHVHKVFSHWTNHTDAAALGYEDHNERQRSALVSTWTDGDLNDNGFLTPRLDSKMATGGDENRPKALVLKLCIKAADTLGEAVFWIKSHGETINAGALDAGTLAQNLQDKADRAHTHTAAQIQGLDEKISTAVAAQFTRQTIGGVDIVRFPDGTMIQTGSYRFTRSGGPIENEVVFPVSFADGNVKCFVSERHSGRVTGDRRQHNWLFIRAKNHAAAIITNWYEGSCDWMAIGKAASGNAASSPIGPEIPETNEEPQRESGRTSTGLRNRRRRDGLLEALQD

SEQ ID NO: 23346 - protein, 295 aa, Neisseria meningitidis; identical to SEQ ID NO: 5362

SEQ ID NO: 23347 - protein, 143 aa, Neisseria meningitidis
MGSNAWLFWALASAGFASLTAIFAKMGLQGIDSDFATFIRTLVILAALLLFLTYTGKWQGVNGFTGHNWTFLILSGLATGASWLAYFKALQLGNASQVAPVDKFSLVLVALMAVVFLDERPNTQEWIGLGLVTAGVLVLALKR

SEQ ID NO: 23348 - protein, 63 aa, Neisseria meningitidis
MNTNQDTIPFGGNLVICCSTGNGGDGQFSCLITDQIPDLNLVRSGQAFPMFIYEYETREKRKA

SEQ ID NO: 23349 - protein, 361 aa, Neisseria meningitidis; identical to SEQ ID NO: 2308

SEQ ID NO: 23350 - protein, 218 aa, Neisseria meningitidis
VNKRLFCSRNGLRYYLLGGFCLSVFPLLLVFTSSVWAVYRTGGQVLPPHVRADAALVLGAAAWDKRPSPVFRERINHAIALYQSRRVGKIIFTGGRSKKGYMTEAEVGRRYALKQGVPARNILFENTSRNTYENLNNIRPVLRANGIASVVIVSDPYHLARAAEMAEDLGVRVYMSATPTTRFDAGNKKKIFMLQEGYALSLYRLEKWGSRFLGWLSD

SEQ ID NO: 23351 - protein, 505 aa, Neisseria meningitidis
MVISNPRELEKLKDRIPNLINIIRVAIVFPLMIMHILGLETGSRANLHASWTAWAFYVWLAIACWLIFFSIIHPHWQWQALKIPSFSAVSDITMIGILTYLFGGINSGFGILILPFVGSSCLLSYGRYPLLYASYAAILLILNALADSNINMYPLILDAKTVTNTFVLVTGSYFVAMIASLSVRYIDRAGKLAHENHAAYRRIRGLNQIVLNRVQEAVVIINVEYQTVLFNKKAKDLLPTLEIGQHTALFDPITVLWDKAPSRTFERNIDTPALTARIRAVPMNKEQNKLLILYIRPQSEIQAEALSVKLAALGQLTANIAHEIRNPMSAIRHANDLLRENMEAGAADPFNAKLCKIIDGNVCRIDKMLEDISSLNKRNKTERETIGLIPFWEEFKQEFLLGHPDAAGCIRLDMQGNHLTAYFDPAHLRQIMWNLANNAWRHSRKQPGSISVTIRPAQKNTVCILFADRPKCRNTCSNPFTPRRQTAPASGCMSPANWRTPISAI

SEQ ID NO: 23352 - protein, 259 aa, Neisseria meningitidis; identical to SEQ ID NO: 331

SEQ ID NO: 23353 - protein, 60 aa, Neisseria meningitidis; identical to SEQ ID NO: 3547

SEQ ID NO: 23354 - protein, 257 aa, Neisseria meningitidis; identical to SEQ ID NO: 1404

SEQ ID NO: 23355 - protein, 650 aa, Neisseria meningitidis
MRFAVALLSLLGIASVIGTVLQQNQPQTDYLVKFGPFWAQIFGFLGLYDVYASAWFVVIMMFLVVSTSLCLIRNVPPFWREMKSFREKVKEKSLAAMRHSSLLDVKIAPEVAKRYLEVQGFQGKTVSREGGSVLIAAKKGTMNKWGYIFAHVALIVICLGGLIDSNLLLKLGMLTGRIVPDNQAVYAKDFKPESILSASNLSFRGNVNISEGQSADVVFLNADNGILVQDLPFEVKLKKFHIDFYNTGMPRDFASDIEVTDKATGEKLERTIRVNHPLTLHGITIYQASFADGGSDLTFKAWNLGDASREPVVLKATSIHQFPLEIGKHKYRLEFDQFTSMNVEDMSEGAEREKSLKSTLNDVRAVTQEGKKYTNIGPSIVYRIRDAAGQAVEYKNYMLPVLQEQDYFWITGTRSGLQQQYRWLRIPLDKQLKADTFMALREFLKDGEGRKRLVADATKGAPAEIREQFMLAAENTLNIFAQKGYLGLDEFITSNIPKEQQDKMQGYFYEMLYGVMNAALDETIRRYGLPEWQQDEARNRFLLHSMDAYTGLTEYPAPMLLQLDGFSEVRSSGLQMTRSPGALLVYLGSVLLVLGTVLMFYVREKRAWVLFSDGKIRFAMSSARSERDLQKEFPKHVESLQRLGKDLNHD

SEQ ID NO: 23356 - protein, 94 aa, Neisseria meningitidis; identical to SEQ ID NO: 6698

SEQ ID NO: 23357 - protein, 622 aa, Neisseria meningitidis
MQAVRYRPEIDGLRAVAVLSVIIFHLNNRWLPGGFLGVDIFFVISGFLITGIILSEIQNGSFSFRDFYTRRIKRIYPAFIAAVSLASVIASQIFLYEDFNQMRKTVELSAVFLSNIYLGFQQGYFDLSADENPVLHIWSLAVEEQYYLLYPLLLIFCCKKTKSLRVLRNISIILFLILTATSFLPSGFYTDILNQPNTYYLSTLRFPELLAGSLLAVYGQTQNGRRQTANGKRQLLSSLCFGALLACLFVIDKHNPFIPGMTLLLPCLLTALLIRSMQYGTLPTRILSASPIVFVGKISYSLYLYHWIFIAFAHYITGDKQLGLPAVSAVAALTAGFSLLSYYLIEQPLRKRKMTFKKAFFCLYLAPSLILVGYNLYARGILKQEHLRPLPGAPLAAENHFPETVLTLGDSHAGHLRGFLDYVGSREGWKAKILSLDSECLVWVDEKLADNPLCRKYRDEVEKAEAVFIAQFYDLRMGGQPVPRFEAQSFLIPGFPARFRETVKRIAAVKPVYVFANNTSISRSPLREEKLKRFAANQYLRPIQAMGDIGKSNQAVFDLVKDIPNVHWVDAQKYLPKNTVEIHGCYLYGDQDHLTYFGSYYMGREFHKHERLLKSSRDGALQ

SEQ ID NO: 23358 - protein, 375 aa, Neisseria meningitidis
MSNWKPDIPYNDLPPLPPKQDIESKTILKRCIAARASLARLKQAAELIPNQAMLINTLPVMEARASSEIENIVTTTDKLFQSLQMDTERQDPATKEALQYRTALFAGYESLTSRPLCTQTAIMVCNAIKHPYEMAIRKTGGTALKGGNSGNVVYTPPEGEETIRGKLANWERFIHESGDLDPLIIMAAAHYQFEAIHPFTDGNGRTGRILNSLLLIDKGLLDLPILYLSRYIIENRADYYRLLLGVTERQDWESWIIYILDGVADTADWTVAKIDAIRRLFEQTRQHIRTHAQGIYTHELVNLLFEQPYTRIANLEAAGIAKRQTASKYLKELSDIGVLQEIAIGRDKLFIHPRLMELLRGEGNSFTSFQSLVKA

SEQ ID NO: 23359 - protein, 107 aa, Neisseria meningitidis; identical to SEQ ID NO: 2314

SEQ ID NO: 23360 - protein, 464 aa, Neisseria meningitidis
MTVKTRFAPSPTGYLHIGGVRTALFSWAFARHHKGEFLLRIEDTDLARSTAESVNIILDGMKWVGLDYDNAGNVVYQTRRFDRYKEVIAELLEKGDAYYCYCSKEELEAMREKAEKEGTATYDRRWRPEAGKTLPEIPAGVQPVVRFKTPLDGVTKWTDLVKGEISIPNEALDDLIIARADGTPTYNFCVVVDDYDMGVTHVIRGDDHVNNTPKQINILKAIDANLPEYGHLPMILNEQGKKISKRSGDTVAITDFGAMGILPEAMLNYLARLGWAHGDDEFFTMEQFIEWFDLKDVSPSPSRMDLKKLYWINGEHIKITPNGKLAELVKPRLALRDIHETEKPALEDVLALVKDRAQDLNALADECLYFYKKQVPAEADVAKHWDDEAAARMLRFAERLEGLEDWNTEAIHDLFKPFCDEEGIKMGKLGMPLRLAVCGTAKTPSVDAVLALIGKEEVLKRIRA

SEQ ID NO: 23361 - protein, 248 aa, Neisseria meningitidis; identical to SEQ ID NO: 14834

SEQ ID NO: 23362 - protein, 929 aa, Neisseria meningitidis
MTDYSKTVNLLESPFPMRGNLAKREPAWLKSWYEQKRYQKLREIAKGRPKFILHDGPPYANGDIHIGHAVNKILKDIIIRSKTQAGFDAPYVPGWDCHGLPIEVMVEKLHGKDMPKARFRELCREYAAEQVARQKKDFIRLGVLGDWDRPYLTMDFKTEADTVRMLGEIYKSGYLYRGAKPVQFCLDCGSSLAEAEVEYKDKVSPAIDVGYPFKDTAALAAAFGLAGIEGKAFAVIWTTTPWTLPASQAVSAGADVVYQLIDTPKGKLVLAKDLAEDTLKRYGFSDGIAILAETTGDKLENLHMNHPFLERDIPMLNGEHVTTDAGTGLVHTAPAHGLEDYAVCNKYGIELYNPVNAEGRYIGETPRVAGMRVWEANPVILQWLEETGNLLASSKIEHSYAHCWRHKTPLIYRATGQWFVGMDKAGADGKTLRDKAIKAVDDTEFFPSWGRARLEAMIEGRPDWVVSRQRYWGTPMTFFVHKETGELHPNSAELLEKVALKIEEKGIEAWFSLDKSELLSAEDCENYDKLSDTMDVWFDSGSTHYSVVKQREELEWPADLYLEGSDQHRGWFQSSMLTGCASSMGRAPYKQLLTHGFVVDGEGKKMSKSIGNVVAPQEVYNEFGADILRLWAASTDYSGELAISKEILKRVTESYRRIRNTLSFLFANLSDFNPIEDAVQQADMVEIDRYAVVLARQLQERLAGDYYPRYAFHFAVKDIVSFCSEDLGAFYLDILKDRLYTTKADSHARRSAQTALYHITRSLVLLIAPILCFTGEEAWDIIGGGEEDSVLFHTWHEFPTINEKTEAELVKKWTAIREAREAVTAAIEPLRADKTVGSSLQAEAEITAPEEMAGYLNALGEELRFALLVSKAEVKVGSELAVAAKASDGEKCERCWHYTRDVGAVAGYETVCKRCAENVGGEGETRHYA

SEQ ID NO: 23363 - protein, 149 aa, Neisseria meningitidis; identical to SEQ ID NO: 6422

SEQ ID NO: 23364 - protein, 312 aa, Neisseria meningitidis
VSIPTATPLPGEVTLSDDSVNIVNINTAGTGSTSSGISIQQRKYNVTSYGFTREEKAFIFKTPGGAQYTLSSYADPIVPSYSSPDFKIPDRHAGQRLADGSRIFICCSDSGATNQAEITKQDYMKFGAWIGPNGEIDLFAGGFPVGKTPASSSYYSSTLETAGKGKITYQVWGIRVKDGQFVTSSYTPPKNSSSYLYKPTNTPVLSFITANFNSNKLAGEIIGNSDYGPDVKIENATIDGLSFSGNATSGGKTGKLDGKFFGKFDSTRSSDTGIGGKITFKDDRSLDTVFGGVIYEKKLDDKTSQDTTHLTK

SEQ ID NO: 23365 - protein, 471 aa, Neisseria meningitidis
MNLHAKDKTQHPENVELLSAQKPITDFKGLLTTIISAVVCFGIYHILPYSPDANKGIALLIFVAALWFTEAVHITVTALMVPILAVVLGFPDMDIKKAMADFSNPIIYIFFGGFALATALHMQRLDRKIAVSLLRLSRGNMKVAVLMLFLVTAFLSMWISNTATAAMMLPLAMGMLSHLDQEKERKTYVFVLLGIAYCASIGGLGTLVGSPPNLIAAKALNLDFVGWMKLGLPMMLLILPLMLLSLYVILKPNLNERVEIKAESIPWTLHRVIALLIFLATAAAWIFSSKIKTAFGISNPDTVIALSAAVAVVVFGVAQWKEVARNTDWGVLMLFGGGISLSTLLKTSGASEALGQQVAATFSGAPAFLMILIVAAFIIFLTEFTSNTASAALLVPIFASIAAQMGLPEQVLVFVIGIGASCAFMLPVATPPNAIVFGTGLIKQREMMNVGILLNILCVVLVALWAYAVLM

SEQ ID NO: 23366 - protein, 171 aa, Neisseria meningitidis
MKIKQIVKPGLAVLAAGVLSACATKSNVKADGTTDNPVFPKPYSVTLDNNRGTFPTYDELDLMRPGLTKDDIYKILGRPHYDEGMYGVREWDYLFHFHTPGVGTDPENTSGVEDVTTCQYKVIFDKDKFARSFYWNPVFPKDAACPPPAPKAEPQVIIREIVPAKPKRIRQ

SEQ ID NO: 23367 - protein, 307 aa, Neisseria meningitidis
MKKRNNPLPLLNGVKPSYLVLPHEKQFYGLPLLHFLCIRFPFVGADDWRRRLNSGFVVGSDGAALDEHSLFEPGKVMFYYRETSRESEPRIPFEEKILHIDEHLIVVDKPHFLPVIPSGRFLRETLLTRLRLRPELQHLNVEDITPLHRLDKDTAGVMLLSHNPATRGAYQTMFQNKTVWKTYEALAPTRTDLPYPLDVVSRLVRGEKFFTTQEAEGEPNAHTTVELIENRGEFSLYRLTPHTGKKHQLRVHMMGLGMPLLNDALYPVPSEAGSEDYRKPLKLLAKKIAFADPLSGRERVFCSRFCL

SEQ ID NO: 23368 - protein, 111 aa, Neisseria meningitidis; identical to SEQ ID NO: 233

SEQ ID NO: 23369 - protein, 419 aa, Neisseria meningitidis
MKQTVLKNNLQNLLESAENILLLQGPVGNFFLRLADWLTANGKTVHKFNFNAGDDYFYPPTQAHTVVFNDDYDAFPEFLQEYIVQYHIRAVVCFGDTRPYHVIAKRIANENQVGFWAFEEGYFRPYYITLEKDGVNAFSPLPRRADFFLEQFPKLAQQEYKAPTPVRVGFTPMAKNAIRYYIELFRNLRKYPDYIHHRAPNAGHYLKPWSLSILKRLNYYIEDIQIAKRVEAGKYGKFFIVPLQVFNDSQVRIHCDFPSVRSFLLHVLSSFAEHAPADTNIIIKHHPMDRGFIDYWRDIKRFIKEHPELQGRVIYVHDVPLPVFLRHGLGMVTINSTSGLSGLIHNMPVKVLGRAYYDIPGITDQNTLAEFWNHPTPPDKELFHAYRMYHLNVTQINGNFYSQVFFPNKNTSDSSTPTT

SEQ ID NO: 23370 - protein, 861 aa, Neisseria meningitidis; identical to SEQ ID NO: 7392

SEQ ID NO: 23371 - protein, 235 aa, Neisseria meningitidis
LAHFSQAHVCVVGVGGVGSWAVEALARTGIGRLTLIDLDNVAESNVNRQLHALTGDFGKAKVTALRERITQINPQCEVFEIEDFVTEDNLPEYFGKGFDFVIDAIDQVRVKAAMAAYFVERKQPFVLSGGAGGQKNPALIQTADLSRVTHDPLLANLRYTLRKRYGFSRDTKAKMRVPCVFSTENITPPQSGVACSADAAPQGLSCAGYGASMLVTASFGLYCAQAAVEHIADKK

SEQ ID NO: 23372 - protein, 142 aa, Neisseria meningitidis; identical to SEQ ID NO: 18752

SEQ ID NO: 23373 - protein, 797 aa, Neisseria meningitidis; identical to SEQ ID NO: 15316

SEQ ID NO: 23374 - protein, 1320 aa, Neisseria meningitidis
MSVVLPLRGVTALSDFRVEKLLQKAAALGLPEVKLSSEFWYFVGSEKTLDAATVEKLQALLAAQSVEKTPKAREGLHLFLVTPRLGTISPWASKATNIAENCGLAGIERIERGMAVWLEGALTDEQKRQWAALLHDRMTESVLPDFQTASKLFHHLESETFSTVDVLGGGKEALVKANTEMGLALSADEIDYLVENYQALQRNPSDVELMMFAQANSEHCRHKIFNADFILNGEKQPKSLFGMIRDTHNAHPEGTVVAYKDNSSVIEGAKIERFYPNAAENQGYRFHEEDTHIIMKVETHNHPTAIAPFAGAATGAGGEIRDEGATGKGSRPKAGLTGFTVSNLNIPDLKQPWEQDYGKPEHISSPLDIMIEGPIGGAAFNNEFGRPNLLGYFRTFEEKFDGQVRGYHKPIMIAGGLGSIQAQQTHKDEIPEGALLIQLGGPGMLIGLGGGAASSMDTGTNDASLDFNSVQRGNPEIERRAQEVIDRCWQLGGKNPIISIHDVGAGGLSNAFPELVNDARRGAVFKLREVPLEEHGLNPLQIWCNESQERYVLSILEKDLDAFRAICERERCPFAVVGTATDDGHLKVRDDLFANNPVDLPLNVLLGKLPKTTRTDKTVAPSKKPFHAGDIDITEAAYRVLRLPAVAAKNFLITIGDRSVGGLTHRDQMVGKYQTPVADCAVTMMGFNTYRGEAMSMGEKPTVALFDAPASGRMCVGEAITNIAAVNIGDIGNIKLSANWMAACGNEGEDEKLYRTVEAVSKACQALDLSIPVGKDSLSMKTVWQDGEEKKSVVSPLSLIISAFAPVKDVRKTVTPELKNVEDSVLLFVDLGFGKARMGGSAFGQVYNNMSGDAPDLDDTGRLKAFYSVIQQLVAENKLLAYHDRSDGGLFAVLVEMAFAGRCGLDIDLNLLLAQTFITNHTALSQSLRTEEVKALAEWQETIARTLFNEELGAVIQVRKQDVADIINLFYQQQLHHNVFEIGTLTDENTLIIRDGQTHLISDNLIKLQQTWQETSHQIQRLRDNPACADSEFALIGDNERSALFADVKFDVNEDIAAPFINSGAKPKIAILREQGVNGQIEMAAAFTRAGFDAYDVHMSDLMAGRFRLADFKMLAACGGFSYGDVLGAGEGWAKSILFHPALRDQFAAFFADPDTLTLGVCNGCQMVSNLAEIIPGTAGWPKFKRNLSEQFEARLSMVHVPKSASLILNEMQGSSLPVVVSHGEGRADFALHGGNISADLGIALQYVDGQNQVTQTYPLNPNGSPQGIAGITNADGRVTIMMPHPERVYRAAQMSWKPEGWTELSGWYRLFAGARKALG

SEQ ID NO: 23375 - protein, 404 aa, Neisseria meningitidis
MDKFPKSAKLDHVCYDIRGPVHKKALQLEEEGNKILKLNIGNPAPFGFEAPDEILVDVIRNLPTSQGYCDSKGLYSARKAIVHYYQTKGLRDITVDDVYIGNGVSELITMSMQALLDDGDEILIPAPDYPLWTAAATLAGGTVRHYLCDEENGWFPNLADMEAKITPKTKAIVVINPNNPTGAVYSREILLEIAELARKHGLIIFADEIYDKILYDGAVHHHIAALAPDLLTVTFNGLSKSYRVAGFRQGWMVLNGPKHHAKGYIEGLDMLSSMRLCANTPMQHAIQTALGGYQSINEFILPGGRLLEQRNRAWELVNQIPGVSCVKPMGAMYMFPKIDTEMYRIHDDMKFVYDLLVREKVLLVQGTGFNWIKPDHFRIVTLPYVHQIEEAMGRLARFLQTYRQ

SEQ ID NO: 23376 - protein, 230 aa, Neisseria meningitidis
VQADLAYAAERITHDYPKPTGANNTSTVSDYFRNIRAHSIHPRVSVGYDFGGWRIAADYASYRKWNNNKYSVNTKEVQRNNNAGNWQELKTENQENGSFHAVSSLGLSAIYDFKLNDKFDKFKPYIGARVAYGHVKHQVHSVRKETTTTFSKAGAGATEPGKIISGPISKPAYHESHSISSLGLGVIAGVGFDITPKLTLDTGYRYHNWGRLKNTRFKTHEVSLGMRYHF

SEQ ID NO: 23377 - protein, 296 aa, Neisseria meningitidis
MFPVFHLSGESRRRMLQAALRFPHVFKARAEDSHKGTFGTLAVVGGAVGMSGAPVLAASAAMYLGCGKVWAGFNQDALPFAVIAGFPEIMLDTADGLTKRQGINAWMVGCGLGTDKAAVGTLAGILAEHTDKPVLLDADALNILSTDAETRNLARGCKNLILTPHPAEAARLLGTTVAQVQADRTAAVRKIGAIFGATVVLKGHKTLVAASDTEIYVNESGNAGLATAGSGDVLGGIIGSLLAQGVPVFEAACAGAWLHGAAADVIKESAGIAAGLLAGEIAPAARWLRNRITESM

SEQ ID NO: 23378 - protein, 279 aa, Neisseria meningitidis; identical to SEQ ID NO: 343

SEQ ID NO: 23379 - protein, 170 aa, Neisseria meningitidis
MLPNTLRRAVYAGSFDPPTLGHLWMIRQAQSMFDELIVAIGINPDKRSTYTVAERQDMLCDITKMFPNVRTDVFENRFLVHYAREVDAGFIVRGIRSASDYEYERSMRHINSDLAPEISTVFLMPPREIAEVSSTMVKGLVGPEGWTETIHRYVPQAVYEKILAEHQHEN

SEQ ID NO: 23380 - protein, 201 aa, Neisseria meningitidis
MNTDFQNILKQLGKQAQKEAAEKQAAEKNKQKQEQDFDFSQAVGQLSPLKNRQQYYAPPDKTPIKVRPKDNRADEENYFYIGSTYNDPPASFSKNGQGKNDIQRLKNGYYPVVTDVDLHGYTQEEAQKVLNEFIAFTQKRGVCGEIIHGSGLGSKGYKPVLKNMTRNWLMQHPDILAYAEPREGNDGCVRILLKRKLRQQD

SEQ ID NO: 23381 - protein, 167 aa, Neisseria meningitidis; identical to SEQ ID NO: 6294

SEQ ID NO: 23382 - protein, 259 aa, Neisseria meningitidis; identical to SEQ ID NO: 1423

SEQ ID NO: 23383 - protein, 284 aa, Neisseria meningitidis; identical to SEQ ID NO: 6849

SEQ ID NO: 23384 - protein, 303 aa, Neisseria meningitidis
  misc_feature 2, 3, 4: 'Xaa' is any amino acid
VXXXIVERALEEFGAPIYVRHEVVHNKFVVDNLREKGAVFIEDLAEVPPGATLVYSAHGVSKAVRQEAAERGFRVFDATCPLVTKVHKEVARLDAQDCEIIMIGHKGHVEVEGTMGQLAPGKMLLVETVGDVAKLEVRNPDKLAYVSQTTLSVDETKDIIAALNARFPNIRNPHKEDICYATTNRQTAVKELAEQCDIVIVVGSPNSSNSNRLREVAASRGIDAYMVDNAGYLQRAWFEGKNKVGVTAGASAPEVLVREVLATIRGWGHETVREGEGAEESIVFVLPKELRREGETKPDLCKR

SEQ ID NO: 23385 - protein, 141 aa, Neisseria meningitidis; identical to SEQ ID NO: 3635

SEQ ID NO: 23386 - protein, 223 aa, Neisseria meningitidis
MMKTFKNIFSAAILSAALPCAYAAGLPQSAVLHYSGSYGIPATMTFERSGNAYKIVSTIKVPLYNIRFESGGTVVGNTLHPTYYRDIRRGKLYAEAKFADGSVTYGKAGESKTEQSPKAMDLFTLAWQLAANDAKLPPGLKITNGKKLYSVGGLNKAGTGKYSIGGVETEVVKYRVRRGDDAVMYFFAPSLNNIPAQIGYTDDGKTYTLKLKSVQINGQAAKP

SEQ ID NO: 23387 - protein, 451 aa, Neisseria meningitidis; identical to SEQ ID NO: 14552

SEQ ID NO: 23388 - protein, 675 aa, Neisseria meningitidis
LSLSEFIERRTSFNPMVILTTLFFVCVLVVLVLTVPDQVQMWLDRAKEVIFTEFSWFYVLTFSIFLGFLLILSVSSLGNIRLGRDEDVPEFGFLSWLAMLFAAGMGVGLMFFGVAEPLMHYFSDITAGTPEHRQQQALLHTVFHWGVHAWSVYGTIALALAYFGFRYKLPLALRSCFYPLLKEKISGRFGDAIDIMALLATFFGIITTLGFGASQLGAGLQEMGWIAENSFSVQVLIIAAVMSLAVVSAISGVGKGVKVLSELNLGLAFLLLFFVLAAGPTVYLLSAFGDNIGNYLGNLVRLSFKTYAYEREHKPWFESWTVLYWAWWCSWAPFVGLFIARISKGRTIREFVFGVLLIPGLFGVLWFTVFGNTAIWLNDGVAGGMLEKMTSSPETLLFKFFNYLPLPELTSIVSLLVISLFFVTSADSGIYVLNNITSRDKGLSAPRWQAVMWGVLMSAVAVLLMRSGGLGNLQSMTLIVSLPFALLMLIMCFSLWKGLSADKKYFETRVNPTSVFWTGGKWKERLVQIMSQTQEQDILKFLKHTASPAMHELQRELSEEYGLSVRVDKMFHQDEPAIEFVIRKETMRDFMYGIKSVGQDVSDQLINDGNLPHIRHQTTYKPYAYFFDGRVGYDVQYMNKDELIADILKNYERYLMLLDDVGQELMAHEQVELAE

SEQ ID NO: 23389 - protein, 66 aa, Neisseria meningitidis; identical to SEQ ID NO: 3365

SEQ ID NO: 23390 - protein, 415 aa, Neisseria meningitidis; identical to SEQ ID NO: 15479

SEQ ID NO: 23391 - protein, 256 aa, Neisseria meningitidis
LVKTADGYKAIARIRTGDRVFAKDEASGKTGYKPVTARYGNPYQETVYIEISDGIGKIQTLVSNRIHPFYSDGKWIKAEDLKAGNRLLSESGKTQTVRNIVVKPTPLKAYNLTVADWHTYFVKGDKAETEGVWVHNDCPYGSSGAKGKSGSERNTAKRGTFRQETLKNAWDLAADGSQPNSKKCPTCGKDVYGNPHNKEKRNTKDGWDGSHNPSWSNRQHSSDRKEQLNDYNKGVSLECRHCNRSGGNKDERFKKK

SEQ ID NO: 23392 - protein, 380 aa, Neisseria meningitidis; identical to SEQ ID NO: 314

SEQ ID NO: 23393 - protein, 467 aa, Neisseria meningitidis
MNNPDLPYRQALECLSQKQYNFTEVRRLLTEAFSAGHPAAAFELAKHLMDADSPYQDREQGMEMLRIAAEQGHPYARYNLAYIQELEGAPPETLIPLYRPLAEEGLPEAQVRLMYLLYASRHFEEALEWAKTSAKNNNPHGQYLLAQYCRYGTPPDFETAHLLYRKAAAQGLPEAHWQLGLQYRFGQGTKVDTAQAVNHLRAAAQQGYIPAYTPLAELILPTAPDEAVHWFQQAAQENDPDAHAALADIYLQGKHLERNHKLALHHAEAAAAERHPEGLRILGDICRYGLGIAPDTEKARHYYRQAAEAGSLSAYQKLISDSALNHPDQYGGIKDSAIRRQRAERLYQKAQALHYGLQCAPEYAAALKLYTEAAELGHSKAQTNLGSMYYFGQGMTADYNEARKWFEKAAAKKDSMAFYNLACIHYSGHGVEPDKEKACRYLQEAINNGYGQKSVLQELLQQWQNAV

SEQ ID NO: 23394 - protein, 114 aa, Neisseria meningitidis
MNKQYPKINYIGNKEKIASWICDQLPSDVDTVADVFSGGCSFAYEAKKRGYRVITNDILAINYQIALALIENNHETLNDDDVAMIFSGGPHAGFMSQRYAEKFYFHDEYQQLDL

SEQ ID NO: 23395 - protein, 148 aa, Neisseria meningitidis; identical to SEQ ID NO: 14724

SEQ ID NO: 23396 - protein, 231 aa, Neisseria meningitidis; identical to SEQ ID NO: 2473

SEQ ID NO: 23397 - protein, 90 aa, Neisseria meningitidis; identical to SEQ ID NO: 1115

SEQ ID NO: 23398 - protein, 195 aa, Neisseria meningitidis; identical to SEQ ID NO: 1424

SEQ ID NO: 23399 - protein, 540 aa, Neisseria meningitidis; identical to SEQ ID NO: 7154

SEQ ID NO: 23400 - protein, 124 aa, Neisseria meningitidis; identical to SEQ ID NO: 8954

SEQ ID NO: 23401 - protein, 248 aa, Neisseria meningitidis; identical to SEQ ID NO: 639

SEQ ID NO: 23402 - protein, 488 aa, Neisseria meningitidis; identical to SEQ ID NO: 2117

SEQ ID NO: 23403 - protein, 48 aa, Neisseria meningitidis
MTFQTAFAPPRFEYSGLTLNQDKATKPQTVQIVRQGEATPYWFKFNPL

SEQ ID NO: 23404 - protein, 141 aa, Neisseria meningitidis; identical to SEQ ID NO: 7081

SEQ ID NO: 23405 - protein, 407 aa, Neisseria meningitidis; identical to SEQ ID NO: 14106

SEQ ID NO: 23406 - protein, 329 aa, Neisseria meningitidis; identical to SEQ ID NO: 247

SEQ ID NO: 23407 - protein, 79 aa, Neisseria meningitidis; identical to SEQ ID NO: 6866

SEQ ID NO: 23408 - protein, 138 aa, Neisseria meningitidis; identical to SEQ ID NO: 774

SEQ ID NO: 23409 - protein, 239 aa, Neisseria meningitidis; identical to SEQ ID NO: 5111

SEQ ID NO: 23410 - protein, 290 aa, Neisseria meningitidis; identical to SEQ ID NO: 15300

SEQ ID NO: 23411 - protein, 200 aa, Neisseria meningitidis; identical to SEQ ID NO: 7230

SEQ ID NO: 23412 - protein, 642 aa, Neisseria meningitidis; identical to SEQ ID NO: 269

SEQ ID NO: 23413 - protein, 324 aa, Neisseria meningitidis
MDTLTRFLPEHLQQNQLTEALGGVLLSVVSACTEINAKVRLGALAGVLGMAGTGNIQGEDQKKLDVIANNIMIDTLKANPAVAGLASEEEDTFVSAGENGRYLVLFDPLDGSSNIDVNISVGTIFSILEKPEGALATESFLQTGRQQLAAGYILYGPQTQLVFTFGHGVYMFTLNAENKFVLTKEKPKVPESTKEFAINMSNRRHWLPPVQQYIDELLAGETGTRGKNYNMRWVASMVAEIHRILMRGGVFMYPQDKRDPAKPGKLRLMYEANPMSLILEQAGASASNAYQAMLDIQPENLHQRVAVFMGSSEEVAYLDRLHAK

SEQ ID NO: 23414 - protein, 139 aa, Neisseria meningitidis
MAQLPLYLTSEIKDFTVGTPKVLESFSKHIPYGVVFEDDGDTGYFYAASQDGILDALHIYNVEDVSDKHIPNHVLILWDDACTIAELCVNDYIHAVYDFVEQAGYCRNGFPEAHGEWVKVENRVLDDELLDKILSREPT

SEQ ID NO: 23415 - protein, 453 aa, Neisseria meningitidis
MLKKWLNKMLPSGRSSKKAESKTVIPAERHNIRAEMLSFAAENVIRRLKGAGFQAYVVGGAVRDLLLGIEPKDFDVATDATPEQVHKLFRRSRIIGRRFQIVHVMNGAEVIEVTTFRGGAKVHQNARGRIMKDNTYGSIEEDAMRRDFTCNALYYDPEKEEILDFHNGMDDIAERKLVMIGNAAERYQEDPVRILRAIRLSGKLGFELSQATAGPIAESICRLKHEPVARLFDEIMKLLFSGHARECLKRLNGFDIPDDIHPLLNALRVSDGIAGKMTVLALKNTDERLRADKSVSVGFVLAALMWPELERHWKSNLQQGLKPAPALSDAINTMRETVERGWGVPQRFSATMREIWMFQPQFENRKGARPHKLFAQARFRAAYDFLLLRAETGNADRALAEWWTAFQTASTEQRTEMTKNEAAARHEKNEGQAKKRRRRRRKPKPKVVGTDWE

SEQ ID NO: 23416 - protein, 459 aa, Neisseria meningitidis
MLLDLNRFSFSVFLKEIRLLTALALPMLLAQVAQVGIGFVDTVMAGGAGKEDLAAVALGSSAFATVYITFMGIMAALNPMIAQLYGAGKTDEVGETGRQGIWFGLFLGVFGMVLMWAAITPFRNWLTLSDYVEGTMAQYMLFTSLAMPAAMVHRALHAYASSLNRPRLIMLVSFAAFVLNVPLNYIFVYGKFGMPALGGAGCGLATMAVFWFSALALWIYIAKENFFRPFGLTAKFGKPDWAVFKQIWKIGAPIGLSYFLEASAFSFIVFLIAPFGEDYVAAQQVGISLSGILYMIPQSVGSAGTVRIGFSLGRREFSRARYISGVSLVLGWMLAVITVLSLVLFRSPLVSMYNNDPAVLSIAATVLLFAGLFQPADFTQCIASYALRGYKVTKVPMFIHAAAFWGCGLLPGYLLAYRFDMGIYGFWTALIASLTIAAIALVWCLELCSREMVRSHKAV

SEQ ID NO: 23417 - protein, 272 aa, Neisseria meningitidis; identical to SEQ ID NO: 15445

SEQ ID NO: 23418 - protein, 61 aa, Neisseria meningitidis; identical to SEQ ID NO: 1125

SEQ ID NO: 23419 - protein, 111 aa, Neisseria meningitidis; identical to SEQ ID NO: 7069

SEQ ID NO: 23420 - protein, 100 aa, Neisseria meningitidis; identical to SEQ ID NO: 1476

SEQ ID NO: 23421 - protein, 63 aa, Neisseria meningitidis; identical to SEQ ID NO: 1437

SEQ ID NO: 23422 - protein, 176 aa, Neisseria meningitidis; identical to SEQ ID NO: 3131

SEQ ID NO: 23423 - protein, 910 aa, Neisseria meningitidis
MHEHYQPAAIEPAAQKKWDDARIFNVSEDASKPKYYCLSMFPYPSGKLHMGHVRNYTIGDVLSRFKLLNGFNVMQPMGWDAFGMPAENAAMKNNVAPAAWTYDNIEYMKTQLKSLGFAIDWERETATCKPEYYRWEQWLFTKLFEKGIVYRKNGTVNWDPVDQTVLANEQVIDGRGWRSGALIEKREIPMYYFKITDYAEELLNDLDKLEHWPEQVKTMQRNWIGKSRGMTVRFAVSDDSKQGLEGDYAKFLQVYTTRPDTLMGATYVAVAAEHPLAAAAAADKPELQAFIAECKAGSVAEADMATMEKKGVPTGRYVVNPLNGDKLEVWIANYVLWGYGDGAVMAVPAHDERDFEFAAKYSLPKKQVLQRVTIGLSPEQEEAMGFGGGSGCGAGYGDGSGSDSRDLPFMPNKWQAWYGVKDDFMVLINSGELDGMNYQTAFDAVAAKLQAIGAGEPKTQYRLRDWGISRQRYWGCPIPIVHCEKCGDVPVPADQLPVVLPENVVPDGMGSPLAKMPEFYETTCPCCGGAAKRETDTMDTFMESSWYFFRYMSPKFSDGMVSAEAAKYWGAVDQYIGGIEHAILHLLYARFFTKLMRDEGLVNVGEPFERLLTQGMVVCETYYRENDKGGKDWINPADVELTFDDKGRPVSAVLKADGLPVVISGTEKMSKSKNNGVDPQELINAYGADTARLFMMFAAPPEQSLEWSDSGVEGAHRFLRRLWRTVYEYLKQGEAVKAFAGSQDGLSKELKDLRHKLHATTAKVSDDYGRRQQFNTAIAAVMELLNQYDKTDTGGEQGRAVAQEVLETAVRLLWPIVPHICETLWSELNGAKLWEAGWPTVDEAALVKSEIEVMVQVNGKLRGKITVAADASKADLEAAALATEGAVKFMEGKPAKKIIVVPGRLVNIVV

SEQ ID NO: 23424 - protein, 365 aa, Neisseria meningitidis; identical to SEQ ID NO: 14497

SEQ ID NO: 23425 - protein, 269 aa, Neisseria meningitidis
MHALPRYAVFGNPVAHSKSPQIHQQFALQEGVDIEYERICADIGGFAQAVSTFFGTGGCGANVTVPFKQEAFHLADEHSDRALAAGAVNTLILLKNGKLRGDNTDGIGLANDITQVKNIAIEGKTILLLGAGGAVRGVIPVLKEHRPARIVIANRTRAKAEELAQLFGIEAVPMADLNGGFDIIINGTSGGLNGQIPDIPPDIFQNCALAYDMVYGCAAKPFLDFARQSGAKKTADGLGMLVGQAAASYALWRGFTPDIRPVIEYMKAM

SEQ ID NO: 23426 - protein, 382 aa, Neisseria meningitidis
MPLPLPSPEARQFSLKLQTLIAEKIGKHGNWIPFSRFMELVLYAPQYGYYTGGSHKIGNTGDFITAPTLTSLFAQTLARQLQELLSQTAGNIYEFGAGTGQLAADLLGSISDGISRYYIIEISPELAARQKNLIQARAPEASQKVVHLTALPEAFDGIIIGNEVLDAMPVEIVRKNEGGSFEHVGVCLDNDRFTYSARPLHDLQLSALASLYFPQTDYPYTSELHPQQYAFIRTLASRLEHGCMIFIDYGFDAAQYYHPQRNQGTLIGHYRHHVIHNPFDFIGLADLTAHVNFTDIAQAGTDAGLDLIGYLPQSHFLLNLGITELLAQTGKTNSAAYIREAAAVQKLIDQHEMGELFKVIAFGKNIGIDWAGFRFGDICHKL

SEQ ID NO: 23427 - protein, 188 aa, Neisseria meningitidis
MSIKSDKWIRRMSEEFGMIDPFEPNQIKEADGKRIISYGTSSYGYDIRCANEFKIFTNINSTIVDPKNFDPKNFVTVEDDCCIIPPNSFALARTVEYFRIPRNVLTVCLGKSTYARCGIIVNVTPFEPEWEGYVTLEFSNTTPLPAKIYAGEGVAQVLFFESDEVCETSYKDRNGKYMGQTGVTLPKA

SEQ ID NO: 23428 - protein, 43 aa, Neisseria meningitidis; identical to SEQ ID NO: 2340

SEQ ID NO: 23429 - protein, 430 aa, Neisseria meningitidis
MQFSAFGEKFTQHSGILQLMDDLGDALKSDKPVNMLGGGNPARIPEIDQAFADIFSKLAAEHAVENIGNYSNPQGDAVLIDALTAFLNREYSWNLTADNIALTNGSQNAFFYLFNLFGGKFNLSDGTSAEKAILLPLAPEYIGYADVHVEGQHFVSVKPKIENVEHEGEAGFFKYRVDFDALENLPELKAGKIGAICCSRPTNPTGNVLTDGEMARLDALAREHGIPLIIDNAYGMPFPNIIYSDVTLNWHENIILCFSLSKVGLPGVRTGIIVAAPEVVKAVSSLNAIVNLAPTRFGAAIAAPLLESGEMKRLADQVIRPFYRNQAQTAVSLLKRELGAYPMKIHKPEGAIFLWLWFENLPVSSQTLYEMLKAEGTLIIPGEHFFVGIDTQDYPHAGECIRMSIAQDAQTLEKGIAAIGKTVRKLYDNV

SEQ ID NO: 23430 - protein, 97 aa, Neisseria meningitidis; identical to SEQ ID NO: 1875

SEQ ID NO: 23431 - protein, 473 aa, Neisseria meningitidis; identical to SEQ ID NO: 2148

SEQ ID NO: 23432 - protein, 138 aa, Neisseria meningitidis; identical to SEQ ID NO: 15462

SEQ ID NO: 23433 - protein, 69 aa, Neisseria meningitidis; identical to SEQ ID NO: 3128

SEQ ID NO: 23434 - protein, 304 aa, Neisseria meningitidis; identical to SEQ ID NO: 3139

SEQ ID NO: 23435 - protein, 458 aa, Neisseria meningitidis
MHDKTWSGRFNEPVSELVKQYTASISFDRRLAEWDIQGSLAHAQMLKETGVLDEGDLADIRRGMAEILEEIRSGKIEWSLDLEDVHMNIERRLTDKIGDAGKRLHTGRSRNDQVATDIRLWLRDQITVIRSLIQSLQTALLDLAEQNAETVMPGFTHLQVAQPVSFGHHMLAYVEMLGRDNERMADCRRRVNRMPLGAAALAGTTYPIRREITAKLLGFEQICQNSLDAVSDRDFAIEFTAAASLVMVHLSRLSEELILWMSPRFGFIDIADRFCTGSSIMPQKKNPDVPELVRGKSGRVIGHLIGLITLMKSQPLAYNKDNQEDKEPLFDTADTLIDTLRIYADMMRGVTVKPDNMRTAVMQGFATATDLADYLVKKGMPFRDAHEVVAQAVRHADQAGVDLSKLPLEVLQGFSDLIADDVYGVLTPEGSLNARNHLGGTAPEQVRFQVKRWREMLA

SEQ ID NO: 23436 - protein, 113 aa, Neisseria meningitidis; identical to SEQ ID NO: 995

SEQ ID NO: 23437 - protein, 209 aa, Neisseria meningitidis; identical to SEQ ID NO: 5171

SEQ ID NO: 23438 - protein, 155 aa, Neisseria meningitidis; identical to SEQ ID NO: 6051

SEQ ID NO: 23439 - protein, 376 aa, Neisseria meningitidis
MIKISTRFDAGSVVVKDLTDPSNIRLALRPDNASDFAQWFYFRLQGAAYQNCIMHFENAAEAAYPKGWEGYQACASYDRRNWFRVPTSYENGVLTVNHTPLSNSVYYAYFEPYSEEQHLNLLGDAQGSGLCRIDDLGSTVQGRDINLLTIGNQVESDLKIWITARQHPGETMAEWFVEGLLGRLLDPQDPTARTLLDRATFYIVPNMNPDGSALGNLRTNAAGANLNREWENPTLEKSPEVFFVREKMLETGVDLFLDIHGDEGLPFIFVAGTEGVPNYNPRISALETQFKTALLNASPDFQDEYGYEKDAPGQANMTLATNWVGNRFNCLAYTLEMPFKDNANLPDDDFGWNGQRSLRLGEAALSAILNIIGDLR

SEQ ID NO: 23440 - protein, 436 aa, Neisseria meningitidis
MSVTVETLENLERKVVLSLPWSEINAETDKKLKQTQRRAKIDGFRPGKAPLKMIAQMYGASAQNDVINELVQRRFYDVAVAQELKVAGFPRFEGVEEQDDKESLKIAAIFEVFPEVVIGDLSAQEVEKVTASVGDAEVDQTVEILRKQRTRFNHVEREAQNGDRVIIDFEGKIDGEPFAGGASKNYAFVLGAGQMLPEFEAGVVGMKAGESKDVTVNFPEDYHGKDVAGKTAVFTITLNNVSEATLPEVDADFAKALGIADGDVAKMREEVQKNVSREVERRVNEQTKESVMNALLKAVELKAPVALVNEEAARLANEMKQNFVNQGMADAANLDLPLDMFKEQAERRVSLGLILAKLVDENKLEPTEEQIKAVVANFAESYEDPQEVIDWYYAEPSRLQAPTSLAIESNVVDFVLGKAKVNEKALSFDEVMGAQA

SEQ ID NO: 23441 - protein, 317 aa, Neisseria meningitidis
MTHTVHLHLEEIDNLALQRLCGSFDNNLDLLAKALDIHISRRFEHFTFNGAFAHAGKRALLKLLETAQTRDLNDGDIRLAAVEAQTEDAGHQEKNHDHAYYFRTKRGSIGGRTPRQNGYIRALLNHDIVFGLGPAGTGKTYLAVAAAVDAMEKHQVERIILVRPAVEAGEKLGFLPGDMTQKVDPYLRPLYDALYDLMGFDRVTKLIEKGLIEIAPLAYMRGRTLNGAYIILDEAQNTTPEQMKMFLTRIGFGAKAVITGDTSQIDLPKNIKSGLKDAREKLHNVEGLYFHTFTGEDVVRHPLVQKIVEAYESAEHD

SEQ ID NO: 23442 - protein, 402 aa, Neisseria meningitidis; identical to SEQ ID NO: 2438

SEQ ID NO: 23443 - protein, 73 aa, Neisseria meningitidis; identical to SEQ ID NO: 227

SEQ ID NO: 23444 - protein, 41 aa, Neisseria meningitidis
MLQLFYMSGGGTVLNILFGAIAFILSFKQITKLATSIGKKK

SEQ ID NO: 23445 - protein, 436 aa, Neisseria meningitidis; identical to SEQ ID NO: 15428

SEQ ID NO: 23446 - protein, 323 aa, Neisseria meningitidis; identical to SEQ ID NO: 3380

SEQ ID NO: 23447 - protein, 140 aa, Neisseria meningitidis
LSAVFIAPYLTAFHEQEKTFEYAELTVTAPNRSGRAIKLDADGQHYRLSCYGFDSLCTGGNIGRTIRAEQVKIVLSETVGKGFLNGVLLEYRNSGSIHTNKEFAHPEDRLIKVLAQPAVFSLKLGILLLLPAIFLRLKRM

SEQ ID NO: 23448 - protein, 317 aa, Neisseria meningitidis; identical to SEQ ID NO: 15338

SEQ ID NO: 23449 - protein, 212 aa, Neisseria meningitidis; identical to SEQ ID NO: 14185

SEQ ID NO: 23450 - protein, 456 aa, Neisseria meningitidis
MPQNTLNIVILAAGKGTRMYSKMPKVLHRIGGKPMLGRVIDTAAALNPQNICVVVGHGKEQVLDTVKRDVVWVEQTEQLGTGHAVKTALPHLAAEGRTLVLYGDVPLIDVETLKTLLEAAGNKVGLLTDVPADPTGLGRIIRDSNGSVTAIVEEKDADTAQKAVKETNTGILVLPNAKLEKWLNSLSSNNAQGEYYLTDLIAKAVADGIKVHPVQVRTSYLAAGVNNKRQLAELERIFQTEQAQELLKAGVTLRDPARFDLRGRLKHGQDVVIDVNCIFEGEIELGDNVEIGANCVIKNAKIGANSKIAPFSHLESCEVGENNRIGPYARLRPQAKLADDVHVGNFVEIKNAAIGKGTKANHLTYIGDAEVGSKTNFGAGTIIANYDGVHKHKTVIGDEVRIGSNCVLVSPVKIGNKVTTGAGSTITRNVEDGKLALARSRQTIIDGWVRPEKNKQ

SEQ ID NO: 23451 - protein, 200 aa, Neisseria meningitidis; identical to SEQ ID NO: 321

SEQ ID NO: 23452 - protein, 176 aa, Neisseria meningitidis; identical to SEQ ID NO: 8570

SEQ ID NO: 23453 - protein, 164 aa, Neisseria meningitidis
MNNRHFAVIALGSNLENPAQQVRAALDTLSSHPDIRLHQTSSLYATAPVGYDDQPDFVNAVCTVSTDMDGISLLSLLNRIEADFGRKRSFRNAPRTLDLDIIDFDGISSDDPRLTLPHPCAHERSFVIRPLAEILPDFVLGKHGKVAELSKQLGNQGIRLLPDR

SEQ ID NO: 23454 - protein, 271 aa, Neisseria meningitidis; identical to SEQ ID NO: 3345

SEQ ID NO: 23455 - protein, 305 aa, Neisseria meningitidis; identical to SEQ ID NO: 6805

SEQ ID NO: 23456 - protein, 233 aa, Neisseria meningitidis
MTLKTVAVIGAMEQEIELLRETMENVKAVSFGKFAAYEGELAGKRMVLALSGIGKVNAAVATAWLIHQFAPECVINTGSAGGLGKGLKVGDVVVGTEIAHHDVDVTAFGYVWGQVPQLPAVFVSDGLLVGKAKQAAEVFEGAAVEQGLIVSGDRFVHSSEGVAEIRKHFPKVKAVEMEAAAIAQTCHQLETPFVIIRAVSDSADEKADISFDEFLKTAAASSAKMVAEIVKSL

SEQ ID NO: 23457 - protein, 204 aa, Neisseria meningitidis; identical to SEQ ID NO: 504

SEQ ID NO: 23458 - protein, 182 aa, Neisseria meningitidis; identical to SEQ ID NO: 16797

SEQ ID NO: 23459 - protein, 979 aa, Neisseria meningitidis; identical to SEQ ID NO: 7212

SEQ ID NO: 23460 - protein, 377 aa, Neisseria meningitidis
MSTPALLVLADGSVFHGTSIGYEGSTSGEVVFNTSMTGYQEILTDPSYCKQIVTLTYPHIGNTGTNAEDEESRSVYAAGLIIRDLPLLHSNFRASESLHDYLVRNKTVAIADIDTRRLTTLLREKGAQGGAILTGADATIEKAQELIAAFGSMVGKDLAKEVSCTETYEWTEGEWALGKGFVTPDEQPYHVVAYDFGVKTNILRMLASRGCRLTVVPAQTSAQDVLALNPDGVFLSNGPGDPEPCTYAIEAVQKLMESGKPIFGICLGHQLISLAIGAKTLKMRFSHHGANHPVQDLDSGKVVITSQNHGFAVDADTLPANARITHKSLFDNTLQGIELTDKPVFCFQGHPEASPGPQDVGYLFDKFIGNMKAAKRA

SEQ ID NO: 23461 - protein, 522 aa, Neisseria meningitidis; identical to SEQ ID NO: 18279

SEQ ID NO: 23462 - protein, 192 aa, Neisseria meningitidis
MKTFALILADGQASRMGGEDKGLALLGGKALIDHVIDRVRPQVSHIAISTNRNLEEYARRSPHIFPDARQWQHFGPLSALCTAANDLQLATADWLLVVPCDMPYLPDDLVARFETVSKRTPLCNAYYVETPITMHYNIMYIRPQILQSAIPYLFSGMKTLRSWLQQQRARSVRFEFDGHFADLNTQTDLQEG

SEQ ID NO: 23463 - protein, 169 aa, Neisseria meningitidis; identical to SEQ ID NO: 111

SEQ ID NO: 23464 - protein, 461 aa, Neisseria meningitidis
MMARDNRIQMFPHEWRASTTLSGVYALRMLGMFLVLPVLAVYAASLPGAEGNKTLVGLAMGIYGLTQALLQLPLGIASDKFGRKKTIYVGLIVFAAGSFLAAAADTLPMLVAARAIQGAGAVSAAVTALLADLTRDGVRTRAMAMIGLSIGLTFSVSLVVAPVIADAVGVRGLFLLTGILTVASIGVVAWMTPDPEVSKLHEDTQAQPSRIGEVLKNRRLLTLDFGIFALHAAQMALFTALPFAMTQLGLEKIQHWKVYLPSTITGLVVMVPLIIVGETRNKLKQVFVLGIVCIAAAQLGLLSGMRSVGLITAYLVVYFIGFNVLEASLPSMVSKIAPSDLKGTAMGVYNTMQSLGLFAGGAAGGLLFQKYGFSGVFAFCSILMLLWLVIAVLSPAPKPVKNLSYPVGGVWQVNQEVLYRALSELEGVEDIGFSFDGQTVYLKVLQKGFDQAAAEKIITGV

SEQ ID NO: 23465 - protein, 103 aa, Neisseria meningitidis; identical to SEQ ID NO: 2233

SEQ ID NO: 23466 - protein, 170 aa, Neisseria meningitidis; identical to SEQ ID NO: 1267

SEQ ID NO: 23467 - protein, 321 aa, Neisseria meningitidis; identical to SEQ ID NO: 6649

SEQ ID NO: 23468 - protein, 434 aa, Neisseria meningitidis; identical to SEQ ID NO: 2219

SEQ ID NO: 23469 - protein, 596 aa, Neisseria meningitidis
MELMTVLLPLAALVSGVLFTWLLMKGRFQGEFADLNAQLAEKAARCDFVEQAHAEIASELAVLDGKYRHLQDENYALGNRFSAAEKQIAHLQEKEAESVRLKQSYIELQEKAQGLAVENERLATQLGQERKAFADQYALERQIRQRIETDLEESRQTVRDVQNDLADVGNRFAAAEKQIAHLQEKEAEAERLRQSHTELQEKAQGLAVENERLATQIEQERLASEEKLSLLGEARKSLSDQFQNLANTILEEKSRRFTEQNREQLHQVLNPLNERIHGFGELVKQTYDKESRERLTLENELKRLQGLNAQLHSEAKALTNALTGTQNKVQGNWGEMILETVLENSGLQKGREYVVQAASVRKEEDGGTRRLQPDVLVNLPDNKQIVIDSKVSLTAYVRYTQAADADTAARELAAHVASIRAHMKGLSLKDYTDLEGVNTLDFVFMFIPVEPAYLLALQHDAGLFQECFDKRIMLVGPSTLLATLRTVANIWRNEQQNQNALAIADEGGKLYDKFVGFVQTLESVGKGIDQAQSSFQTAFKQLAEGRGNLVGRAEKLRLLGVKAGKQLQRDLVERANEQTAFALGKPSEQEAADEAE

SEQ ID NO: 23470 - protein, 271 aa, Neisseria meningitidis
MRPYATTIYQLFILFIGSVFTMTSCEPVNEKTDQKAVSAQQAKEQTSFNNPEPMTGFEHTVTFDFQGTKMVIPYGYLARYTQDNATKWLSDTPGQDAYSINLIEISVYYKKTDQGWVLEPYNQQNKAHFIQFLRDGLDSVDDIVIRKDACSLSTTMGERLLTYGVKKMPSAYPEYEAYEDKRHIPENPYFHKLYYIKKGENPAIITHRNNRINQTEEDNYSTSVGSCINGFTVRYYPFIREKQQLTQQELVGYHQQVEQLVQSFVNNPSKK

SEQ ID NO: 23471 - protein, 590 aa, Neisseria meningitidis; identical to SEQ ID NO: 8123

SEQ ID NO: 23472 - protein, 122 aa, Neisseria meningitidis; identical to SEQ ID NO: 66

SEQ ID NO: 23473 - protein, 365 aa, Neisseria meningitidis; identical to SEQ ID NO: 1845

SEQ ID NO: 23474 - protein, 261 aa, Neisseria meningitidis; identical to SEQ ID NO: 15410

SEQ ID NO: 23475 - protein, 451 aa, Neisseria meningitidis
MSEYTPQTAKQGLPALAKSTIWMLSFGFLGVQTAFTLQSSQMSRIFQTLGADPHNLGWFFILPPLAGMLVQPIVGHYSDRTWKPRLGGRRLPYLLYGTLIAVIVMILMPNSGSFGFGYASLAALSFGALMIALLDVSSNMAMQPFKMMVGDMVNEEQKGYAYGIQSFLANTGAVVAAILPFVFAYIGLANTAEKGVVPQTVVVAFYVGAALLVITSAFTIFKVKEYDPETYARYHGIDVAANQEKANWFELLKTAPKAFWTVTLVQFFCWFAFQYMWTYSAGAIAENVWHTTDASSVGYQEAGNWYGVLAAVQSVAAVICSFVLAKVPNKYHKAGYFGCLALGALGFFSVFFIGNQYALVLSYTLIGIAWAGIITYPLTIVTNALSGKHMGTYLGLFNGSICMPQIVASLLSFVLFPMLGGLQATMFLVGGVVLLLGAFSVFLIKETHGGV

SEQ ID NO: 23476 - protein, 283 aa, Neisseria meningitidis; identical to SEQ ID NO: 453

SEQ ID NO: 23477 - protein, 472 aa, Neisseria meningitidis
MSIKNAVKLIEESEARFVDLRFTDTKGKQHHFTVPARIVLEDPEEWFENGQAFDGSSIGGWKGIQASDMQLRPDASTAFVDPFYDDTTVVFTCDVIDPADGQGYDRDPRSIARRAEAYLKSSGIGDTAYFGPEPEFFVFDGVEFETDMHKTRYEITSESGAWASGLHMDGQNTGHRPAVKGGYAPVAPIDAGQDLRSAMVNILEELGIEVEVHHSEVGTGSQMEIGTRFATLVKRADQTQDMKYVIQNVAHNFGKTATFMPKPIMGDNGSGMHVHQSIWKDGQNLFAGDGYAGLSDTALYYIGGIIKHAKALNAITNPSTNSYKRLVPHFEAPTKLAYSAKNRSASIRIPSVNSSKARRIEARFPDPTANPYLAFAALLMAGLDGIQNKIHPGDPADKNLYDLPPEEDALVPTVCASLEEALAALKADHEFLLRGGVFSKDWIDSYIAFKEEDVRRIRMAPHPLEFEMYYSL

SEQ ID NO: 23478 - protein, 163 aa, Neisseria meningitidis; identical to SEQ ID NO: 684

SEQ ID NO: 23479 - protein, 329 aa, Neisseria meningitidis; identical to SEQ ID NO: 19766

SEQ ID NO: 23480 - protein, 346 aa, Neisseria meningitidis; identical to SEQ ID NO: 17005

SEQ ID NO: 23481 - protein, 350 aa, Neisseria meningitidis; identical to SEQ ID NO: 8682

SEQ ID NO: 23482 - protein, 213 aa, Neisseria meningitidis; identical to SEQ ID NO: 2136

SEQ ID NO: 23483 - protein, 143 aa, Neisseria meningitidis; identical to SEQ ID NO: 14741

SEQ ID NO: 23484 - protein, 66 aa, Neisseria meningitidis; identical to SEQ ID NO: 2062

SEQ ID NO: 23485 - protein, 411 aa, Neisseria meningitidis
MTISTMAQTHDTRLQKTLLFPSQQGWKSKTFLKPDSHIRLATVFSGIGAVEQAFHRLNLNHTIVFAGDIDPYVKKSYLGNYKLNEDFWHNDITQFDARKFRNQVDILVGGSPCQAFSMVGKRAGLEDTRGTLFYEFARVVDEVQPKIFIYENVKGLLNHDNGKTWKVVKSVFYSLGYDLYFQIMNSKDYGIPQHRERIFVVGFHTPPINGFQFPEKIELEHTMQDFLEDYTDSKYFLREKGVKFVTSSKNRQKRYTQINGEIALCQKANQQFNWHGDFIFQAARESEFDDFIFDVNNVEEKYYLSEKIKNYVLAGGTKNFKTSTETDLPVARPLLQTMHKMHRAGVDNYVTHNRGRIRKLTPRECLRLMGFRDDFKILVSDTQMYRQAGNSIVVDVLIAILKQMDITLYGE

SEQ ID NO: 23486 - protein, 716 aa, Neisseria meningitidis; identical to SEQ ID NO: 13960

SEQ ID NO: 23487 - protein, 196 aa, Neisseria meningitidis
LVKTADGYKAIARIRVGDRVFAKDETSGVTGYKPVTARYGNPYQETVYIKVSDGIGKTQTVRNIIVKPTPLKAYNLTVADWHTYFVKGNQAETEGVWVHNDCPPYKRPNNATTKAQRESVQGKPCVEYGKLAEKMIADHKKPLVVEYYETGTIDKSKMRAIESVQPQCPTCSAKQGGRLSQYSKEQKRKLSNGNKK

SEQ ID NO: 23488 - protein, 449 aa, Neisseria meningitidis
MKLPVMSPEHSAQLQAFEAKILSNHAKIEAWFRTQWSVHRPPFYGSVDIRNAGYKISSIDMNLFPGGFNNLNPNFIPLAAVAAQDAVQRACETAKSVLIIPENHTRNTFYLQNIYALGEILRSAGYEVRLGSLNPEVTEPTEFETALGDKILLEPLLRTRDRVHLADGFSPCVVLLNNDLSAGIPDILKGISQTVLPPLHGGWTTRRKTNHFGAYNQVTAEFAKLIGIDEWQINPYFEKIGGLDFQGREGEDALAEAVERVLAKIQAKYDESGITDKPFVIVKADAGTYGMGVMSVKFADEVRGLNRKNRNKMAKVKEGLEVSEVIVQEGIYTYETLNGAVCEPVVYMMDRFVIGGFFRVHEGRGADENLNAGGMVFVPLSNSIPTGNGDNSQEAPEACKRVFEQWDSLGMPRSEKDCDVDNEHNRLYVYGVMARLSLLAASIELEETA

SEQ ID NO: 23489 - protein, 71 aa, Neisseria meningitidis
VFKLGVYTCLGLFAGWVLLLIVQLWFSFLEAELFFKITLTMAGLFVIILAALLVFGQYFSEKKMKDDGFIN

SEQ ID NO: 23490 - protein, 260 aa, Neisseria meningitidis
MESLTAINKSRIRQAFQKALNDYDRHALIQQKMTINLMAHLQDYLPDMPLENVLELGCGSGMLSALLQKQISANYWLFNDLCDVQPQLAEKLPQSFDFYCGDAENFPFQRQFDLIASASAVQWFHQPDAFIAHCKTGLKANGLLAVATFGKDNLKEARQITNIGLNYPTLSQWQTWLAKDFELLWCEDFKVILDFDTPLDVLKHLKYTGVTATNQKNWTRKNLNGFIGDYLSAFSMPSGKVRLTYHPLFFIARYSAAGRQ

SEQ ID NO: 23491 - protein, 1071 aa, Neisseria meningitidis
MPKRTDLKSILIIGAGPIVIGQACEFDYSGAQACKALREEGYKVILVNSNPATIMTDPEMADVTYIEPIMWQTVEKIIAKERPDAILPTMGGQTALNCALDLARNGVLAKYNVELIGATEDAIDKAEDRGRFKEAMEKIGLSCPKSFVCHTMNEALAAQEQVGFPTLIRPSFTMGGSGGGIAYNKDEFLAICERGFDASPTHELLIEQSVLGWKEYEMEVVRDKNDNCIIICSIENFDPMGVHTGDSITVAPAQTLTDKEYQIMRNASLAVLREIGVDTGGSNVQFAVNPENGEMIVIEMNPRVSRSSALASKATGFPIAKVAAKLAVGFTLDELRNDITGGRTPASFEPSIDYVVTKIPRFAFEKFPAADDRLTTQMKSVGEVMAMGRTIQESFQKALRGLETGLCGFNPRSSDKAEIRRELANPGPERMLFVADACRAGFTLEEIHEICAIDPWFLAQIEDLMKEEKAVSDGILSDLDFAALRRLKRKGFSDKRLAQLLNVSEKEVREHRYALKLHPVYKRVDTCAAEFATETAYLYSTYEEECEARPSDRKKVMILGGGPNRIGQGIEFDYCCVHAALALRESGFETIMVNCNPETVSTDFDTSDRLYFEPLTLEDVLEIVRTENPWGVIVHYGGQTPLKLANALVENGVNIIGTSADSIDAAEDRERFQKVLNDLGLRQPPNRIAHNEEEALVKAEEIGYPLVVRPSYVLGGRAMQIVHSAEALQKYMREAVQVSEDSPVLLDFFLNNAIEVDVDCVSDGKDVVIGGIMQHVEQAGIHSGDSGCSLPPYSLSEEIQDEIRRQTKAMAYALGVVGLMNVQFAVQDGVVFVLEVNPRASRTVPFVSKATGVPLAKVGARCMAGISLKEQGVEKEVVPDFYAVKEAVFPFIKFPGVDTILGPEMRSTGEVMGVGASFGEAYYKAQLGAGERLNPTGKIFLSVREEDKERVIKTAKNFQALGYGICATRGTAQYLTEHGLIVQTINKVPEGRPHIGDALKNGEIALVVNTVSSDPQSVSDSHIIRQSALQQRVPQYTTTAGGEAMSEGAKSRDHLGVYSVQELHGRLKNRN

SEQ ID NO: 23492 - protein, 74 aa, Neisseria meningitidis
MNKPFITQAQLALYKYQPSSKYFGQSMAVIAQSEFVEFAKINKSENVIDCFSFFWNRRIKHDIWLISFSDIQKW

SEQ ID NO: 23493 - protein, 513 aa, Neisseria meningitidis; identical to SEQ ID NO: 7492

SEQ ID NO: 23494 - protein, 328 aa, Neisseria meningitidis; identical to SEQ ID NO: 6244

SEQ ID NO: 23495 - protein, 465 aa, Neisseria meningitidis
MTVRIEHDLLGDREIPAEVYWGIHTLRAIENFKISTQKISDVPQFVRSMVMVKKATAQANGKLGAVKPEIAAAIEKACDEVLLNNRCLDQFPSDVYQGGAGTSVNMNTNEVIANLALEALGYEKGRYDIVNPMDHVNASQSTNDAYPTGFRLAVYYSIGELLDKLAVLKNAFAAKAEAFKDVLKMGRTQLQDAVPMTTGQEFQSFQVLLEEEILNLDRTRQLLLEVNLGATAIGTGVNTPKGYAELVVKKLSEVSGLPCKLTENLIEATSDCGAYVMVHGALKRTAVKLSKICNDLRLLSSGPRAGLKEINLPELQAGSSIMPAKVNPVIPEVVNQVCFKVIGNDTTITFAAEAGQLQLNVMEPVIAQCMFETISLLGNAAVNLAEKCVKGITVNREICERYVFNSIGLVTYLNPYIGHHNGDLVGKICAQTGKGVREVVLERGLLSEEELNRILSPENLMNPHL

SEQ ID NO: 23496 - protein, 1069 aa, Neisseria meningitidis
MFYLYQSNRLETLAALFARIQKVKPLKSVLQPEQIIVQSQGMRRYLNTCLARDLGVAANLSFSLPAGLTWKLMKKLIPGIPELSPFAPEVMRWRLLDLFRSEAFRNTAEFEDVRNVLQDYLGSGESADYQLAGQLADIFDQYLVYRPQWIDAWQQGRILSLGDDEIWQSKLWRYLDDGRQSAPHRVALWEKLLESLSSDKLPERYFVFGISTMAPMYLQLLHKLSEHCDVFVFALNPSGMYWGNVIEAAQILKGGGDPDLTQAGHPLLASLGKQGRDFFDFLNEMEIEGETPVFEEGGRDTLLHALQTDIQNLKMPSENVGSVNTGDGSIRIVSAHSPLRELQILKDKLLKILHEHPDWQPHDIAVLTPNIESYTPFIEAVFGQAQPGAQALPYSVSDVKISRRQPFFYTLECLSDLLESRFEVDKVLALLETAPVLRRFGLTEDDLPLLHDMVADLNVHWGLDGEMRGGTDQLFTWKQAVERMILGWMLPEGGNPMWQDVSAWYADVNQTALFGRFAAFLETLTDIVRIWRQPATVDEWVGRCRGLLKTLFQAEADDQKAVQNLENEWVKWQAETELAQFSGQLPPHTVIRHIRRFLDSESEAGFLRGGITFCSMVPMRSLPFKVICLLGLNDGDFPRNTKAAVFDLIAKHPAKGDRARRDDDRYLFLEALISAREILYLSYIGRDIRKDEELAPSSLLGELIDTVAAMAGIGSRQLAQNWIEQHPLQAFSRRYFQEGGRSDGIFGTRTDYAAALGQTPEPPQPFFDQSVENAEPVAEIGQDEFIRFWRNPVKVWLQQQLAWSEPHIGEAWEPAEPFEPQHADQIAEIYIEARREGRDFAQTAARIGAESLLPSGELGRLWQQDFQTAAKQIDTAVLNSPKLPPLSYAIPSDGQILKGSLGNLYRCGQVFYAYGKPNAPQRIAFLLEHLIFCAVMPSEAETRQTFIVQSGETEILAEIAQDRALQLLSEWMAFFNIGQNRPLPFFAKTSLAAAEAFAQKQDWEAALKKAQTAYYGNKVSKGQKDYTEVALVFGNASQNPLEQPLFENLARLLADTFAAAEKKEEAGAA

SEQ ID NO: 23497 - protein, 107 aa, Neisseria meningitidis; identical to SEQ ID NO: 875

SEQ ID NO: 23498 - protein, 307 aa, Neisseria meningitidis; identical to SEQ ID NO: 2891

SEQ ID NO: 23499 - protein, 168 aa, Neisseria meningitidis; identical to SEQ ID NO: 5993

SEQ ID NO: 23500 - protein, 796 aa, Neisseria meningitidis
MTEQKHEEYGADSIQVLEGLEAVRKRPGMYIGDTQDGSGLHHMVFEVLDNAIDEALAGHCDKITVTIHADHSVSVADNGRGMPTGIHPKEGRSAAEVIMTVLHAGGKFDNNSYKISGGLHGVGVSVVNALSDWVTLTIYRDGKEHFVRFVRGETEEPLNVVGDSDKKGTTVRFLASTETFGNVEYSFDILAKRIRELSFLNNGVDIELTDERDGKHESFALSGGVAGFVQYMNRKKTPLHEKIFYAFGEKDGMSVECAMQWNDSYQESVQCFTNNIPQRDGGTHLTALRQVMTRTINSYIETNEVAKKAKVETAGDDMREGLTCVLSVKLPDPKFSSQTKDKLVSGEIGPVVNEVISQALTDFLEENPAEAKIITGKIVDAARAREAARKAREITRRKGVMDGLGLPGKLADCQEKDPALSELYLVEGDSAGGSAMQGRDRKFQAILPLKGKILNVEKARFEKMLASQEVAALITALGAGIGKEEFNPEKLRYHRIIIMTDADVDGAHIRTLLLTFFYRQMPELVERGYIYIAQPPLYKAKYGKQERYLKDELEKDQWLLGLALEKAKIVSDGRTIEGSELADTAKQFLLAKTVIEQESRIIDELVLHAMLHASPVDLSTAESADRSVAELNGLLDEKEVALERIEGHEGHQFIKITRKLHGNVVVSYLEPKFLNSKAYQTLTQTAAALKGMVGKGAKLYKGDNEYDIDSFEGALDILMSVAQKGMSIQRYKGLGEMNPEQLWETTMDPAVRRLLKVRIEDAIAADEVFVTLMGDEVEPRRAFIENNALIAQNIDA

SEQ ID NO: 23501 - protein, 526 aa, Neisseria meningitidis
MSVIKRALISLSDKAGAVEFAQTLTKLGVEILSTGGTAKLLADAGVPVIEVADYTGFPEMLDGRVKTLHPKIHGGILGRRDLGEHVAKMEEHGIGNIDLVCVNLYPFAATIAKPNCTLEDAIENIDIGGPTMVRSAAKNWKHVAIVTDTADFPAIAAELEANNGALSDKTRFNLSRKAFSHTAQYDGMISNYLTSLSDDILSGTPEIGEFPSQFNQSWIKVQDMRYGENPHQRAAFYRDIDPAAGSLSAYKQLQGKELSYNNIADADAAWEAVKSFDAPACVIVKHANPCGVAVAADTLTAYKLAYVTDTTSAFGGIIAFNREVDGETVKQITDNQFMEVLMAPKFTAEALEIAAAKKNVRVLEVPLEAGANRFELKRVGGGLLVQTPDICRISRADLKVVSKRQPTEQEWNDLLFVWNVAKYVKSNAIVFGKGGQTYGIGAGQMSRVDSTRITARKAQDANFDLNGACAASDAFFPFRDGVDVIAEQGIKAIIHPAGSMRDQEVFDAADEHGIAMVVTGIRHFRH

SEQ ID NO: 23502 - protein, 205 aa, Neisseria meningitidis; identical to SEQ ID NO: 6895

SEQ ID NO: 23503 - protein, 344 aa, Neisseria meningitidis
MSLPAMDAGIYLEETAPRALIEHNNILDNSVGVYLHGSADAMVRENKIVGDATLRVNERGNGVTVWNAPGAQVVGNDISKGRDGIFSNTSTHNTYKNNRFSDLRFAVHYMYTNDSEISGNISVGNNMGYVLMFSERLKVFDNIAVGSRDQGIMLNYVNYSDIHDNIINKAGKCVFAYNANYDKLSANHFENCQIGIHFTAAIEGTSLHDNSFINNESQVKYVSTRFLDWSEGGHGNYWSDNSAFDLNGDGFGDSAYRPNGIIDQIIWRAPVSRLLMNSPAISIVKWAQAQFPAVLPGGVVDSKPLMKPYAPKIQTRYQAMKDELLKEVETRQSEWGRAENGSLN

SEQ ID NO: 23504 - protein, 1139 aa, Neisseria meningitidis; identical to SEQ ID NO: 6379

SEQ ID NO: 23505 - protein, 407 aa, Neisseria meningitidis
MSGNASSPSSSSAIGLIWFGAAVSIAEISTGTLLAPLGWQRGLAALLLGHAVGGALFFAAAYIGALTGRSSMESVRLSFGKRGSVLFSVANMLQLAGWTAVMIYAGATVSSALGKVLWDGESFVWWALANGALIVLWLVFGARKTGGLKTVSMLLMLLAVLWLSAEVFSTAGSTAAQVSDGMSFGTAVELSAVMPLSWLPLAADYTRHARRPFAATLTATLAYTLTGCWMYALGLAAALFTGETDVAKILLGAGLGAAGILAVVLSTVTTTFLDAYSAGVSANNISAKLSETPIAVAVAVVGTLLAVLLPVTEYENFLLLIGSVFAPMAAVLIADFFVLKRREEIEGFDFAGLVLWLAGFILYRFLLSSGWESSIGLTAPVMSAVAIATVLVRLFFKKTQSLQRNPS

SEQ ID NO: 23506 - protein, 190 aa, Neisseria meningitidis; identical to SEQ ID NO: 8959

SEQ ID NO: 23507 - protein, 220 aa, Neisseria meningitidis; identical to SEQ ID NO: 17186

SEQ ID NO: 23508 - protein, 254 aa, Neisseria meningitidis
MCSCLVVKNTVIGSGRTKIAVPLVARDAAVLSAVLDQIKNLPFDIVEFRADFLECAGSIGEVLRHTQTVRDALPDKPLLFTFRRHGEGGAFPCSDGYYFELLDALIESRLPDIIDIELFAGETAVRRAVADAQKNGIAALLCNHEFHRTPPQEEIVCRLKQMEDCGADICKIAVMPQSAEDVLTLLSATLEAKRLAAKPVVTMSMGQTGAVSRLAGQVFGSSITFGSGTQNSAPGQIGVSALRAALDCLESGAD

SEQ ID NO: 23509 - protein, 244 aa, Neisseria meningitidis; identical to SEQ ID NO: 1321

SEQ ID NO: 23510 - protein, 249 aa, Neisseria meningitidis; identical to SEQ ID NO: 7278

SEQ ID NO: 23511 - protein, 793 aa, Neisseria meningitidis
LFDHRNQGIRTATGWVSADDGLLVRDLNGNGIIDNGTELFGDNTKLADGSFAKHGYAALAELDSNGDNIINAADAAFQTLRVWQDLNQDGISQTNELRTLEELGIQSLDLAYKDVNKNLGNGNTLAQQGSYTKTDGTTAKMGDLLLAADNLHSRFKDKVELTAEQAKAANLAGIGRLRDLREAAALSGDLANMLKAYSAAETKEAQLALLDNLIHKWAETDSNWGKKSPMRLSTDWTQTANEGIALTPSQVAQLKKNALVSLSDKAKAAIDAARDRIAVLDAYTGQDSNTLYYMSEEDALNIVKVTNDTYDHLAKNIYQNLLFQTRLQPYLNQISFKMENDTFTLDFSGLVQAFNHVKETNPQKAFVDLAEMLAYGELRSWYEGRRLMADYVEEAKKAGKFEDYQKVLGQETVALLAKTSGTQADDILQNVGFGHNKNVSLYGNDGNDTLIGGAGNDYLEGGSGSDTYVFGKGFGQDTVYNYDYATGRKDIIRFTDGITADMLTFTREGNHLLIKAKDDSGQVTVQSYFQNDGSGAYRIDEIHFDNGKVLDVATVKELVQQSTDGSDRLYAYQSGNTLNGGLGDDYLYGADGDDLLNGDAGNDSIYSGNGNDTLNGGEGNDALYGYNGNDVLNGGEGNDHLNGEDGNDTLIGGAGNDYLEGGSGSDTYVFGKGFGQDTVYNYHVDKNSDTMHFKGFKAADVHFIRSGSDLVLSASEQDNVRISGFFYGENHRVDTFVFDDAAISNPDFAKYINAGNNLVQSMSVFGSNTAATGGNVDANTQSVQQPLLVTPSA

SEQ ID NO: 23512 - protein, 122 aa, Neisseria meningitidis; identical to SEQ ID NO: 2373

SEQ ID NO: 23513 - protein, 503 aa, Neisseria meningitidis
MSEQNHPQTEPQLDENQIIALRREKLHNIRQQRNAYPNDFKRDSFAADLHAQYGEIGKEELDPQGIPVKVAGRMMLKRQMGKASFATIQDVSGQIQLYLNNKGVSQEVLDDFNHWDLGDIVGAEGTLFKTNHGELTVRVSGIRLLSKSLRPLPDKHKGLSDQETKYRQRYVDLIANEESRNTFIKRSQIIQSVRNFMVGEHYLEVETPMMHPIPGGATAKPFVTHHNALDIPLYLRIAPELYLKRLVVGGLERVFEINRSFRNEGMSVRHNPEFTMIEFYEAFSDYERMMQMAEDIIRNASRTVNGTANITYNGKEVDLESPFERLTILEAIKKYNPHYTDEQLNDTEWLKKEIVKHGESLPPSPGIGSLQLALFEGCAEGKLWNPTFIVDYPVEVSPLARASDTKQGLTERFELFVVGRELANGYSELNDPEDQAERFKAQVAQKDAGDDEAMHYDADYIRAMEFGLPPTGGCGIGIDRLVMLLTDSQTIRDVILFPQMRPE

SEQ ID NO: 23514 - protein, 587 aa, Neisseria meningitidis; identical to SEQ ID NO: 14678

SEQ ID NO: 23515 - protein, 236 aa, Neisseria meningitidis
MNAAIEHVQAVAFDLDGTLCDSVPDLAAAAEAMLEQLGMKPLPAKVVESYVGDGIGKLVHRVLSNDRDREADSELWEKGFVSYMKYYRDHLSVFTRPYPETEAGLALLKSLGIPLAVITNKNEILAAELLKQLGLADYFSLILGGDSLPEKKPSPLPLRHAAEVLGIDVANMVMVGDSRNDIIAAKAAGCLSVGVTFGYGDMTLLSQDDATRPDWIIGSLPEIYENLQPQKNKDEE

SEQ ID NO: 23516 - protein, 306 aa, Neisseria meningitidis; identical to SEQ ID NO: 14090

SEQ ID NO: 23517 - protein, 377 aa, Neisseria meningitidis; identical to SEQ ID NO: 7656

SEQ ID NO: 23518 - protein, 945 aa, Neisseria meningitidis
MLDKYNPAEIESKHYQNWEEQGYFQPDMDLTKPSFSIQLPPPNVTGTLHMGHAFNQTIMDGLTRYYRMKGCNTAWIPGTDHAGIATQIVVERQLAAQNVSRHDLGREKFLEKVWEWKEVSGGTITQQMRRVGCSADWTREYFTMDDVRAETVTEVFVRLYEQGLIYRGKRLVNWDPVLGTAVSDLEVESVEEQGSMWHIRYPLADNPAEAVIVATTRPETLLGDVAVAVNPEDERYTHLIGKELILPLTGRTIPVIVDEYVEKDFGTGCVKITPAHDFNDYEVGKRHDTRLINVFDLEAKVLANAEVFNFKGEAQPGFALPEKYAGLDRFAARKQMVADLQEQGLLVEIKPHTLMTPKGDRTGSVIEPMLTSQWFVAMSATPNGGEPDSEFKGLSLADKAKKAVDSGAVRFIPENWVNTYNQWMNNIQDWCISRQLWWGHQIPAWYDETGNVYVARNQAEAEKQAGKTGLTREEDVLDTWFSSALVPFSTLGWPSETDELKAFLPSNVLVTGYEIIFFWVARMIMMTTHFTGKVPFKDVYIHGIVRDHEGKKMSKSEGNVIDPVDLIDGIGLDKLLVKRTTGLRKPETAPKVEEASRKLFPEGIPSMGADALRFTMASYASLGRSVNFDFKRAEGYRNFCNKIWNATNFVLMNTENQDCGYGATATEPRGYSFPDMWIVDRLNQTIEQVTQAYETYRFDLAAETLYSFMWNDYCDWYLELAKVQLQTGCASRQRATRHTLLRVLEAALRLLHPIIPFITEELWQTVAPMCDAKTADSVMLARFPEADSGEIVQTAFEQMTVLQDLIGAVRNLRGEMGIQPNVKAPLFVESTDDLADYLKYLPMMTRLTEAQQVATLPESEDAPVAVCNGARLMLKVEIDKAAETARLGKEAEKLQKALDKLNAKLSKPGYTEKAPAHLVEKDKADLAELEDKMAKVQTQLAKLKD

SEQ ID NO: 23519 - protein, 383 aa, Neisseria meningitidis
MQTWQLPEHIADVLPTNARQLESAREQLLALFRVHGYELVQPPLMEYAHSLLTHIDAGLSLKTILVTDRLSGRQLGIRADITPQVARIDAHLLSANQGINRLCYAGPVLHAQSDGLLNMREPLQAGAEMYGFADIRGDIELIDLMLKSMKIADMGKVLLSLGHIGIFRALSDAAHLDAGQSATLLALMQDKDTETVEAQVKAWKLDGMWAKAFSLLPRLYGGREVLSDARGRLPDLSAVGGALGELQAVCDAFPDCEIHIDLSELRVDNYHTGLLYAAYAADFHDAVARGGRYDGLGGYFGRARPATGFSFDLRSFIGRLPAIERQPAVLVDAEDAEAAHEAVEALREQGQCVVIDYGIGHNVSEELAGRLKKTDGVWQVVKR

SEQ ID NO: 23520 - protein, 318 aa, Neisseria meningitidis; identical to SEQ ID NO: 19132

SEQ ID NO: 23521 - protein, 188 aa, Neisseria meningitidis
LLLPFATLALCTNAFAAPPSDASLARWLDTQNFDRDIEKNMIEGFNAGFKPYADKALAEMPEAKKDQAAKAFNRYRENVLKDLITPEVKQAVRNTLLKNAREIYTQEEIDGMIAFYGSPVGQSVVAKNPRLIKKSMSEIAVSWTALSGKIARHHLPAFTEELRRIICGGKNPDAGCKQAGQVGKRHQK

SEQ ID NO: 23522 - protein, 284 aa, Neisseria meningitidis
MSAQLINGKEVSQKRLQAVAEAVAQRQQDNLHTPCLAVVLVGGDPASAVYVRNKKTACQKCGIKSLSYELPESTSQEELLALVDRLNADSEVDGILVQLPLPKHLDSQAVLERISPDKDVDGFHPYNVGRLAVKMPLMRPCTPKGVMTLLEAYGIDPKGKKAVVVGASNIVGRPQALELLLARATVTVCHSATENLADEVAGADILVVGVGIPNFVKGEWIKPGAVVIDVGINRLDDGSLCGDVEFETAKERAAMITPVPGGVGPMTIATLMENTLHAASLHDA

SEQ ID NO: 23523 - protein, 194 aa, Neisseria meningitidis; identical to SEQ ID NO: 17059

SEQ ID NO: 23524 - protein, 522 aa, Neisseria meningitidis; identical to SEQ ID NO: 17099

SEQ ID NO: 23525 - protein, 140 aa, Neisseria meningitidis; identical to SEQ ID NO: 2533

SEQ ID NO: 23526 - protein, 658 aa, Neisseria meningitidis; identical to SEQ ID NO: 7626

SEQ ID NO: 23527 - protein, 103 aa, Neisseria meningitidis; identical to SEQ ID NO: 1278

SEQ ID NO: 23528 - protein, 163 aa, Neisseria meningitidis; identical to SEQ ID NO: 2563

SEQ ID NO: 23529 - protein, 66 aa, Neisseria meningitidis
  misc_feature 60, 61: 'Xaa' is any amino acid
MKKSLIALCVAHCAKLKNDFGVPPLPEIKITPSPVRVGSLKQHPSLRLGKSGVAAAKRAXXTHLIN

SEQ ID NO: 23530 - protein, 141 aa, Neisseria meningitidis; identical to SEQ ID NO: 7

SEQ ID NO: 23531 - protein, 160 aa, Neisseria meningitidis; identical to SEQ ID NO: 15318

SEQ ID NO: 23532 - protein, 92 aa, Neisseria meningitidis; identical to SEQ ID NO: 510

SEQ ID NO: 23533 - protein, 295 aa, Neisseria meningitidis; identical to SEQ ID NO: 7411

SEQ ID NO: 23534 - protein, 506 aa, Neisseria meningitidis
MQLIDYSHSFFSVVPPFLALALAVITRRVLLSLGIGILVGVAFLVGGNPVDGLTHLKDMVVGLAWSDGDWSLGKPKILVFLILLGIFTSLLTYSGSNQAFADWAKRHIKNRRGAKMLTACLVFVTFIDDYFHSLAVGAIARPVTDKFKVSRAKLAYILDSTAAPMCVLMPVSSWGASIIATLAGLLVTYKITEYTPMGTFVAMSLMNYYALFALIMVFVVAWFSFDIGSMARFEQAALNEAHDETAVSDGSWGRVYALIIPVLALIASTVSAMIYTGAQASETFSILGAFENTDVNTSLVFGGTCGVLAVVLCTLGTIKTADYPKAVWQGAKSMFGAIAILILAWLISTVVGEMHTGDYLSTLVAGNIHPGFLPVILFLLASVMAFATGTSWGTFGIMLPIAAAMAVKVDPSLIIPCMSPVMAGAVCGDHCSPISDTTILSSTGARCNHIDHVTSQLPYALTVAAAAASGYLALGLTKSALLGFGTTGIVLAVLIFLLKDKKRANA

SEQ ID NO: 23535 - protein, 215 aa, Neisseria meningitidis; identical to SEQ ID NO: 1509

SEQ ID NO: 23536 - protein, 177 aa, Neisseria meningitidis; identical to SEQ ID NO: 15695

SEQ ID NO: 23537 - protein, 262 aa, Neisseria meningitidis; identical to SEQ ID NO: 14182

SEQ ID NO: 23538 - protein, 1277 aa, Neisseria meningitidis
MTTTTAPQRIREIPYNYTSYTDREIVIRLLGNEAWQILQDLRGQRKTGRSARMLFEVLGDIWVVVRNPYLVDDLLEHPKRRAALIREMRHRLNEIRKRRDDNRQVDVLVAAAEKAVERFDSSFDETSQKRRQILERLSKITKPHNIMFDGLARVTHVTDATDWRVEYPFVVVNPDTEAEIAPLVRALIELDLVIIPRGGGTGYTGGAIPLDAMSAVINTEKLDKHNGVEFVELAGLDGKHPIIHCGAGVVTRRVEETAHQAGLVFAVDPTSADASCVGGNVAMNAGGKKAVLWGTALDNLAYWQMVNPQGEWLRIERVRHNFGKIHDEETAVFDVHTLDSDGLNIVKTERLEIPGHKFRKVGLGKDVTDKFLSGLPGVQKEGTDGIITGVAFVLHKMPKYTRTVCMEFFGTVATATPSIVEIRDFLLAHDSVRLAGLEHLDWRYVRAVGYATKAAGKGRPKMVLLADVVSDDEAAVEAAAEHICELARARDGEGFIAVSPEARKTFWLDRSRTAAIAKHTNAFKINEDVVIPLERLGEYSDGIERINIELSIQNKLKLCAALEQYLSGKLPIDKMGTDLPTAELLGERGKHALAHVSAVKTRWEWLLANLDTPLADYKARYGAAVHAAPEAKNNESCFIAFRDFRLRVSVKADVMKPLAEIFSGKTDTKIIQGLGKIHAKTVRSRVFVALHMHAGDGNVHTNIPVNSDDADMLQTAYRSVERIMKIARSLGGVISGEHGIGITKLEFLTDEDLQPFWNYKNQVDPKHTFNRHKLMKGSDLSNAYTPSFELLGAESLIMEKSDLGTIADSVKDCLRCGKCKPVCSTHVPRANLLYSPRNKILGVGLLTEAFLYEEQTRRGVSVKHFEELMDIGDHCTVCHRCVKPCPVNIDFGDVTVAVRNYLADSGHKRFAPAASMGMAFLNATGPKTIKALRAAMIQTGFPAQNFAYKIGKLLPIGTKKQKAEPKATVGKAPIKEQVIHFINRPLPKNVPAKTPRSLLGIEDGKSIPIIRNPASPEDAEAVFYFPGCGSERLFSQIGLAVQAMLWHVGVQTVLPPGYMCCGYPQDAGGNKAKAEEMSTNNRVAFHRMANTLNYLDIKTVVVSCGTCYDQLEKYRFEEIFPGCRIIDIHEYLLEKGVKLDGVKGQQYLYHDPCHTPIKTMNATQMASSLMGQKVVLSDRCCGESGMFAVKRPDIATQVKFRKQEEIEKNLKELPQGEPVKMLTSCPACLQGLSRYADDNNMPADYIVIEMAKYILGENWLDEFVKKANNGGVEKVLL

SEQ ID NO: 23539 - protein, 352 aa, Neisseria meningitidis; identical to SEQ ID NO: 14595

SEQ ID NO: 23540 - protein, 215 aa, Neisseria meningitidis; identical to SEQ ID NO: 1514

SEQ ID NO: 23541 - protein, 90 aa, Neisseria meningitidis; identical to SEQ ID NO: 7650

SEQ ID NO: 23542 - protein, 300 aa, Neisseria meningitidis; identical to SEQ ID NO: 2153

SEQ ID NO: 23543 - protein, 338 aa, Neisseria meningitidis
MYRKLIALPFALLLAACGREEPPKALECANPAVLQGIRGNIQETLTQEARSFAREDGRQFVDADKIIAAAYGLAFSLEHASETQEGGRTFCIADLNITVPSETLADAKANSPLLYGETALSDIVRQKTGGNVEFKDGVLTAAVRFLPVKDGQTAFVDNTVGMAAQTLSVALLPYGVKSIVMIDGKAVKKEDAVRILSGKAREEEPSKPTPEDILEHNAAASDADVPQAAEGAPEPEILHPDDGERADTVTVSRGEVEEARVQNQRAESEITKLWGGLDTDVQKELVGEQRKWAQEKISNCRQAAAQADRQEYAEYLKLQCDTRMTRERIQYLRGYSID

SEQ ID NO: 23544 - protein, 591 aa, Neisseria meningitidis; identical to SEQ ID NO: 7516

SEQ ID NO: 23545 - protein, 887 aa, Neisseria meningitidis; identical to SEQ ID NO: 15395

SEQ ID NO: 23546 - protein, 146 aa, Neisseria meningitidis; identical to SEQ ID NO: 6802

SEQ ID NO: 23547 - protein, 287 aa, Neisseria meningitidis
MKTLLPFFGVVRVSGEDRQTFLHGQLSNDINHLQTGQACYATYNTPKGRVIANMIVVNRGGDLLLIMAQDLLEATVKRLRMFVLRAKAVFEILEDYAVGAELEASAEPLAAQEPSLAFTAECGSDGICSVVLPHRGILHIAPKNALPPYDAAAENAWRLHEIRSGYPWICAATKETAVAQMLNQHIIGGVHFKKGCYPGQEIIARAQYRGQVKRGLAVLSGNSAVEAGTLLTADGEEAGIVLDSVQDSENFTALTVIKFSAAQKTLTVPNGGIFKAVHLFFKTENAE

SEQ ID NO: 23548 - protein, 426 aa, Neisseria meningitidis; identical to SEQ ID NO: 13250

SEQ ID NO: 23549 - protein, 78 aa, Neisseria meningitidis
MKKSLFAAALLSLVLAACGGEKAAEAPATEAPAAEAPATEAPAAEAPTAEAAATEAPAAEAAASEAPAAEAPAAEAAK

SEQ ID NO: 23550 - protein, 199 aa, Neisseria meningitidis
MALKTSNLEHAMLVHPEAMSVGALADKIRKIENWPQKGILFHDITPVLQSAEYFRLLVDLLVYRYMDQKIDIVAGLDARGFIIGAALAYQLNVGFVPIRKKGKLPFETVSQSYALEYGEAAVEIHTDAVKLGSRVLLVDDLVATGGTMLAGLELIRKLGGEIVEAAAILEFTDLQGGKNIRASGAPLFTLLQNEGCMKG

SEQ ID NO: 23551 - protein, 187 aa, Neisseria meningitidis
MRHLENNGYANVAGLERILAVKTDNYKEKENLLHEIFSKSRIGDTELFAVDENLVKRLFLSLRGEIVFPKNETAESEFEKSVHERRQEGNAGSGRKQLLDLVRRGHREYPYALPRLLAGAASYKPKKSKIRLFKEAYFGKSGTRLTDEIADGIHIYTCFSRADLEKAYSEYLEFFKSESDAEGRKPR

SEQ ID NO: 23552 - protein, 126 aa, Neisseria meningitidis
MENRFKKIVKDIFSFAQFVSEAENKIPNQSSRYYDCWWELEVLNASALEDWEISGKPKKWEKWTEKYQTEALQLVKNLFAEEVPENNIVCDISHFLHFADWAEADIPNQSRSYAEYWWEMERSISI

SEQ ID NO: 23553 - protein, 949 aa, Neisseria meningitidis
MCNHRPQHSHDNDTIRIRGARTHNLKNIDLDIPRHKLVVVTGLSGSGKSSLAFDTLYAEGQRRYVESLSAYARQFLQMMDKPDVDLIEGLSPAISIEQKSTSHNPRSTVGTVTEIHDYLRLLYARVGTPYCPEHNLPLSSQTVSQMVDAVLKLPEDTRVMILAPAVRERKGEFVDFFADLQAQGFARVCVDGEVYQLDEVPKLEKNIKHNIDVVIDRVKVKADIKQRLAESFETALRHGNERALAMEMESGEEHWFSARFACPVCSYSLPELEPRLFSFNNPMGSCPTCDGLGNTNFFDPEKVVAHPELSLATGAIDGWDKRNQFYFQMIQSLARHYGFDVQAAWETLPEKVKKVVLHGSGKEVIDFTYLSERGTTFNRSHAFEGIIPNLERRYRETDSETVREKLREYQNHRACPSCGGARLRKEARYVYVSGEPLHEVSAWPLTKTHQFFETLDLDGNKKQIAEKILKEITERLGFLINVGLDYLNLSRSAETLSGGEAQRIRLASQIGSGLTGVMYVLDEPSIGLHQRDNDRLLATLKRLRDLGNSVIVVEHDEDAIREADFVVDMGPGAGEHGGNVLIADTPENVAQCENSVTGQYLSGKKSIAVPSERTPVNPDRMLVLKGARGNNLKNVTLELPLGLITCITGVSGSGKSTLINDTLAKITARELNRAQEEPAPYDDIRGLEHLDKVINVDQSPIGRTPRSNPATYTGLFTPIRELFAGIPLSRERGYNVGRFSFNVKGGRCEACQGDGVIKVEMHFLPDVYVPCEVCHGKRYNRETLEIQYKGKNISQVLDMTVEEAREFFDAVPTVSRKLQTLMDVGLGYIRLGQSATTLSGGEAQRVKLALELSKRDTGRTLYILDEPTTGLHFADIALLLEVIGRLKGKGNSIVIIEHNLDVIKTADWIVDLGPEGGDGGGRIIAKGSPEQVAKVKGSYTGKYLKVVLR

SEQ ID NO: 23554 - protein, 213 aa, Neisseria meningitidis; identical to SEQ ID NO: 1951

SEQ ID NO: 23555 - protein, 74 aa, Neisseria meningitidis
LVFWLQRLKYPLLLCIADMLLYRLLGGAEIECGRCPVPPMTDWQHFLLAMGTVSAWVAVIWAYLIIESEKNGRY

SEQ ID NO: 23556 - protein, 77 aa, Neisseria meningitidis
MNRRKIYLLSVALFTLAFMLLVLLGAYLLTVGNKAFAVASFLFAFGALFGQIGALALYLRHKSLHAAQSATKENRYV

SEQ ID NO: 23557 - protein, 333 aa, Neisseria meningitidis
MQFPYRNVPASRMRRMRRDDFSRRLMREHTLTADDLIYPVFVLEGSAREEDVPSMPGVKRQSLDRLLFTAEEASNLGIPMLALFPVVTTNKTECAQEAYNPEGLVPTAVRALRERFPELGIMTDVALDPYTVHGQDGLTDENGYVMNDETVEVLVKQALCHAEAGAQVVAPSDMMDGRIGAIREALEDTGHIHTRIMAYSAKYASAFYGPFRDAVGSSGNLGKADKKTYQMDPANTDEALNEVALDIREGADMVMVKPGLPYLDVVRRVKDEFGVPTYAYQVSGEYAMLQAAIANGWLDGGKVVLESLLAFKRAGADGILTYYAIEAAKMLKR

SEQ ID NO: 23558 - protein, 273 aa, Neisseria meningitidis; identical to SEQ ID NO: 14267

SEQ ID NO: 23559 - protein, 116 aa, Neisseria meningitidis; identical to SEQ ID NO: 5541

SEQ ID NO: 23560 - protein, 55 aa, Neisseria meningitidis; identical to SEQ ID NO: 1257

SEQ ID NO: 23561 - protein, 125 aa, Neisseria meningitidis; identical to SEQ ID NO: 17297

SEQ ID NO: 23562 - protein, 358 aa, Neisseria meningitidis; identical to SEQ ID NO: 96

SEQ ID NO: 23563 - protein, 251 aa, Neisseria meningitidis; identical to SEQ ID NO: 19490

SEQ ID NO: 23564 - protein, 470 aa, Neisseria meningitidis; identical to SEQ ID NO: 2364

SEQ ID NO: 23565 - protein, 67 aa, Neisseria meningitidis; identical to SEQ ID NO: 86

SEQ ID NO: 23566 - protein, 199 aa, Neisseria meningitidis; identical to SEQ ID NO: 2043

SEQ ID NO: 23567 - protein, 404 aa, Neisseria meningitidis; identical to SEQ ID NO: 22575

SEQ ID NO: 23568 - protein, 283 aa, Neisseria meningitidis; identical to SEQ ID NO: 14636

SEQ ID NO: 23569 - protein, 193 aa, Neisseria meningitidis; identical to SEQ ID NO: 3067

SEQ ID NO: 23570 - protein, 82 aa, Neisseria meningitidis
  misc_feature 76, 77: 'Xaa' is any amino acid
MAKEKFERSKPHVNVGTIGHVDHGKTTLTAALTTILAKKFGGAAKAYDQIDNAPEEKARGITINTSHVEYETETRXXTHLIN

SEQ ID NO: 23571 - protein, 67 aa, Neisseria meningitidis; identical to SEQ ID NO: 6237

SEQ ID NO: 23572 - protein, 52 aa, Neisseria meningitidis; identical to SEQ ID NO: 7703

SEQ ID NO: 23573 - protein, 100 aa, Neisseria meningitidis; identical to SEQ ID NO: 1023

SEQ ID NO: 23574 - protein, 480 aa, Neisseria meningitidis
MHPTYSAVQARLLEANRLSPELLAKSLCIIGAHHVDYADIYCQRTAYESWHLEEGIVKSGSFQINQGVGVRAVSGDKTAFAYADSLCIDSINRSARAVRAIGAAGGKVSAKMPSETRGKPVCSASDPIAGLDSAAKVALLNKVEAIAKAADPRIVQVMAGLTCEYDMVYLARLDGKHAADIRPMVRLNVTVIAKQGERREQGSAGGGGRYDLAYFDENLVRQFVDAAVKQALTNLESRPAPAGEMTVVLGNGWPGVLLHEAVGHGLEGDFNRKGTSVFSGRIGERVAAKGVTVVDQGDIAGRRGSLNIDDEGNETRRTVLIEDGILVGYMQDETNARLTGTQSTGNGRRESYASAPMPRMTNTFMENGSYEPEEIIASIDKGIYAVNFGGGQVDITSGKFVFSASEAWWVEGGRLQYPVKGATIIGNGPEVLKHVSMIGNDTALDSGVGVCGKEGQSVPVGVGQPTLRIDAGLTVGGSAI

SEQ ID NO: 23575 - protein, 145 aa, Neisseria meningitidis; identical to SEQ ID NO: 2729

SEQ ID NO: 23576 - protein, 85 aa, Neisseria meningitidis; identical to SEQ ID NO: 4382

SEQ ID NO: 23577 - protein, 463 aa, Neisseria meningitidis; identical to SEQ ID NO: 736

SEQ ID NO: 23578 - protein, 381 aa, Neisseria meningitidis; identical to SEQ ID NO: 15574

SEQ ID NO: 23579 - protein, 133 aa, Neisseria meningitidis; identical to SEQ ID NO: 2967

SEQ ID NO: 23580 - protein, 218 aa, Neisseria meningitidis
MNRQKVIAIDGPGASGKGTVAARVAAALGYDYLDTGALYRLTALYAQKQGVEWHDEENVSALAEKLPAVFSGSRILLDGEDVSDGIRTEAIGMGASAVAQLPKVRAALLQRQRDFLTEKGLVADGRDTGSVVFPQAELKIFLTAESKIRAERRAKQIGIPCEGLAFERILSDIEARDEADRNRKVAPLKQQPDALLLDTSRLTIEETVKKVLDWYRKV

SEQ ID NO: 23581 - protein, 449 aa, Neisseria meningitidis; identical to SEQ ID NO: 481

SEQ ID NO: 23582 - protein, 160 aa, Neisseria meningitidis; identical to SEQ ID NO: 4185

SEQ ID NO: 23583 - protein, 69 aa, Neisseria meningitidis; identical to SEQ ID NO: 5143

SEQ ID NO: 23584 - protein, 207 aa, Neisseria meningitidis; identical to SEQ ID NO: 6666

SEQ ID NO: 23585 - protein, 53 aa, Neisseria meningitidis; identical to SEQ ID NO: 14789

SEQ ID NO: 23586 - protein, 304 aa, Neisseria meningitidis; identical to SEQ ID NO: 4332

SEQ ID NO: 23587 - protein, 212 aa, Neisseria meningitidis; identical to SEQ ID NO: 14128

SEQ ID NO: 23588 - protein, 473 aa, Neisseria meningitidis; identical to SEQ ID NO: 6909

SEQ ID NO: 23589 - protein, 525 aa, Neisseria meningitidis
MRANPKTQAMPSETISLMKTRSLISLLCLLLCSCSSWLPPLEERTESRHFNTSKPVRLDNILQIRHTPHTNGLSDIYLLNDPHEAFAARAALIESAEHSLDLQYYIWRNDISGRLLFNLMYLAAERGVRVRLLLDDNNTRGLDDLLLALDSHPNIEVRLFNPFVLRKWRALGYLTDFPRLNRRMHNKSFTADNRATILGGRNIGDEYFKVGEDTVFADLDILATGSVVGEVSHDFDRYWASHSAHNATRIIRSGNIGKGLQALGYNDETSRHALLRYRETVEQSPLYQKIQTGRIDWQSVQTRLISDDPAKGLDRDRRKPPIAVRLQDALKQPEKSVYLVSPYFVPTKSGTDALAKLVQDGIDVTVLTNSLQATDVAAVHSGYVKYRKPLLKAGIKLYELQPNHAVPATKDKGLTGSSVTSLHAKTFIVDGKRIFIGSFNLDPRSARLNTEMGVVIESPKIAEQMERTLADTTPEYAYRVTLDRHNRLQWHDPATRKTYPNEPEAKLWKRIAAKILSLLPIESLL

SEQ ID NO: 23590 - protein, 227 aa, Neisseria meningitidis
MQHDVYDYTAHTVSKNTVLQKTYRLLGFSFIPAAAGAALAANAGFNFYAAFGSRWIGFAVVLAFFYGMIHFIEKNRYSNTGVALLMVFTFGMGVLIGPVLQYALHIADGAKIVGIAAAMTAAVFLTMSALARRTRLDMNALGRFLTVGAVILMVAVVANLFLGIPALALTISAGFVLFSSLMIMWQVRTVIDGGEDSHISAALTLFISLYNIFSSLLNILLSLNGED

SEQ ID NO: 23591 - protein, 1389 aa, Neisseria meningitidis
MTDTAPTDTDPTENGTRKMPSEHRPTPPAKKRRPLLKLSAALLSVLILAVCFLGWLAGTEAGLRFGLYQIPSWFGVNISSQNLKGTLLDGFDGDNWSIETEGADLKISRFRFAWKPSELMRRSLHITEISAGDIAIVTKPTPPKEERPPLSLPDSIDLPAAVYLERFETGKISVGKTFDKQTVYLERLNAAYRYDRKGHRLDLKAADTPWSSSSGSASVGLKKPFALDTAIYTKGGLEGKTIHSTARLSGSLKDVRAELAIDGGNIRLSGKSVIHPFAESLDKTLEEVLVKGFNINPAAFVPSLPDAGLNFDLTAIPSFSDGIALEGSLDLENTKAGFADRNGIPVRQVLGGFVIRQDGTVHIGNTSAALLGRGGIRLSGKIDTEKDILDLNIGINSVGAEDVLQTAFKGRLDGSIGIGGTTASPKISWQLGIGTARTDGSLAIASDPANGQRKLVLDTVNIAAGQGSLTAQGYLELFKDRLLKLDIRSRAFDPSRINPQLPAGNINGSINLAGELAKEKFTGKMRFLPGTFNGVPIAGSADIVYESRHLPRAAVDLRLGRNIIKTDGGFGKKGDRLNLNITAPDLSRFGFGLAGSLNVRGHLSGDLDGGIRTFETDLSGAARNLHIGKAADIRSLDFTLKGSPDTSRPIRADIKGSRLSLSGGAAVVDTADLMLDGTGVQHRIRTHAAMTLDGKPFKFDLDASGGINRELTLWKGSIGILDIGGAFNLKLQNRMTLEAGAERVAASAANWQAMGGSLNLQHFSWDKKTGISAKGGAHGLHIAELHNFFKPPFEHNLVLNGDWDVAYGRNARGYLNISRQSGDAVLPGGQALGLNAFSLKTRFQNDRIGILLDGGARFGRINADLGIANAFGGNMANAPLGGRITASLPDLGALKPFLPAAAQNITGSLNAAAQIGGRVGSPSVNAAVNGSSNYGKINGNITVGQSRSFDTAPLGGRLNLTVADAEVFRNFLPVGQTVKGSLNAAVTLGGSIADPHLGGSINGDKLYYRNQTQGIILDNGSLRSHIAGRKWVIDSLKFRHEGTAELSGTVGMENSGPDVDIGAVFDKYRILSRPNRRLTVSGNTRLRYSPQKGISVTGMIKTDQGLFGSQKSSMPSVGDDVVVLGEVKKEAAAPLPVNMNLTLDLNDGIRFAGYGADVTIGGKLTLTAQSGGSVRGVGTVRVIKGRYKAYGQDLDITKGTVSFVGPLNDPNLNIRAERRLSPVGAGVEILGSLNSPRITLTANEPMSEKDKLSWLILNRAGSGSSGDNAALSAAAGALLAGQINDRIGLVDDLGFTSKRSRNAQTGELNPAEQVLTVGKQLTGKLYIGYEYSISSAEQSVKLIYRLTRAIQAVARIGSRSSGGELTYTIRFDRFSGSDKKDSAGNSKGK

SEQ ID NO: 23592 - protein, 91 aa, Neisseria meningitidis; identical to SEQ ID NO: 4054

SEQ ID NO: 23593 - protein, 528 aa, Neisseria meningitidis; identical to SEQ ID NO: 2150

SEQ ID NO: 23594 - protein, 154 aa, Neisseria meningitidis
MQGNQAVVDYMNELLSGELAARDQYFIHSRLYSEWGYTKLFERLNHEMEEETTHAEDFIRRILMLGGTPKMARAELNIGTDVVSCLKADLQTEYEVRDALKKGIKLCEEAQDYVSRDLMVAQLKDTEEDHAHWLEQQLRLIELIGEGNYYQSQL

SEQ ID NO: 23595 - protein, 498 aa, Neisseria meningitidis
MQVNIQIPYILPRCVRAEDTPYACYLKQLQVTKDVNWNQVQLAYDKWDYKQEGLTGAGAAIIALAVTVVTAGAGAGAALGLNGAAAAATDAAFASLASQASVSLINNKGNIGNTLKELGRSSTVKNLMVAVATAGVADKIGASALNNVSDKQWINNLTVNLANAGSAALINTAVNGGSLKDNLEANILAALVNTAHGEAASKIKQLDQHYIAHKIAHAIAGCAAAAANKGKCQDGAIGAAVGEILGETLLDGRDPGSLNVKDRAKIIAKAKLAAGAVAALSKGDVSTAANAAAVAVENNSLNDIQDRLLSGNYALCMSAGGAESFCESYRPLGLPHFVSVSGEMKLPNKFGNRMVNGKLIINTRNGNVYFSVGKIWSTVKSTKSNISGVSVGWVLNVSPNDYLKEASMNDFRNSNQNKAYAEMISQTLVGESVGGSLCLTRACFSVSSTISKSKSPFKDSKIIGEIGLGSGVAAGVEKTIYIGNIKDIDKFISANIKK

SEQ ID NO: 23596 - protein, 318 aa, Neisseria meningitidis; identical to SEQ ID NO: 6240

SEQ ID NO: 23597 - protein, 233 aa, Neisseria meningitidis
MFRIVKWLIALPVGIFIFFNAYVYGNIITYRAVAPHRTAFMSMRMKQFEQEGRDVALDYRWMPYNRISVNLKKALIASEDARFAGHGGFDWGGIQNAIRRNRNSGKVKAGGSTISQQLAKNLFLNESRSYIRKGEEAAITAMMEAVTDKDRIFELYLNSIEWHYGVFGAEAASRYFYQIPAAKLSKQQAAKLTARVPAPLYYADHPKSKRLRNKTNIVLRRMGSAELPESDTD

SEQ ID NO: 23598 - protein, 140 aa, Neisseria meningitidis; identical to SEQ ID NO: 15194

SEQ ID NO: 23599 - protein, 45 aa, Neisseria meningitidis; identical to SEQ ID NO: 7562

SEQ ID NO: 23600 - protein, 103 aa, Neisseria meningitidis; identical to SEQ ID NO: 2233

SEQ ID NO: 23601 - protein, 354 aa, Neisseria meningitidis; identical to SEQ ID NO: 7427

SEQ ID NO: 23602 - protein, 110 aa, Neisseria meningitidis; identical to SEQ ID NO: 14608

SEQ ID NO: 23603 - protein, 637 aa, Neisseria meningitidis; identical to SEQ ID NO: 15124

SEQ ID NO: 23604 - protein, 812 aa, Neisseria meningitidis
MTEKSHKKTAKGRAGSPSPTSARNKKADNGARGNKVSERLKAVKELQKTETKKARPEHVVNLIGDALWLMGLAATLYLAISLISFDMGDPSWSHSSPVVEDVANWGGLFGAYVADVGYYLFGWSFWWWIAAACVMLYKNFRLHAKQTENEAYNHKIAAAALFVLTVFSPVLEYFVLGGKYADSLPVGAGGMVGIRVGAVFAWLLGKSGSLLIILVVLLLSLSLLVQISWLEFLNGAGRAVQNRLSALSGKVMALGKRRPNSKTDGVDTQNTRRMVKEAKNITAKPVALPEGSSSNRKSVAVSVAPSPKIQVSLFEDDEPRQAGEYHKPTLNLLRIPDSEPVSINPAELERTAELIESKLAEFGIGVQVVSATSGPVITRYEIEPAQGVKGSQIVALSKDLARSMSLQSVRIVETIAGKNTMGIELPNDKRQDVMLSEILSSPVFAGAKSKLTVALGKDIAGIPVVGDLAKMPHLLVAGMTGSGKSVGVNGMIMSMLFKATPDEVRFIMIDPKMLELSIYDGIPHLLCPVVTDMREAGQALNWCVAEMEKRYRLLSHAGVRNLEGFNQKVEAAKAAGKPLLNPFSLTPDSPEPLEKLPMIVVVIDELADLMMTERKAVEQQIARLAQKARAAGIHMIVATQRPSVDVVTGLIKANIPTRMAFTVQSKIDSRTILDQMGADELLKYGDSLFLQPGSAEPTRLQGAFVSDDEVHQVVNYVKSQAPADYIEGLLSGEAALETANIVNPNADSDELFDQAVAYVLESKKTSISSLQRQLRIGYNRAANLMEALENAGVVSPADLNGSRKILAHKDHL

SEQ ID NO: 23605 - protein, 544 aa, Neisseria meningitidis
MAAKDVQFGNEVRQKMVNGVNILANAVRVTLGPKGRNVVVDRAFGGPHITKDGVTVAKEIELKDKFENMGAQMVKEVASKTNDVAGDGTTTATVLAQSIVAEGMKYVTAGMNPTDLKRGIDKAVAALVEELKNIAKPCDTSKEIAQVGSISANSDEQVGAIIAEAMEKVGKEGVITVEDGKSLENELDVVEGMQFDRGYLSPYFINDAEKQIAALDNPFVLLFDKKISNIRDLLPVLEQVAKASRPLLIIAEDVEGEALATLVVNNIRGILKTVAVKAPGFGDRRKAMLQDIAILTGGQVISEEVGLSLEKATLEDLGQAKRIEIGKENTTIIDGFGDAAQIEGRVAEIRQQIEVATSDYDREKLQERVAKLAGGVAVIKVGAATEVEMKEKKDRVEDALHATRAAVEEGVVAGGGVALLRARAALENLHTGNADQDAGVQIVLRAVESPLRQIVANAGGEPSVVVNKVLEGKGNYGYNAGSGEYGDMIEMGVLDPAKVTRSALQHAASIAGLMLTTDCMIAEIPEDKPAMPDMGGMGGMGGMM

SEQ ID NO: 23606 - protein, 65 aa, Neisseria meningitidis; identical to SEQ ID NO: 127

SEQ ID NO: 23607 - protein, 56 aa, Neisseria meningitidis; identical to SEQ ID NO: 1209

SEQ ID NO: 23608 - protein, 395 aa, Neisseria meningitidis; identical to SEQ ID NO: 1108

SEQ ID NO: 23609 - protein, 187 aa, Neisseria meningitidis
MKILALLIAATCALSACGSQSEEQPASAQPQEQAQSELKTMPVSYTDYQSAANKGLNDQKTGLTLPEHVVPIDNAEGKNLLHDFSDGLTILTVDTDKADKITAVRVVWNTDAMPQKAEKLSKAAAALIAATAPEDRTMLRDTGDQIEMAIDSHNAQKEPTREWARGGIAYKVTVTNLRSVVLTAKAE

SEQ ID NO: 23610 - protein, 221 aa, Neisseria meningitidis; identical to SEQ ID NO: 7450

SEQ ID NO: 23611 - protein, 133 aa, Neisseria meningitidis; identical to SEQ ID NO: 17655

SEQ ID NO: 23612 - protein, 535 aa, Neisseria meningitidis
MSIVEIKVPDIGGHENVDIIAVEVKAGDTIAVDDTLITLETDKATMDVPADAAGVVKEVKVKVGDKISEGGVILTVETGAAAAEAAPAAAEAQPAPAAAPVAAGGATVQVAVPDIGGHTDVDVIAVEIKVGDTVAEDDTLITLETDKATMDVPCTAAGVVKAVFLKVGDKVSEGTAIIEVETAGSAAAAPAQAAQAAAPAAAPPPTAAAAPAAAPAPSAPAAAKIDEAAFAKAHAGPSARKLARELGVDLGQVKGTGLKGRIVGDDIKAFVKSVMQGGAAKPAAAGASLGSSLDLLPWPKVDFSKFGNVEVKELSRIKKISGQNLSRNWVVIPHVTVHEEADMTELEEFRKQLNKEWEREGVKLSPLAFIIKASVSALKAFPEFNASLDGDNLVLKNYFNIGFAADTPNGLVVPVIKDVDQKGLKQISQELTELSKKAREGKLKPQEMQGACFTISSLGGIGGTGFTPIVNAPEVAILGVCKSQIKPIWNGKEFAPRLMCPLSLSFDHRVIDGAAGMRFTVFLAKLLKDFRRITL

SEQ ID NO: 23613 - protein, 253 aa, Neisseria meningitidis
  misc_feature 249, 250, 251: 'Xaa' is any amino acid
LQKVVRHIAQTEIMPRFLNTPSHRKEDGSMLSEADIAAQTAFAAALPLLIDCPMLGEEMSRQEQSALWEQYSGEKGLWIVDPIDGTNNFVNGLPHFAVSVAFVRNGRAELGVIYNPVSGECFYAERGQGAFLNGTRLPLRLVDKKLNEAIAGVEIKYLRSGKLSSRMSTLAPFGTIRSMGSSTLDWCYLACGRYDVYVHGGQKLWDYAAGALIFEEAGGRLTTLEGDGFWSGEHVFKRSVVAALEPKLXXXHT

SEQ ID NO: 23614 - protein, 96 aa, Neisseria meningitidis; identical to SEQ ID NO: 6081

SEQ ID NO: 23615 - protein, 436 aa, Neisseria meningitidis; identical to SEQ ID NO: 7235

SEQ ID NO: 23616 - protein, 371 aa, Neisseria meningitidis; identical to SEQ ID NO: 849

SEQ ID NO: 23617 - protein, 257 aa, Neisseria meningitidis; identical to SEQ ID NO: 6428

SEQ ID NO: 23618 - protein, 280 aa, Neisseria meningitidis; identical to SEQ ID NO: 5980

SEQ ID NO: 23619 - protein, 160 aa, Neisseria meningitidis; identical to SEQ ID NO: 236

SEQ ID NO: 23620 - protein, 129 aa, Neisseria meningitidis; identical to SEQ ID NO: 4806

SEQ ID NO: 23621 - protein, 336 aa, Neisseria meningitidis; identical to SEQ ID NO: 7100

SEQ ID NO: 23622 - protein, 290 aa, Neisseria meningitidis; identical to SEQ ID NO: 6884

SEQ ID NO: 23623 - protein, 86 aa, Neisseria meningitidis; identical to SEQ ID NO: 7679

SEQ ID NO: 23624 - protein, 259 aa, Neisseria meningitidis; identical to SEQ ID NO: 15723

SEQ ID NO: 23625 - protein, 166 aa, Neisseria meningitidis
MADLQKTFQTSFRDAMASCAAGVHVITTDGAAGRYGITMTAVAPVTDEPPTVMLCINRSARIIPILSENGSLCINTLADEHQDVAEHFAGLTGLSPEERFAYHIWHRGKTGQLEIEGALAHLHGHIVGKHEIGTHFVFYVRLDEIKNCGCKRPALLYFRRQFRSLD

SEQ ID NO: 23626 - protein, 255 aa, Neisseria meningitidis; identical to SEQ ID NO: 7056

SEQ ID NO: 23627 - protein, 548 aa, Neisseria meningitidis
MKQSARIKNMNQTLKNTLGICALLAFCFGAAIASGYHLEYEYGYRYSAVGALASVVFLLLLARGFPRVSSVVLLIYVGTTALYLPVGWLYGAPSYQIVGSILESNPAEAREFVGNLPGSLYFVQALFFIFGLTVWRYCVSGGVFADVKNYKRRSKIWLTILLTLILSCAVMDKIASDKDLREPDAGLLLNIFDLYYDLASAPAQYAAKRAHILEAAKKASTWHIRHVAPKYKNYVVVIGESARSDYMNVYGFPLPDTPFLSQTKGLLINGYQSTAHATNLSLPQTLGLPGEPNNNIVSLAKQAGFRTAWLSNQGMLGHFANEISTYALRSDYPWFTQRGDYGKSAGLSDRLLLPAFKRVLIGNAGTKPRLIVMHLMGSHSDFCTRLDKDARRFQYQTEKISCYVSTIAQTDKFLEDTVKILNENKESWSLVYFSDHGLMHVGKGGERTLTHGAWKRQSYGVPLVKISSDDTRREMIKVRRSAFNFLRGFGSWTGIETDELPDDGYDFWGNVPDVQGEGNNLAFIDGLPDDPAPWYAGKGKSTKNTSKK

SEQ ID NO: 23628 - protein, 307 aa, Neisseria meningitidis; identical to SEQ ID NO: 1349

SEQ ID NO: 23629 - protein, 56 aa, Neisseria meningitidis; identical to SEQ ID NO: 2179

SEQ ID NO: 23630 - protein, 152 aa, Neisseria meningitidis; identical to SEQ ID NO: 5260

SEQ ID NO: 23631 - protein, 460 aa, Neisseria meningitidis
MANIARDIFKAYDIRGIVGKTLTDDAAYLIGRAIAAKAAEKGMTRIALGRDGRLSGPELMEHIQRGFTDSGIGVLNVGMVATPMLYFAAINECGGSGVMITGSHNPPDYNGFKMMLGGDTLAGEAIQELLAIVEKDGFVAADKQGNVTEKDISGEYHNHIVGHIKLKRPMKIVIDAGNGVGGAFAGKLYKGLGNEVTELFCDVDGTFPNHHPDPSKPKNLQDLIAALKNGDAEIGLAFDGDADRLGVVTKDGNIIYPDRQLMLFAQDVLNRNPGAKVIFDVKSTRLLAPWIKEHGGKAIMEKTGHSFIKSAMKETGAPVAGEMSGHIFFKERWFGFDDGLYAGARLLEILSASDNPSEVLNNLPQSISTPELNIALPEGSNGHQVIDELAAKAEFEGATEIITIDGLRVEFPDGFGLMRASNTTPILVLRFEADTQAAIERIQNQFKAVIESNPNLIWPL

SEQ ID NO: 23632 - protein, 241 aa, Neisseria meningitidis; identical to SEQ ID NO: 6741

SEQ ID NO: 23633 - protein, 394 aa, Neisseria meningitidis; identical to SEQ ID NO: 6363

SEQ ID NO: 23634 - protein, 162 aa, Neisseria meningitidis; identical to SEQ ID NO: 911

SEQ ID NO: 23635 - protein, 526 aa, Neisseria meningitidis
VELKLKRLILILMLGMFSVNSYAERSKYHIGNSNVRLDIDHTKSVVTDFRVDGQRFSGRIIEPSIIEHVPTGARSLEKVPVKFTASVSRAAVLSGVGKLVRQGAKFSTRAVPYVGTALLAHDVYETFKEDIQARGYQYDTETDKFVKGYEYSNCLWYEDERRINRTYGCYGVDSSIMRLMSDYSRFPEVKELMESRMERLARPYWEKLRNRPDMYYFKNYNFKRCYFGLNGGDCLVAKGDDGRTFISFSLQGNSKYKEEMDAKKLEEILSLKVDANPDKYIKATGYPGYSEKVEVAPGTKVNMGPVTDRNGNPVQVVATFGRDSQGNTTVDVQVIPRPDLTPGSAEAPNAQPLPEVSPAENPANNPNPNENPGTSPNPEPDPDLNPDANPDTDGQPGTRPDSPAVPGRTNGRDGKDGKDGKDGGLLCKFFPDILACDRLPESNPAEDLNLPSETVNVEFQKSGIFQDSAQCPAPVTFTVTVLDSSRQFAFSFENACTIAERLRYMLLALAWAVAAFFCIRTVSREV

SEQ ID NO: 23636 - protein, 392 aa, Neisseria meningitidis; identical to SEQ ID NO: 14107

SEQ ID NO: 23637 - protein, 271 aa, Neisseria meningitidis; identical to SEQ ID NO: 1333

SEQ ID NO: 23638 - protein, 123 aa, Neisseria meningitidis; identical to SEQ ID NO: 7208

SEQ ID NO: 23639 - protein, 144 aa, Neisseria meningitidis; identical to SEQ ID NO: 2515

SEQ ID NO: 23640 - protein, 818 aa, Neisseria meningitidis
MKKTCFHCGLDVPENLHLTVRYEGEDRETCCAGCQAVAQSIIDAGLGSYYKQRTADAQKTELPPQEILDQIRLYDLPEVQSDFVETHGGTREAVLMLGGITCAACVWLIEQQLLRTDGIVRIDLNYSTHRCRVVWDDGKIRLSDILLKIRQIGYTAAPYDAQKIEAANQKERKQYIVRLAVAGLGMMQTMMFALPTYLYGGDIEPDFLQILHWGGFLMVLPVVFYCAVPFYQGALRDLKNRRVGMDTPITVAIIMTFIAGVYSLATNAGQGMYFESIAMLLFFLLGGRFMEHIACRKAGDAAERLVKLIPAFCHHMPDYPDTQETCEAAVVKLKAGDIVLVKPGETIPVDGTVLEGSSAVNESMLTGESLPVAKMPSEKVTAGTLNTQSPLIIRTDRTGGGTRLSHIVRLLDRALAQKPRTAELAEQYASSFIFGELLLAVPVFIGWTLYADAHTALWITVALLVITCPCALSLATPTALAASTGTLAREGILIGGKQAIETLAQTTDIIFDKTGTLTQGNPAVRRIELLGSMTEAQVLAVAQSLEQQSEHPLARAILNCRISGGSVPDIAIKQRLNRIGEGVGAQLTVNGETQVWALGRASYVAEISGKEPQTEGGGSAVYLGSQSGFQAVFYLTDPLKDSAAEAVRQLAGKNLTLHILSGDRETAVAETARALGITHYRAQAMPEDKLEYVKALQKEGKKVLMIGDGINDAPVLAQADVSAAAAGGTDIARDGADIVLLNEDLRTVAHLLDQARRTRHIIRQNLIWAGAYNIIAVPLAVLGYVQPWIAALGMSFSSLAVLGNTLRLHKREEMPSEQ

SEQ ID NO: 23641 - protein, 94 aa, Neisseria meningitidis
  misc_feature 3, 4: 'Xaa' is any amino acid
VCXXINKNQDKATKPQTVQIVRQGEATPYWFLLIHYTWHCIGTDENIHSDAKVEYLQDGSFRGDAILKIDDDGNILAYRVVGSGKWRFENNACA

SEQ ID NO: 23642 - protein, 100 aa, Neisseria meningitidis; identical to SEQ ID NO: 448

SEQ ID NO: 23643 - protein, 127 aa, Neisseria meningitidis; identical to SEQ ID NO: 2146

SEQ ID NO: 23644 - protein, 71 aa, Neisseria meningitidis; identical to SEQ ID NO: 1238

SEQ ID NO: 23645 - protein, 198 aa, Neisseria meningitidis; identical to SEQ ID NO: 16077

SEQ ID NO: 23646 - protein, 125 aa, Neisseria meningitidis; identical to SEQ ID NO: 1050

SEQ ID NO: 23647 - protein, 251 aa, Neisseria meningitidis; identical to SEQ ID NO: 4406

SEQ ID NO: 23648 - protein, 93 aa, Neisseria meningitidis; identical to SEQ ID NO: 17115

SEQ ID NO: 23649 - protein, 152 aa, Neisseria meningitidis; identical to SEQ ID NO: 1438

SEQ ID NO: 23650 - protein, 288 aa, Neisseria meningitidis; identical to SEQ ID NO: 464

SEQ ID NO: 23651 - protein, 279 aa, Neisseria meningitidis; identical to SEQ ID NO: 9071

SEQ ID NO: 23652 - protein, 145 aa, Neisseria meningitidis; identical to SEQ ID NO: 7320

SEQ ID NO: 23653 - protein, 280 aa, Neisseria meningitidis; identical to SEQ ID NO: 6191

SEQ ID NO: 23654 - protein, 321 aa, Neisseria meningitidis; identical to SEQ ID NO: 22437

SEQ ID NO: 23655 - protein, 66 aa, Neisseria meningitidis; identical to SEQ ID NO: 1185

SEQ ID NO: 23656 - protein, 349 aa, Neisseria meningitidis; identical to SEQ ID NO: 6547

SEQ ID NO: 23657 - protein, 287 aa, Neisseria meningitidis; identical to SEQ ID NO: 15174

SEQ ID NO: 23658 - protein, 518 aa, Neisseria meningitidis
MTLAEFWPLCLRRLHDMLPQGQFAQWIAPLTVGEEGGVWVVYGKNQFACNMLKSQFAGKIEAVREELAAGRSAFVFKPGEGVRYEMAAVEGAVEPAEPSLHAVSEGMPVQEVLLDELPSEEPVKPAASKTAADILAERMKNLPHEPRQAAGSASRPESVAVAKARTDVQRDAEEARYEQTNLSPDYTFDTLVEGKGNRLAAAAAQAIAESPGQSYNPFFLYGSTGLGKTHLVQAVGNELLKNRPDAKVRYMHSDDYIRSFMKAVRNNTYDVFKQQYKQYDLLIIDDIQFIKGKDRTMEEFFYLYNHFHNEKKQLILTCDVLPAKIEGMDDRLKSRFSWGLTLELEPPELEMRIAILQKKAEAAGISIEDEAALFIANLIRSNVRELEGAFNRVGASSRFMNRPVIDIDLARTALQDIIAEKHKVITADIIIDAVAKYYRIKISDVLGKKRTRNIARPRQVAMSLTKELTTLSLPSIGDSFGGRDHTTVMHGIRAVAKLREEDPELAQDYEKLLILIQN

SEQ ID NO: 23659 - protein, 382 aa, Neisseria meningitidis; identical to SEQ ID NO: 14188

SEQ ID NO: 23660 - protein, 264 aa, Neisseria meningitidis; identical to SEQ ID NO: 15026

SEQ ID NO: 23661 - protein, 122 aa, Neisseria meningitidis; identical to SEQ ID NO: 3130

SEQ ID NO: 23662 - protein, 85 aa, Neisseria meningitidis
MKEFPDLEKHLIMLEVAVQDLEDRSLADSFVLSWLLQRITRQEPTSIEQVRSFLQAQAKTFEPDSVQREHLESLLELVESAQELA

SEQ ID NO: 23663 - protein, 360 aa, Neisseria meningitidis; identical to SEQ ID NO: 1598

SEQ ID NO: 23664 - protein, 209 aa, Neisseria meningitidis
MNLFQNAKFFTTVNHLKDLPDTPLEIAFVGRSNAGKSSAINTLTNHVRLAYVSKTPGRTQHINFFELQNGNFMVDLPGYGYAQVPEAVRAHWFNLLGDYLQQRKQLIGLVLIMDARHPLKELDIRMLDFFHTTGRPVHILLSKADKLSKNEQIKTLSQVKKLLKPYSDRQNISVQLFSSLKKQGIDEANRTVGSWFDAADAAASSPKEN

SEQ ID NO: 23665 - protein, 223 aa, Neisseria meningitidis; identical to SEQ ID NO: 15703

SEQ ID NO: 23666 - protein, 187 aa, Neisseria meningitidis; identical to SEQ ID NO: 18399

SEQ ID NO: 23667 - protein, 198 aa, Neisseria meningitidis; identical to SEQ ID NO: 1998

SEQ ID NO: 23668 - protein, 186 aa, Neisseria meningitidis; identical to SEQ ID NO: 482

SEQ ID NO: 23669 - protein, 398 aa, Neisseria meningitidis; identical to SEQ ID NO: 6385

SEQ ID NO: 23670 - protein, 500 aa, Neisseria meningitidis; identical to SEQ ID NO: 11856

SEQ ID NO: 23671 - protein, 321 aa, Neisseria meningitidis; identical to SEQ ID NO: 23004

SEQ ID NO: 23672 - protein, 284 aa, Neisseria meningitidis; identical to SEQ ID NO: 14194

SEQ ID NO: 23673 - protein, 204 aa, Neisseria meningitidis
LIPYQIPKNKALQKLINLKNQLHQHQKQIKNRLHSTEEDFIRNIHQDLIDTIQDKMEQVKIAISEQIKKQTDNNHYRNLQTIPSIGKDTASVLYAQLTEKHFKTANQFVSYAGLSPAIIQSGTSVRGRGRLSRYGNRRLKSTLYMPALCAYRFNAFPKLINNLKKAGKPKMVIIVAIMRKLAKLAYYIVKTGQPYDAERHRLNQ

SEQ ID NO: 23674 - protein, 241 aa, Neisseria meningitidis; identical to SEQ ID NO: 15594

SEQ ID NO: 23675 - protein, 259 aa, Neisseria meningitidis; identical to SEQ ID NO: 588

SEQ ID NO: 23676 - protein, 228 aa, Neisseria meningitidis
MAGLTFEQTVSNIIGMKGEIVRALGETFVMVGLSTTFAVVFGTLLGVLLFVTSSRQLHYNKPVNFLLDNLVNLMRAFPFVILMIAMIPATRAIVGSTIGPVAASLVLSVSGLFYFARLVEQNLREVPKGVIEAAAAMGAPPIAIVCKVLLNEARAGMVSSITVLAIGLLSYSAAAGMIGGGGLGDLAIRYGYYRYQTEVIVFIVALLVLLVILIQSIGNALARKLDKR

SEQ ID NO: 23677 - protein, 256 aa, Neisseria meningitidis; identical to SEQ ID NO: 16726

SEQ ID NO: 23678 - protein, 40 aa, Neisseria meningitidis; identical to SEQ ID NO: 14736

SEQ ID NO: 23679 - protein, 926 aa, Neisseria meningitidis; identical to SEQ ID NO: 15987

SEQ ID NO: 23680 - protein, 107 aa, Neisseria meningitidis
MMTESEFIRASEALFEHIEDQIDENGWDFDCRFAGNVLTIEAGDGTQIIVNRHTPNQELWIAAKSGGYHFAEQNGKWLATRDSRDFYDVLNEALSAASGEAVKIAEL

SEQ ID NO: 23681 - protein, 95 aa, Neisseria meningitidis; identical to SEQ ID NO: 4938

SEQ ID NO: 23682 - protein, 39 aa, Neisseria meningitidis; identical to SEQ ID NO: 7406

SEQ ID NO: 23683 - protein, 416 aa, Neisseria meningitidis; identical to SEQ ID NO: 15180

SEQ ID NO: 23684 - protein, 114 aa, Neisseria meningitidis; identical to SEQ ID NO: 565

SEQ ID NO: 23685 - protein, 268 aa, Neisseria meningitidis
MWHWDIILILLAVGSAAGFIAGLFGVGGGTLIVPVVLWVLDLQGLAQHPYAQHLAVGTSFAVMVFTAFSSMLGQHKKRAVDWKTVFAMMPGMIFGVFTGALSAKYIPAFGLQIFFILFLTAVAFKTLHTGPQTASRPLPGLPGLTAVSTLFGAMSSWVGIGGGSLSVPFLIHCGFPAHKAIGTSSGLAWPIALSGAISYLINGLNIAGLPEGSLGFLYLPAVAVLSAATIAFAPLGVKTAHKLSSAKLKKSFGIMLLLIAGKMLYNLL

SEQ ID NO: 23686 - protein, 398 aa, Neisseria meningitidis
MAKIITPLSANQVKNAKPRDKLYKLSDGGELALWVYPTGGRSWKLSFVQDGRQQTISLGRYPDFSLADAREWREEVRRKRAHGENVVNKKVRADFAFEKVARDWFVRWSKGRSEKYAGQVMRNFERWVFPAIGNLDIRQIRTADVVGCLRVMEARGIVDTLRKTKNSLKMVFAFAVGSGMMEINPVAQIGSGVFERAKTGNMAALSPSELPRLIDFLEQRNEFAVYAGRVRIHPVTRLCIYWLLLTMTRIQEAALMEWSELDGEVWRIPAERKKERRGHDVPLSRAMQWVLDQARALNVNGRFVFESVNFQGHINKESPRVAMQRAGLDTTAHGLRSLARTYLREVLKVDNDVAEKLLAHSLGTRTQTAYNRSELWEERKDALERWGNDVLRLAKNGK

SEQ ID NO: 23687 - protein, 167 aa, Neisseria meningitidis; identical to SEQ ID NO: 189

SEQ ID NO: 23688 - protein, 96 aa, Neisseria meningitidis; identical to SEQ ID NO: 6139

SEQ ID NO: 23689 - protein, 60 aa, Neisseria meningitidis; identical to SEQ ID NO: 18484

SEQ ID NO: 23690 - protein, 322 aa, Neisseria meningitidis
  misc_feature 2, 3, 4: 'Xaa' is any amino acid
VXXXTQLTQGERYHIQYLSRHCTVTEIAKQLNRHKSTISREIRRHRTQGQQYSAEKAQRQSQTIKQRKRQPYKLDSQLIQHIDTLIRRKLSPEQVCAYLCKHHQITLHHSTIYRYLRQDKSNGSTLWQHLRICSKPYRKRYGSTWTRGKVPNRVGIENRPAIVDQKSRIGDWEADTIVGKGQKSALLTLVERVTRYTIICKLDSLKAEDTARAAVRTLKAHKDRVHTITMDNGKEFYQHTKITKALKAETYFCRPYHSWEKGLNENTNGLIRQYFPKQTDFRNISDREIRRVQDELNHRPRKTLGYETPSVLFLNLFQPLIH

SEQ ID NO: 23691 - protein, 230 aa, Neisseria meningitidis; identical to SEQ ID NO: 15645

SEQ ID NO: 23692 - protein, 59 aa, Neisseria meningitidis; identical to SEQ ID NO: 7121

SEQ ID NO: 23693 - protein, 158 aa, Neisseria meningitidis; identical to SEQ ID NO: 5652

SEQ ID NO: 23694 - protein, 316 aa, Neisseria meningitidis; identical to SEQ ID NO: 6852

SEQ ID NO: 23695 - protein, 511 aa, Neisseria meningitidis; identical to SEQ ID NO: 14073

SEQ ID NO: 23696 - protein, 206 aa, Neisseria meningitidis
MLKQAVTGMTKQERITTQAYNEMTKSVAGSNSIVLNDVQGDTTINNHHTHTHNRSVADGKALSMRLTPRPLLSDRQAAAFARTGKLTGSFDLFASVVAPSQYTFAVAMPDTSMSPVIEKGDLLVVEPRMRPADEDIVLIELSDKRLVVAHLVIDIAGRMLIYQTGRPSEAFDLPEGSVIFGVVLEVKKRFMSAAQARRRVDSDYRP

SEQ ID NO: 23697 - protein, 332 aa, Neisseria meningitidis; identical to SEQ ID NO: 7596

SEQ ID NO: 23698 - protein, 95 aa, Neisseria meningitidis; identical to SEQ ID NO: 738

SEQ ID NO: 23699 - protein, 119 aa, Neisseria meningitidis; identical to SEQ ID NO: 8399

SEQ ID NO: 23700 - protein, 395 aa, Neisseria meningitidis; identical to SEQ ID NO: 1105

SEQ ID NO: 23701 - protein, 242 aa, Neisseria meningitidis; identical to SEQ ID NO: 5281

SEQ ID NO: 23702 - protein, 187 aa, Neisseria meningitidis
MTDLETKRLETQAMLENADLLFDQGQCRAALQKVADEITRDLGGKYPLLLPVMGGAVVFTGQLLPLLRFPLDFDYVHVSRYGDKLEGGAFNWKRMPDAEQIRGRHVVVLDDILDEGHTMSAIQTKLLEMGAASCRAAVFANKLIDKPKPIRADYVGLDVPNRYVFGYGMDAAGCWRNLGEIYALGGK

SEQ ID NO: 23703 - protein, 158 aa, Neisseria meningitidis; identical to SEQ ID NO: 17665

SEQ ID NO: 23704 - protein, 1005 aa, Neisseria meningitidis
MIVILLLALAGLFFVRAQSEREWMREVSAWQEKKGEKQAELPEIKDGMPDFPELALMLFHAVKTAVYWLFVGVVRFCRNYLAHESEPDRPVPPASANRADVPNASDGYSDSGNGTEEAETEAAEAAEEEAADTEDIATAVIDNRRIPFDRSIAEGLMPSESEISPVRPVFKEITLEEATRALNSAALRETKKRYIDAFEKNETAVPKVRVSDTPMEGLQIIGLDDPVLQRTYSRMFDADKEAFSESADYGFEPYFEKQHPSAFSAVKAENARNAPFRRHAGQAEAKSPDVSQGQSVSDGTAVRDACRRVSVNLKEPNKATVSAEARISRLIPESRTVVGKRDVEMPSETENVFTETVSSVGYGGPVYDETADIHIEEPAAPDAWVVEPPEVPKVPMPAIDIPPPPPVSEIYNRTYEPPTGFEQAQRSRIAETDHLADDVLNGGWQEETAAIADDGSEGAAERSNGQYLSETEAFGHDSQAICPFEDVPSERPSCRVSDTEADEGAFQSEETDAVYEHLPTTDLLLPPLFNPEATQTEEELLENSITIEEKLAEFKVKVKVVDSYSGPVITRYEIEPDVGVRGNSVLNLEKDLARSLGVASIRVVETIPGKTCMGLELPNPKRQMIRLSEIFNSPEFAESKSKLTLALGQDITGQPVVTDLGKAPHLLVAGTTGSGKSVGVNAMILSMLFKAAPEDVRMIMIDPKMLELSIYEGIPHLLAPVVTDMKLAANALNWCVNEMEKRYRLMSFMGVRNLAGFNQKIAEAAARGEKIGNPFSLMPDDPEPLEKLPFIVVVVDEFADLMMTAGKKIEELIARLAQKARAAGIHLILATQRPSVDVITGLIKANIPTRIAFQVSSKIDSRTILDQMGAENLLGQGDMLFLPPGTAYPQRVHGAFASDEEVHRVVEYLKQFGEPDYVDDILSGGGSEELPGIGRSGDGETDPMYDEAVSVVLKTRKASISGVQRALRIGYNRAARLIDQMEAEGIVSAPEHNGNRTILVPLDNA

SEQ ID NO: 23705 - protein, 281 aa, Neisseria meningitidis; identical to SEQ ID NO: 3006

SEQ ID NO: 23706 - protein, 488 aa, Neisseria meningitidis; identical to SEQ ID NO: 3695

SEQ ID NO: 23707 - protein, 157 aa, Neisseria meningitidis
MEQKGFTLIEMMIVVAILGIISVIAIPSYQSYIEKGYQSQLYTEMVGINNISKQLILKNPLDDNQAIKSKLEIFVSGYKMNPKIAKKYSVSVRFVDKEKSRAYRLVGVPQAGTGYTLSVWMNSVGDGYKCRDAASALAYSETLSADAGCEAFSNRKK

SEQ ID NO: 23708 - protein, 261 aa, Neisseria meningitidis
LPPICGGGGGGNIRFIDVNPEDFAGFPLNIRHISITTYARLKLGEYIADCDKVLYLDIDVLVRDSLKPLWDTDLGDNWLGACIDLFVERQNAYKQKIGMADGEYYFNAGVLLINLKKWRQHDIFKTACEWVEQYKDVMQYQDQDILNGLFKGGVCYANSRFNFMPANYAFMANRFASRHTDPLYRDRTYTVMPVAVSHYCGPAKPWHRDCTAWGAERFTELAGSLTAVPEEWRGKLAVPPAKRMFQRWRRKLSASFLRKIY

SEQ ID NO: 23709 - protein, 590 aa, Neisseria meningitidis
MILPARFSDGISLSLRLKLLTGLWVGLAALSVVLTLLLSLRLENAASVIEEAGNLRMQAYRLAYMAGEGSPRAQIDNQVAEFEKSLNRISQSDAIHPLIPSDTPLAYDLIQSMLIIDWQAHILPPLQSYRRPTQVDLYRFAGNIELFLQALENANEKNTWWLRRFQWAIMLMTLVSSVLMLFWHQIWVIRPLQALREGAERIGRRCFDIPVPEGGTPEFKQVGRCFNQMGGRLKILYDDLEGQVAEQTRSLEKQNQNLTLLYQTTRDLHQSYIPQQAAEHFLNRILPAVGADSGRVCLDGGSDVYVSIHHADCGTAASDLGKYHEEIFPIEYQNETLGRLLLSFPNGISLDEDDRILLQTLGRQLGVSLAGAKQEEEKRLLAVLQERSLIAQGLHDSIAQALTFLNLQVQMLETAFAENKREEAAENIGFIKTGVQECYEDVRELLLNFRTKISNKEFPEAVADLFSRFTQQTGTTVETAWENGTHLPTQDEQLQMIFILQESLSNIRKHAHATHIKFRLLKQDGSFTMTIQDNGQGFDTENIGEPSGSHVGLHIMQERAKRIRAVLKIYSQPQQGTTVSLAGVSEESLK

SEQ ID NO: 23710 - protein, 1975 aa, Neisseria meningitidis
MNKGLHRIIFSKKHSTMVAVAETANSQGKGKQAGSSVSVSLKTSGDLCGKLKTTLKTLVCSLVSLSMVLPAHAQITTDKSAPKNQQVVILKTNTGAPLVNIQTPNGRGLSHNRYTQFDVDNKGAVLNNDRNNNPFLVKGSAQLILNEVRGTASKLNGIVTVGGQKADVIIANPNGITVNGGGFKNVGRGILTTGAPQIGKDGALTGFDVRQGTLTVGAAGWNDKGGADYTGVLARAVALQGKLQGKNLAVSTGPQKVDYASGEISAGTAAGTKPTIALDTAALGGMYADSITLIANEKGVGVKNAGTLEAAKQLIVTSSGRIENSGRIATTADGTEASPTYLSIETTEKGAAGTFISNGGRIESKGLLVIETGEDISLRNGAVVQNNGSRPATTVLNAGHNLVIESKTNVNNAKGPATLSADGRTVIKEASIQTGTTVYSSSKGNAELGNNTRITGADVTVLSNGTISSSAVIDAKDTAHIEAGKPLSLEASTVTSDIRLNGGSIKGGKQLALLADDNITAKTTNLNTPGNLYVHTGKDLNLNVDKDLSAASIHLKSDNAAHITGTSKTLTASKDMGVEAGSLNVTNTNLRTNSGNLHIQAAKGNIQLRNTKLNAAKALETTALQGNIVSDGLHAVSADGHVSLLANGNADFTGHNTLTAKADVNAGSVGKGRLKADNTNITSSSGDITLVAGNGIQLGDGKQRNSINGKHISIKNNGGNADLKNLNVHAKSGALNIHSDRALSIENTKLESTHNTHLNAQHERVTLNQVDAYAHRHLSITGSQIWQNDKLPSANKLVANGVLALNARYSQIADNTTLRAGAINLTAGTALVKRGNINWSTVSTKTLEDNAELKPLAGRLNIEAGSGTLTIEPANRISAHTDLSIKTGGKLLLSAKGGNAGAPSAQVSSLEAKGNIRLVTGETDLRGSKITAGKNLVVATTKGKLNIEAVNNSFSNYFPTQKAAELNQKSKELEQQIAQLKKSSPKSKLIPTLQEERDRLAFYIQAINKEVKGKKPKGKEYLQAKLSAQNIDLISAQGIEISGSDITASKKLNLHAAGVLPKAADSEAAAILIDGITDQYEIGKPTYKSHYDKAALNKPSRLTGRTGVSIHAAAALDDARIIIGASEIKAPSGSIDIKAHSDIVLEAGQNDAYTFLKTKGKSGKIIRKTKFTSTRDHLIMPAPVELTANGITLQAGGNIEANTTRFNAPAGKVTLVAGEELQLLAEEGIHKHELDVQKSRRFIGIKVGKSNYSKNELNETKLPVRVVAQTAATRSGWDTVLEGTEFKTTLAGADIQAGVGEKARVDAKIILKGIVNRIQSEEKLETNSTVWQKQAGRGSTIETLKLPSFESPTPPKLSAPGGYIVDIPKGNLKTEIEKLAKQPEYAYLKQLQTAKNVDWKQVQLAYDKWDYKQEGLTGAGAAIVVIIVTALTYGYGAAAAGSVTAAGSSTAAAATTTAAATTTVSTAAAMQTAALASLYSQAAVAIINNKGDVGKALKDLGTSDTVKQIVTSALTAGALNQMGADIAQLNSKVRTELFSSTGNQTIANLGGRLATNLSNAGISAGINTAVNGGSLKDNLGNAALGALVNSFQGEAASKIKTTFSDDYVAKQFAHALAGCVSGLVQGKCKDGAIGAAVGEIVAESILGGRNPATLSDAEKHKVISYSKIIAGSVAALNGGDVNTAANAAEVAVVNNALNFDSTPTNAKKHQPQKPDKTALEKIIQSIMPAHAAGAMTNPQDKDAAIWISNIRNGITGPIVITSYGVYAAGWTAPLIGTAGKLAISTCMANPSGCTVMVTQAAEAGAGIATGAVTVGNAWEAPVGALSKAKAAKQAIPTQTVKELDGLLQESKNIGAVNTRINIANSTTRYTPMRQTGQPVSAGFEHVLEGHFHRPIANNRSVFTISPNELKVILQSNKVVSSPVSMTPDGQYMRTVDVGKVIGTTSIKEGGQPTTTIKVFTDKSGNLITTYPVKGN

SEQ ID NO: 23711 - protein, 220 aa, Neisseria meningitidis; identical to SEQ ID NO: 5269

SEQ ID NO: 23712 - protein, 363 aa, Neisseria meningitidis; identical to SEQ ID NO: 6588

SEQ ID NO: 23713 - protein, 394 aa, Neisseria meningitidis; identical to SEQ ID NO: 6005

SEQ ID NO: 23714 - protein, 174 aa, Neisseria meningitidis
MQTRILSAVLLAFSTAAFAGGAFTLQFDNPSEDGGFTQNQLLSAPYGFGCSGGNASPALSWKNPPAGTKSFVLTVYDKDAPTGLGWMHRVVADIPADVHRRNATSLQLSRCANIADDQSAAISAVISLRICRIRLTPSYTAKPMPSCCNHANTPQSATSAALCGTSSSVSTAAA

SEQ ID NO: 23715 - protein, 178 aa, Neisseria meningitidis; identical to SEQ ID NO: 1654

SEQ ID NO: 23716 - protein, 190 aa, Neisseria meningitidis; identical to SEQ ID NO: 14911

SEQ ID NO: 23717 - protein, 52 aa, Neisseria meningitidis; identical to SEQ ID NO: 6488

SEQ ID NO: 23718 - protein, 122 aa, Neisseria meningitidis; identical to SEQ ID NO: 8908

SEQ ID NO: 23719 - protein, 160 aa, Neisseria meningitidis; identical to SEQ ID NO: 1762

SEQ ID NO: 23720 - protein, 150 aa, Neisseria meningitidis; identical to SEQ ID NO: 18397

SEQ ID NO: 23721 - protein, 88 aa, Neisseria meningitidis; identical to SEQ ID NO: 4316

SEQ ID NO: 23722 - protein, 505 aa, Neisseria meningitidis; identical to SEQ ID NO: 2655

SEQ ID NO: 23723 - protein, 59 aa, Neisseria meningitidis; identical to SEQ ID NO: 642

SEQ ID NO: 23724 - protein, 150 aa, Neisseria meningitidis
MSEVEYFSHFISDGKGKLLEIPQRRGKQDGVFVDWISFTFHEDTLLKVSGCPLFSDAEYMYVLSRKLEEILGFGITRKCKSRGNKFYESMYRLGSDDVDYGEVHFGGQRNTVLVELKGTGCSVASPGWELRLKQFLDDSIRTRITRIDLI

SEQ ID NO: 23725 - protein, 89 aa, Neisseria meningitidis
MNIIGLDISKDTIDATLHKTNGSIHYIKFKNNDDGLKQFRLWIKGNRIRKAYIGMEATGIYYEKAADMLLYYTVYVINLKNQGLRKKQV

SEQ ID NO: 23726 - protein, 333 aa, Neisseria meningitidis
MKRKIWLLPLLAVSAYLQAQTEVRLAVHKSFSLPKGLIARFERANDAKVSIIQAGGANEMLNKLILSRANPIADAVYGLDNANIGKAREMGILAAAQPESAPVAVGLPSALAVDYGYVAINYDKKWFEGKKLPLPQTLQDLTRPEYKNLLVVPSPATSSPGLGFLMANISGLGEEGAFKWWAQMRQNGVKVAKGWSEAYYTDFSHNGGAYPLVVGYAASPAAEVYFSKGKYSEPPTGNLFLKGGVFRQVEGAAVLKGAKQPELAAKLVQWLQSREVQQAVPSEMWVYPAVKNTRLPDVFRFAQAPTHTTAPAQRDIDANQRGWVSRWIRTVLK

SEQ ID NO: 23727 - protein, 665 aa, Neisseria meningitidis
MKKITPQNLRPLLSESLGHTDFVNVLNALIKFLRRGGKKCAGERFDLIIDTFKQDRELLSRFSRCFYIWLAQIHIYPALIKLGIFSRHSFAREMGIRIYERFSPSYKDFANLGEVFLYLFHSENDDKWLQTLNIRQWLVLYELIRSHAEPSKLQTAGIRLADARLRAIEMLSVWTASEAIEPDLIRIAPRLLEADSSFVALQRETAKLVEHYRNGTTPYDTAHLEVMFDQCFSQIDYLRRKGTGAGSGSSVKVAHLLERLRQTVDRLKLLTDIQTGAGNSNRLTIALMNSLIYAAVEQYSTRHLRRSSIRMLARSITENKSHHGEHYITRNRKEYFKMFYSAAGGGIIIALMALLKIRIGSLGLSPFLTSLSAGFNYGIGFMIIHMLHCTVATKQPAMTAASFAEQVDLNEGGKAVDNKLAKLLIDVCRSQSVAVFGNVSIAILLACAISFGYAHLYRLPILDAHTAAYQFKSIDIIAYPTLWYAAIAGLWLFCSGIIAGFFDNRADYLNLRQRLPFNPLLRKIMRPGPRRVLAAYIHKHYGSLVGNFIFGMLLGMTGYFGHLLGLPLDIRHVAFSSANLGYAAVSGNVGLGTFVLGIFSVLAIGLVNLCVSFSLALFVALRSRGTKIGSIRNLIKSFWNQIKSNPCILFLPPAKEQGHPPSDKP

SEQ ID NO: 23728 - protein, 118 aa, Neisseria meningitidis
MLSAYFPVFVFILVGLAAGVLFILLGTILGPKRHYPEKDAPYECGFEAFENARMKFDVRYYLVAILFILFDLEVAFMLPWAVVFKDLGVYGFWSMLVFIVVLTVGFVYEWKKGALEWE

SEQ ID NO: 23729 - protein, 310 aa, Neisseria meningitidis; identical to SEQ ID NO: 15223

SEQ ID NO: 23730 - protein, 119 aa, Neisseria meningitidis; identical to SEQ ID NO: 9294

SEQ ID NO: 23731 - protein, 321 aa, Neisseria meningitidis
MLRLTALTLCTVLALGACSPKDSDSAPQAKEQAVSAAQSESASVTVKTARGDVQIPQNPERIAVYDLGMLDTLSKLGVKTGLSVDKNRLPYLEEYFKTTKPAGTLFEPDYETLNAYKPQLIIIGSRAAKAFDKLNEIAPTIEMTADTANLKESAKERIDALAQIFGKQAEADKLKAEIDASFEAAKTAAQGKGKGLVILVNGGKMSAFGPSSRLGGWLHKDIGVPAVDEAIKEGSHGQPISFEYLKEKNPDWLFVLDRSAAIGEEGQAAKDVLDNPLVAETTAWKKGQVVYLVPETYLAAGGAQELLNASKQVADAFNAAK

SEQ ID NO: 23732 - protein, 227 aa, Neisseria meningitidis; identical to SEQ ID NO: 2059

SEQ ID NO: 23733 - protein, 51 aa, Neisseria meningitidis
  misc_feature 2, 3, 4: 'Xaa' is any amino acid
VXXXVALLSLWVNAGAFGMQEDDTPQSDYERRLGLGAKLKNKNPDTDEKRQ

SEQ ID NO: 23734 - protein, 285 aa, Neisseria meningitidis; identical to SEQ ID NO: 13923

SEQ ID NO: 23735 - protein, 943 aa, Neisseria meningitidis
MNKKHGFQLTLTALAIATAFPAYAAQAGGATPDAAQTQSLKEVTVRAAKVGRRSKEATGLGKIVKTSETLNKEQVLGIRDLTRYDPGVAVVEQGNGASGGYSIRGVDKNRVAVSVDGVAQIQAFTVQGSLSGYGGRGGSGAINEIEYENISTVEIDKGAGSSDHGSGALGGAVAFRTKEAADLISDGKSWGIQAKTAYGSKNRQFMKSLGAGFSKDGWEGLLIRTERQGRETHPHGDIADGVEYGIDRLDAFRQTYDIQGEKTEPFFSVEGERESKPVAKLAGYGKYLNNQLNRWVKERIEKNQPLSAEEEAQVREAQARHENLSAQAYTGGGRILPDPMDYRSGSWLAKLGYRFGGRHYVGGVFEDTKQRYDIRDMTEKQYYGTDEAEKFRDKSGVYDGDDFRDGLYFVPNIEEWKGDTNLVKGIGLKYSRTKFIDEHHRRRRMGLLYRYENEAYSDNWADKAVLSFDKQGVATDNNTLKLNCAVYPAVDKSCRASADKPYSYDSSDRFHYREQHNVLNASFEKSLKNKWTKHHLTLGFGYDASNAISRPEQLSHNAARISESTGFDDNNQDKYRLGKPEVVEGSVCGYIETLRSRKCVPRKINGSNIHISLNDRFSIGKYFDFSLGGRYDRKNFTTSEELVRSGRYVDRSWNSGIVFKPNRHFSVSYRASSGFRTPSFQELFGIDIYHDYPKGWQRPALKSEKAANREIGLQWKGDFGFLEISSFRNRYTDMIAVADHKTKLPNQAGQLTEIDIRDYYNAQNMSLQGVNILGKIDWNGVYGKLPEGLYTTLAYNRIKPKSVSNRPDLSLRSYALDAVQPSRYVLGFGYDQPEGKWGANIMLTYSKGKNPDELAYLAGDQKRYSTKRASSSWSTADVSAYLNLKKRLTLRAAIYNIGNYRYVTWESLRQTAESTANRHGGDSNYGRYAAPGRNFSLALEMKF

SEQ ID NO: 23736 - protein, 197 aa, Neisseria meningitidis; identical to SEQ ID NO: 15365

SEQ ID NO: 23737 - protein, 348 aa, Neisseria meningitidis; identical to SEQ ID NO: 2437

SEQ ID NO: 23738 - protein, 377 aa, Neisseria meningitidis
MKRILCITGTRADFGKLKPLLAYIENHPDLELHLIVTGMHMMKTYGRTYKEVTRENYQHTYLFSNQIQGEPMGAVLGNTITFISRLSDEIEPDMVMIHGDRLEALAGAAVGALSSRLVCHIEGGELSGTVDDSIRHSISKLSHIHLVANEQAVTRLVQMGEKRKHIHIIGSPDLDVMASSTLPSLEEVKEYYGLPYENYGISMFHPVTTEAHLMPQYAAQYFKALELSGQNIISIYPNNDTGTESILQELLKYQSDKFIAFPSIRFEYFLVLLKHAKFMVGNSSAGIREAPLYGVPSIDVGTRQSNRHSGKSIIHTDYETKNIFDAIQQACSLGKFEADDTFNGGDTRTSTERFAEVINNPETWNVSAQKRFIDLNL

SEQ ID NO: 23739 - protein, 68 aa, Neisseria meningitidis; identical to SEQ ID NO: 4044

SEQ ID NO: 23740 - protein, 95 aa, Neisseria meningitidis; identical to SEQ ID NO: 3028

SEQ ID NO: 23741 - protein, 170 aa, Neisseria meningitidis; identical to SEQ ID NO: 8813

SEQ ID NO: 23742 - protein, 222 aa, Neisseria meningitidis; identical to SEQ ID NO: 3618

SEQ ID NO: 23743 - protein, 324 aa, Neisseria meningitidis
MPSENKIEFMQGSPRPLWAAFALLLICCGLFLTLNVKGDWDFVLQLRLTKLAALLMVAYAVGVSTQLFQTLTNNPILTPSILGFDSLYVFLQTLLVFTFGGVGYASLPLTGKFGFELVVMMGGSLLLFYTLIRQGGRDLPRMILIGVIFGILFRSLSSLLSRMIDPEEFTAAQANMFAGFNTVHSELLGIGALILLVSAAVVWRERYRLDVHLLGRDQAINLGISYTRNTLWILLWIAALVATATAVVGPVSFFGLLAASLANHFSPSVRHSVRLPMTVCIGGILLVGGQTVFEHFLGMKAVLSVVVEFAGGLVFLYLVLKHKK

SEQ ID NO: 23744 - protein, 729 aa, Neisseria meningitidis
MIYHRIAVNVPLSDGLLTYSHSEPLPQGMRVLVPFRNKTVVGMVWETDIAPDMDTARILSIQTTFLDEPPLPESWRDLLSFTSRYYHYPTGQAVFAALPQGLKETRAVEMPQPPLFYALNEAGRAQTPPPARFNKKAALWDALLSGGMTMAALKQVNAQAAKLIEDWAEQGWIETTEAAKPVLRSYHGQASHSEFVLNADQQKASDEIQTALGRFRPFLLYGITGSGKTEVYFDAMAKVLAQGRQVLFLLPEINLTPQLLKRVENRFADVPTAVLHSQMAAGRRTQDYLRAMLGQAKLVIGTRLAVFTPMDDVGLIVVDEEHDGSFKQDNELRYHARDLAVWRAKQSGCPVVLGSATPSLESWHKAQSGAYRLLQLTERAHTAAQLPQVDILNVGRLKLDNGFSPQALQLLKQNFEAGGMSLVYLNRRGFAPALFCGDCGHTFGCPNCSAKMVLHQRARQLRCHHCDHREPIPFKCPDCGNQDLTAVGHGTQRVEETLRAFLPKAAVVRVDRDSTAHKNDWADLYRRIADNEIDILVGTQMLAKGHDFARLNLVIVLNADGSLYSADFRAPERLFAELMQVSGRAGRADKPGKVLIQTQLPEHPVFAAVKAQDYAVFAENELNERQMFAMPPFGFQTAVRADAPRVADAMEFLNAAKETLAPLLPESVSQFGAAPMLMVRLAERERAQIFLESVSRQDLHRAVSLWVQVLQQNRDGKIRWSVDVDPQEA

SEQ ID NO: 23745 - protein, 349 aa, Neisseria meningitidis; identical to SEQ ID NO: 328

SEQ ID NO: 23746 - protein, 566 aa, Neisseria meningitidis
LASPNPAEIRMQQDIQQRQREEQLRQTMQPESDVRLHQKNTGETVNQLMGDDSSQPCFAINEVVLEGEHHARFQFALKRALRETGFQAGKCLHAGNINQIMSLAQNALIGRGYTTTRILAAPQDLNSGKLQLTLIPSYLRSIRIDRSNDDQTHAGRIAAFQNKFPTRSNDLLNLRDLEQGLENLKRLPTAEADLQIVPVEGEPNQSDVVVQWRQRLLPYRVSVGMDNSGSEATGKYQGNITFSADNPLGLSDMFYVNYGRSIGGTPDEESFDGHRKEGGSNNYAVHYSAPFGKWTWAFNHNGYRYHQAVSGLSEVYDYNGKSYNTDFGFNRLLYRDAKRKTYLGVKLWMRETKSYIDDAELTVQRRKTAGWLAELSHKEYIGRSTADFKLKYKRGTGMKDALRAPEEAFGEGTSRMKIWTASADVNTPFQIGKQLFAYDTSVHAQWNKTPLTSQDKLAIGGHHTVRGFDGEMSLSAERGWYWRNDLSWQFKPGHQLYLGADVGHVSGQSAKWLSGQTLVGTAIGIRGQIKLGGNLHYDIFTGRALKKPEFFQSRKWASGFQVGYTF

SEQ ID NO: 23747 - protein, 426 aa, Neisseria meningitidis; identical to SEQ ID NO: 16691

SEQ ID NO: 23748 - protein, 187 aa, Neisseria meningitidis; identical to SEQ ID NO: 17392

SEQ ID NO: 23749 - protein, 119 aa, Neisseria meningitidis; identical to SEQ ID NO: 2176

SEQ ID NO: 23750 - protein, 402 aa, Neisseria meningitidis; identical to SEQ ID NO: 15959

SEQ ID NO: 23751 - protein, 263 aa, Neisseria meningitidis; identical to SEQ ID NO: 3390

SEQ ID NO: 23752 - protein, 242 aa, Neisseria meningitidis; identical to SEQ ID NO: 201

SEQ ID NO: 23753 - protein, 1491 aa, Neisseria meningitidis
MRFTHTTPFCSVLSTLGLFAVSPAYSSIVRNDVDYQYFRDFAENKGAFAVGASNISIQDKQGKILGRVLNGIPMPDFRVSNRQTAIATLIHPQYVNSVKHNVGYGSIQFGNDTQNPEEQAYTYRLVSRNPHPDYDYHLPRLNKLVTEISPAALSSVPLLGNGQPKANAYLDTDRFPYFVRLGSGTQQVRKADGTRTRTAPAYQYLTGGTPLKVLGFQNHGLLVGGSLTDQPLNTYAIAGDSGSPLFAFDKHENRWVLAGVLSTYAGFDNFFNKYIVTQPEFIRSTIRQYETRLDVGLTTNELIWRDNGNGDSTLQGLNERITLPIANPSLAPQNDSRHMPSEDAGKTLILSSRFDNKTLMLADNINQGAGALQFDSNFTVVGKNHTWQGAGVIVADGKRVFWQVSNPKGDRLSKLGAGTLIANGQGINQGDISIGEGTVVLAQKAASDGSKQAFNQVGITSGRGTAVLADSQQIKSENLYFGFRGGRLDLNGNNLAFTHIRHADGGAQIVNHNPDQAATLTLTGNPVLSPEHVEWVQWGNRPQGNAAVYEYINPHRNRRTDYFILKPGGNPREFFPLNMENSTSWQFIGNNRQQAAKQVAQAENARPDLITFGGYLGENAQTGKAAPSYSKTNIEWVNGPNTPHKPSPYTNTPTRTGAGVPTITASKKAATPAPTSHGMPTAPKTGNFSDMTGEAAIEKNRHIANAAVYGRPEYRYNGALNLHYRPKRTDSTLLLNGGMNLNGEVLIEGGNMIVSGRPVPHAYDHQAKREPVLENEWTDGSFKAARFTLRNHARLTAGRNTAHLDGDITAYNLSGIDLGFIQGKTPECYRSYHSGSTHCTPNAVLKAENYRALPATQVRGDITLNDRSELRLGKAHLYGSIRAGKDTAVRMEADSNWTLSQSSHTGALTLDGAQITLNPDFANNTHNNRFNTLTVNGTLDGFGTFRFLTGIVRKQNAPPLKLEGDSRGAFQIHVKNTGQEPQTTESLALVSLNPKHSHQARFTLQNGYADLGAYRYILRKNNNGYSLYNPLKEAELQIEATRAEHERNQQAYNQLQATDISRQVQHDSDATRQALQAWQNSQTELARIDSQVQYLSAQLKQTDPLTGILTRAQNLCAAQGYSADICRQVAKAADTNDLTLFETELDTYIERVEMAESELDKARQGGDAQAVETARHAYLNALNRLSRQIHSLKTGVAGIRMPNLAELISRSANTAVSEQAAYNTGRQQAGRRIDRHLTDPQQQNIWLETGTQQTDYHSGTHRPYQQTTNYAHIGIQTGITDRLSVGTILTDERTNNRFDEGVSARNRSNGAHLFVKGENGALFAAADLGYSNSRTRFTDYDGAAVRRHAWDAGINTGIKIDTGINLRPYAGIRINRSNGNRYVLDGAEINSPAQIQTTWHAGIRLDKTVELGQAKLTPAFSSDYYDTRQNSGSALSVNDRTLLQQAAHGTLHTLQIDAGYKGWNAKLHAAYGKDSNTARHKQAGIKIGYNW

SEQ ID NO: 23754 - protein, 282 aa, Neisseria meningitidis; identical to SEQ ID NO: 1323

SEQ ID NO: 23755 - protein, 392 aa, Neisseria meningitidis; identical to SEQ ID NO: 7313

SEQ ID NO: 23756 - protein, 626 aa, Neisseria meningitidis
MNIFYEESGQFKVAAIVQKNDATYQVDTQHGKRTKVKANNVFAEFDGDMAAFLENAQAQAADIDTDLLWEVCGEEEFSAEAIAEEYYGHAPTKTELAATLIALYAAPMYFYKKAKGVFKAAPEETLKQALAAIERKKQQDAQIDAWAEALKRGEMPSEIAADLKTILHAPDKQSLTYKAFTKAADALKTSAYELAKKTGGITSIPQYLQDGFEIKYFPKGTGFPDLPLPEMPDLPKADVTAFSIDDESTTEVDDALSLTDLGNGMKRVGIHIAAPSLAIKQGDKMEKNIMERLSTVYFPGGKITMLPENWIAAFSLDAGTYRPSISIYFDVDNEFNVGAPTCKIEAVNIATNLRIQAIEPHFNAETGLDEAGEMMFAHHQDLIWFYQFATALQKARGKYEPDRAPQYDYSIELDEEGKVSVVRRERGSPIDTLVSEMMILANSTWAQMLHDNDLPGLFRVQPTGKVRMSTKSEPHIGMGVQHYGWFTSPLRRAADYINQKQLISLIDDTAEPLYQNSDAELFAALRDFDAAYTAYADFQRQMEAYWSLVYLQQQGTSELTATILKEDLVRIEGLPLVTRATGIPFDALPKSQALFKITELDAEKQFVSLNYIKAVAPAGTTAGNAV

SEQ ID NO: 23757 - protein, 231 aa, Neisseria meningitidis; identical to SEQ ID NO: 1993

SEQ ID NO: 23758 - protein, 212 aa, Neisseria meningitidis; identical to SEQ ID NO: 15742

SEQ ID NO: 23759 - protein, 103 aa, Neisseria meningitidis; identical to SEQ ID NO: 1558

SEQ ID NO: 23760 - protein, 269 aa, Neisseria meningitidis; identical to SEQ ID NO: 18208

SEQ ID NO: 23761 - protein, 205 aa, Neisseria meningitidis; identical to SEQ ID NO: 5304

SEQ ID NO: 23762 - protein, 69 aa, Neisseria meningitidis
MNEGEVVLTPEQIQTLRGYAFRGDTYGGWRYLANLGDRYADDAAAIVGKDANLNGLNLWMKKRGGKPMG

SEQ ID NO: 23763 - protein, 336 aa, Neisseria meningitidis
MSKKRVLTGVTTTGIPHLGNYVGAIRPAVRAAQNPDTESFLFLADYHGIIKCHEPEMIHQSTQAVAATWLACGLDPERTTFYRQSDIPEVMELNWILTCITAKGLMNRAHAYKAAVQANSENNQEDPDFGVEMGLFSYPILMTADILMFNANEVPVGRDQIQHVEMARDIAGRFNHRFKEIFTLPEVKIDENVELLVGLDGRKMSKSYGNTIPLWENDKKTQKSVNKIITNMKEPGEPKQPDESPLFEIYKAFSTPSETVEFTKMLADGLAWGEAKKLLAAKINAELAEPRERYNELTADPSQIEEILQAGAQKARKEARELLDKVRDAVGIRPLK

SEQ ID NO: 23764 - protein, 66 aa, Neisseria meningitidis; identical to SEQ ID NO: 421

SEQ ID NO: 23765 - protein, 720 aa, Neisseria meningitidis
MNAPFFRLSLLSLTLAAGFAHAAENNANVALDTVTVKGDRQGSKIRTNIVTLQQKDESTATDMRELLKEEPSIDFGGGNGTSQFLTLRGMGQNSVDIKVDNAYSDSQILYHQGRFIVDPALVKVVSVQKGAGSASAGIGATNGAIIAKTVDAQDLLKGLDKNWGVRLNSGFASNEGVSYGASVFGKEGNFDGLFSYNRNDEKDYEAGKGFRNVNGGKTVPYSALDKRSYLAKIGTTFGGDDHRIVLSHMKDQHRGIRTVREEFAVGDTKSRINIKRQAPAYRETTQSNTNLAYTGKDLGFVEKLDANAYVLEKKRYSADDKDNGYAGNVKGPNHTRITTRGMNFNFDSRLAEQTLLKYGINYRHQEIKPQAFLNSKFSIPTTEKKNGQDVAKPADQQAKDRKDEALVHSYRLTNPTKTDTGAYIEAIHEINGFTLTGGLRYDRFKVKTHDGKTVSSSNLNPSFGVIWQPHEHWSFSASHNYASRSPRLYDALQTHGKRGIISIADGTKAERARNTEIGFNYNDGTFAANGSYFWQTIKDALANPQNRHVSAAVREAVNAGYIKNHGYELGASYRTGGLTAKVGVSHSKPRFYDTHPKKLLSANPEFGAQTGRTWTASLAYRFQNPNLEIGWRGRYVQKAVGSILVSGQKNREGKLENVVRQGFGVNDVFANWKPLGKDTLNVNLSVNNVFNTFYYPHSQRWTNTLPGVGRDVRLGVNYKF

SEQ ID NO: 23766 - protein, 375 aa, Neisseria meningitidis
LKHAYSLLFFQIGKMTVLREVHMSKNAQKTLLAVCSFEVQPKDGRIQLLPYGEFRAVDGRPTDVPAWYLTEENGHDVALLANSSRNQLVVDYEHQTLYKEKNGQPAPAAGWMRWLEFTPKGMFAEVEWTDKAAAAIAAKEYRYISAVFSYDTKGYVSKIFHAALTNFPALDGMDEVLAAASAQILKPETEQNPMKELLQQLFDLPDAGEEELKAALSALVEAKPKDVALSADVFAQLAEKDSRIAALTAQTAKPDLTKYAPISVVQELQSKVAALTAKQEADKGNELITAALTSGKLLPAQKEWAKGVLKQPGGLAFLTGFIENAQPVAALAGSQTGGKAPDERVAALTAEEAAAAKMLGMSGEEFVKIKESEGK

SEQ ID NO: 23767 - protein, 101 aa, Neisseria meningitidis; identical to SEQ ID NO: 2399

SEQ ID NO: 23768 - protein, 187 aa, Neisseria meningitidis; identical to SEQ ID NO: 14283

SEQ ID NO: 23769 - protein, 157 aa, Neisseria meningitidis
MKKQITEATMMLSIIAPAMANGLDNQAFEKYVFHTQADAPMQLAELSQKEMKETEGAFLPIVAGALMGGAISAWANHGISKIKTGQFASTRSTLAATAGGMIGGGYSSAMLRGAGITTSVFARSAWKGGNAIPNAVIRANGAALNQSSSAAMGKHRR

SEQ ID NO: 23770 - protein, 367 aa, Neisseria meningitidis; identical to SEQ ID NO: 14158

SEQ ID NO: 23771 - protein, 120 aa, Neisseria meningitidis; identical to SEQ ID NO: 6941

SEQ ID NO: 23772 - protein, 288 aa, Neisseria meningitidis; identical to SEQ ID NO: 2832

SEQ ID NO: 23773 - protein, 70 aa, Neisseria meningitidis; identical to SEQ ID NO: 5197

SEQ ID NO: 23774 - protein, 119 aa, Neisseria meningitidis; identical to SEQ ID NO: 3189

SEQ ID NO: 23775 - protein, 430 aa, Neisseria meningitidis; identical to SEQ ID NO: 2797

SEQ ID NO: 23776 - protein, 76 aa, Neisseria meningitidis; identical to SEQ ID NO: 286

SEQ ID NO: 23777 - protein, 138 aa, Neisseria meningitidis; identical to SEQ ID NO: 937

SEQ ID NO: 23778 - protein, 558 aa, Neisseria meningitidis
MSFKTDAEIAQSSTMRPIGEIAAKLGLNADNIEPYGHYKAKINPAEAFKLPRKQGRLILVTAINPTPAGEGKTTVTIGLADALRHIGKDSVIALREPSLGPVFGVKGGAAGGGYAQVLPMEDINLHFTGDFHAIGAANNLLAAMLDNHIYQGNELNIDPKRVLWRRVVDMNDRQLRNIIDGMGKPVDGVMRPDGFDITVASEVMAVFCLAKDISDLKERLGNILVAYAKDGSPVYAKDLKANGAMAALLKDAIKPNLVQTIEGTPAFVHGGPFANIAHGCNSVTATRLAKHLADYAVTEAGFGADLGAEKFCDIKCRLAGLKPDAAVVVATVRALKYNGGVERANLGEENLDALEKGLPNLLKHISNLKNVFGLPVVVAINRFVSDSDAELAMIEKACAEHGVEVSLTEVWGKGGAGGADLAHKVVNAIENQPNNFKFAYDVELSIKDKIRAIAQKVYGAEDVDFSAEASAEIASLEKLGLDKMPICMAKTQYSLSDNAKLLGCPEGFRIAVRGITVSAGAGFIVALCGNMMKMPGLPKVPAAEKIDVDEHGVIHGLF

SEQ ID NO: 23779 - protein, 367 aa, Neisseria meningitidis; identical to SEQ ID NO: 15488

SEQ ID NO: 23780 - protein, 282 aa, Neisseria meningitidis; identical to SEQ ID NO: 1327

SEQ ID NO: 23781 - protein, 126 aa, Neisseria meningitidis; identical to SEQ ID NO: 3371

SEQ ID NO: 23782 - protein, 559 aa, Neisseria meningitidis
MEIINDAELIRSMQRQQHIDAELLTDANVRFEQPLEKNNYVLSEDETPCTRVNYISLDDKTVRKFSFLPSVLMKETAFKTGMCLGSNNLSRLQKAAQQILIVRGYLTSQAIIQPQNMDSGILKLRVSAGEIGDIRYEEKRDGKSAEGSISTFNNKFPLYRNKILNLRDVEQGLENLRRLSSVKTDIQIIPSEEEGKSDLQIKWQQNKPIRFSIGIDDAGGKTTGKYQGNVALSFDNPLGLSDLFYVSYGRGLAHKTDLTDATGTETESGSRSYSVHYSVPVKKWLFSFNHNGHRYHEATEGYSVNYDYNGKQYQSSLAAERMLWRNRLHKTSVGMKLWTRQTYKYIDDAEIEVQRRRSAGWEAELRHRAYLNRWQLDGKLSYKRGTGMRQSMPAPEENGGDILPGTSRMKIITAGLDAAAPFILGKQQFFYATAIQAQWNKTPLVAQDKLSIGSRYTVRGFDGEQSLFGERGFYWQNTLTWYFHPNHQFYLGADYGRVSGESAQYVSGKQLMGAVVGFRGGHKVGGMFAYDLFAGKPLHKPKGFQTTNTVYGFNLNYSF

SEQ ID NO: 23783 - protein, 620 aa, Neisseria meningitidis
MALLQISEPGMSAAPHRHRLAAGIDLGTTNSLVATVRSGSAACLPDAEGRVTLPSVVRYLENGGIEVGKIALSAQKTDPLNTVSSAKRLIGRTLADLHQNTHYLPYRFGDNQRVIELHTRQGVKTPVEVSAEILKTLKSRAEETLVGDLVGVVITVPAYFDDAQRQATKDAARLAGLNVLRLLNEPTAAAIAYGLDNASEGTFVVYDLGGGTFDVSVLQLTKGLFEVKATGGNSALGGDDFDHRLFCYLLEQNGLSQLNEQDSQLLLSLVRAAKEQLTTQTEARIQATLSDGMAIDTSISRAEFHNLTQHLVMKTLEPVKQALKDAGVGKNEVKGVIMVGGSTRMLHVQQAVATFFGQTPLNNLNPDEVVALGAAIQANVLAGNKADGEWLLLDVTPLSLGLETYGGLAEKIIPRNSTIPTARAQDFTTFKDGQTAMTIHVVQGERELVADCRSLAKFTLRGIPPMAAGAARIRVTFQIDADGLLSVSAQEQSTGVHAQIEVKPSYGLDDGAITRMLKDSMDNAAEDMAARARAEAVVEAESLTDAVNAALELDSDLLDAEELQQIRQGIADLQGRLKDGKAEDIRAAAAKLGSITDNFAAKRMNRNIQRALTGQSVDNI

SEQ ID NO: 23784 - protein, 66 aa, Neisseria meningitidis; identical to SEQ ID NO: 3561

SEQ ID NO: 23785 - protein, 240 aa, Neisseria meningitidis; identical to SEQ ID NO: 17437

SEQ ID NO: 23786 - protein, 139 aa, Neisseria meningitidis
MNLVKLLANNWQPIAIIALVGTGLAVSHHQGYKSAFAKQQVVIEKMKRDKAQAMLLSAQNYARELEQARAEAKKYEVKAHAVGMALAKKQAEVSRLKTENKKEIENVLTQDRKNAGGGCIDGFGHHGLQLYKRALGYGN

SEQ ID NO: 23787 - protein, 225 aa, Neisseria meningitidis
LAKKVLVAQIHNLSRFENCQTTLLQTEQIIHGKNVASASLEDIQTILNLKRAYQYVISHISNGEPVDISLLKKINNIVAKDDSLAPSDFRTGSVGVTLLDGSRHAPNPVKEIEVARVLQNIGLQSGSTTEAAVRFMLYCMRQQVFWDGNKRTATLFANGLMMAGGCGILEISEMQMPQFNEKLSAFYRSGDDTDISKFVYQNCISGIDYFGTDEDIDFPDPPNMG

SEQ ID NO: 23788 - protein, 334 aa, Neisseria meningitidis
MTIIVTGAAGFIGSNIVKALNQRGITDIVAVDNLSKGEKFKNLAECEIAHYLDKHEFIRQVREHILPYQNIEAVFHQGACSDTMNHDGLYMMENNYQYTLDLLDWCQDERIPFLYASSAAVYGKGEIFREERELEKPLNVYGYSKFLFDQVLRRRMKEGLTAQVVGFRYFNVYGQHEQHKGRMASVTFHHFHQYREHGYVNLFGSNDGYGNGEQTRDFVSVEDVAKVNLYFFDHPELSGIYNLGTGRSQQFNELAAATVNACRAAEGKPEMSLKELVEEELIRYIPFPDALKGKYQSFTQADITKLREAGYKEEFFDVKSGVDRYVKWMLENLA

SEQ ID NO: 23789 - protein, 445 aa, Neisseria meningitidis
MSNHTSWSSKIGFVLAAAGSAIGLGAIWKFPYTAGTNGGAVFFLLFLIFTILVALPVQLAEFYIGRTGGKNAVDSFRVLRPGTQWLWVGRMGVAACFILLSFYSVVGGWVLNYVVHSFTGAVHTGADFEALFGATISNPAGSLSYQALFMLITVWVVKGGISDGIEKANRYLMPGLFILFIALAIRSLTLPGAMEGVSFLLKPNWSYFKADTMITALGQAFFALSIGVSAMITYASYLGKDQDMFRSGHTIMWMNLLVSLLAGLVIFPAVFAFGFEPSQGPGLIFIVLPAVFMKMPFGTVLFAVFMLLVVFATLTSAFSMLETVIASTIRQDERKRKKHTWLIGTAIFIIGIPSALSFGVWGEFKVFGKTIFDLWDYVISAVIMPIGALSVSIFTAWIQDKQSVLKDAGAGSTVPRAVLLLWLNTLRYLAPIAIIIVFVNSLGIL

SEQ ID NO: 23790 - protein, 144 aa, Neisseria meningitidis; identical to SEQ ID NO: 7462

SEQ ID NO: 23791 - protein, 214 aa, Neisseria meningitidis; identical to SEQ ID NO: 909

SEQ ID NO: 23792 - protein, 64 aa, Neisseria meningitidis
MKYLIRTALLAVAAAGIYACQPQSEAAVQVKAENSLTAMRLAVADKQAEIDGLNAQIDAEIRQR

SEQ ID NO: 23793 - protein, 217 aa, Neisseria meningitidis; identical to SEQ ID NO: 5286

SEQ ID NO: 23794 - protein, 248 aa, Neisseria meningitidis; identical to SEQ ID NO: 3755

SEQ ID NO: 23795 - protein, 347 aa, Neisseria meningitidis
MSKKIKVGIVGATGYTGVELLRLLAAHPDVEVAAVTSRSEAGTAVADYFPSLRGVYGLAFQTPDEAGLEQCDIVFFATPNGIAMKDALRLLEQGVRVIDLSADFRIRDIPTWEHWYGMTHAAPGLVSQAVYGLSELNREAVAQARLVANPGCYPTCVSLPLVPLLRQCRLKPGMPLIADCKSGVSGAGRKGNVGSLLCEAGDNFKAYGIAGHRHLPEIRQTIAGLQDGIAEGFVFTPHLAPMIRGMHATVYLHLSNGICPETVLRDYYRDSLFVDILPTGSAPETRSVRGANLCRISIQQAAQSDVWVVLSVIDNLVKGAAGQAVQNMNIMFGLEETHGLDAIPLLP

SEQ ID NO: 23796 - protein, 109 aa, Neisseria meningitidis; identical to SEQ ID NO: 2887

SEQ ID NO: 23797 - protein, 133 aa, Neisseria meningitidis; identical to SEQ ID NO: 12354

SEQ ID NO: 23798 - protein, 658 aa, Neisseria meningitidis; identical to SEQ ID NO: 8975

SEQ ID NO: 23799 - protein, 737 aa, Neisseria meningitidis; identical to SEQ ID NO: 13930

SEQ ID NO: 23800 - protein, 281 aa, Neisseria meningitidis; identical to SEQ ID NO: 8149

SEQ ID NO: 23801 - protein, 257 aa, Neisseria meningitidis
MNTIADVQSSRDLRNLPINQVGIKDLRFPITLQTAEGIQSTVARLTMTVYLPAEQKGTHMSRFVALMEQHTEALDFAQLRRLTAEMVALLDSRAGKISVSFPFFRKKTAPVSGIRSLLDYDVSLTGEMKDGAYGHSMKVMIPVTSLCPCSKEISQYGAHNQRSHVTVSLTADAEVGIEEVIDYVEAQASCQLYGLLKRPDEKYVTEKAYENPKFVEDMVRDVATSLIADKRIKSFVVESENFESIHNHSAYAYIAYP

SEQ ID NO: 23802 - protein, 389 aa, Neisseria meningitidis; identical to SEQ ID NO: 19357

SEQ ID NO: 23803 - protein, 280 aa, Neisseria meningitidis; identical to SEQ ID NO: 4431

SEQ ID NO: 23804 - protein, 228 aa, Neisseria meningitidis
VQADLAYAAERITHDYPKATGANNTSTVSDYFRNIRAHSIHPRVSVGYDFGDWRIAADYASYRKWNNNKYSVNTKEVRRNGGNSENLKTENQENGTFHAASSLGLSAIYDFKLNDKFDKFKPYIGVRVAYGHVKHQVHSVESKTTIVTTAPTGGAQKGGVISEATISKPPYHQSHSISSLGLGVIAGVGFDITPNLTLDTGYRYHNWGRLENTRFKTHEVSLGMRYRF

SEQ ID NO: 23805 - protein, 192 aa, Neisseria meningitidis; identical to SEQ ID NO: 6820

SEQ ID NO: 23806 - protein, 201 aa, Neisseria meningitidis
MMTLYSGITCPFSHRCRFVLYEKGMDFEIKDVDIYNKPEDLAVMNPYNQVPVLVERDLVLHESNIINEYIDERFPHPQLMPGDPVMRGRGRLVLYRMEKELFNYVQVLENPAATNKEQAKAREAIGNGLTMLAPSFSKSKYILGEDFSMIDVALAPLLWRLDHYDVKLGKSAAPLLKYAERIFQREAFIEALTPAEKAMRK

SEQ ID NO: 23807 - protein, 253 aa, Neisseria meningitidis; identical to SEQ ID NO: 18480

SEQ ID NO: 23808 - protein, 419 aa, Neisseria meningitidis
MSMALAQKLAADSIAAVAEGRNLQDVLAHIRAAHPDLTAQENGALQDIAYGCQRYLGSLKHMLAQMLKKPIDNPQLESLLLAALYQLHYTRNAPHAVVNEAVESIAKIGRGQYRSFANAVLRRFLRERDKLVASCKKDDVAKHNLPLWWVAYLKNHYPKHWHNITAALQSHPPMTLRVNRRHGNAESYLEKLVAEGIAAKALDEYAVTLEEAVPVNRLPGFSDGIVSVQDFGAQQAAYLLNPKDGERILDACAAPGGKTGHILELADCRVTALDIDAGRLKRVEDNIARLGFQTASTACADAQDLPAWYDGKPFDAVLADVPCTASGVARRNPDVKWLRRPTDAAKTARQQEALLDALWQVLKSGGRMLIATCSVFVEENDGQLQKFLNRHADAELIESRVLLPNKHQDGFYYALIQKQ

SEQ ID NO: 23809 - protein, 241 aa, Neisseria meningitidis
MDFLSCWRRIADAPTIRRCVLCHGSSGVSDGICAGCRNDLAAYRTDAANSCPLCFRHVQGGAVCGGCQKKPPAFDRMWASLHYEPPVSNMIRALKHLADLGMVQPLADLMMQNPPDRLADECFDFVLPVPLSRERLLQRGFNQSEGIVGLLAQRYGWRILPRHTVFRHHRPPQSTLKGSERRRNIKNAFEIRTPIPENCNILLIDDVFTTGATLDELAKTLKKSGANRICCWTLARTPMKK

SEQ ID NO: 23810 - protein, 330 aa, Neisseria meningitidis; identical to SEQ ID NO: 7833

SEQ ID NO: 23811 - protein, 328 aa, Neisseria meningitidis
MQYRIRRENEAPEAKNAGETLWERDMMREVLLSAYRDRRRERMWKNIWRAVSTLILVALIAGIFRKDEAALQLAGNTPHTAVVNLYGEIGNGVEDQVKKLKDGMEAAYKNPQAKAIVIRANSPGGSPVVSNTAFEEIRRLKAQHPGIPVYLVAEDMCASGCYYIAAAADKIYADPSSIVGSIGVIGSSFDATGLMEKIGVKRRVKIAGSNKGMGDPFSPETPEQSKIWEEMLTGIHGEFIKAVKTGRGGRLKFRQYPDVFSGRVYTGADAQKVGLVDGLGNIYSVARDVVKAPDVVDYTPKDDFGRILGRRFGAELKASVREALQAVR

SEQ ID NO: 23812 - protein, 65 aa, Neisseria meningitidis; identical to SEQ ID NO: 7172

SEQ ID NO: 23813 - protein, 402 aa, Neisseria meningitidis; identical to SEQ ID NO: 2438

SEQ ID NO: 23814 - protein, 320 aa, Neisseria meningitidis; identical to SEQ ID NO: 17581

SEQ ID NO: 23815 - protein, 119 aa, Neisseria meningitidis; identical to SEQ ID NO: 6100

SEQ ID NO: 23816 - protein, 633 aa, Neisseria meningitidis; identical to SEQ ID NO: 2852

SEQ ID NO: 23817 - protein, 166 aa, Neisseria meningitidis; identical to SEQ ID NO: 1704

SEQ ID NO: 23818 - protein, 655 aa, Neisseria meningitidis; identical to SEQ ID NO: 15146

SEQ ID NO: 23819 - protein, 68 aa, Neisseria meningitidis; identical to SEQ ID NO: 531

SEQ ID NO: 23820 - protein, 2273 aa, Neisseria meningitidis; identical to SEQ ID NO: 7649

SEQ ID NO: 23821 - protein, 150 aa, Neisseria meningitidis; identical to SEQ ID NO: 7624

SEQ ID NO: 23822 - protein, 72 aa, Neisseria meningitidis; identical to SEQ ID NO: 113

SEQ ID NO: 23823 - protein, 57 aa, Neisseria meningitidis; identical to SEQ ID NO: 735

SEQ ID NO: 23824 - protein, 96 aa, Neisseria meningitidis; identical to SEQ ID NO: 4410

SEQ ID NO: 23825 - protein, 280 aa, Neisseria meningitidis
MSGGVMPELPEVETTLRGIAPHIEGKTVEAVVLRQLKLRWQINPDLGEILSGRQVLSCGRRAKYLLIRFQTGVLLIHLGMSGSLRIFTPSDGRIGRPDRHDHVDIVFSDGTVMRYRDPRKFGAILWYEGIEEHHPLLEKLGPEPLSEAFCADYLYARLKAQKRAVKLALMDNAVVVGVGNIYANESLFRAGISPHRPANRLKKKECALLVETVKAVLQRAIETGGSTLRDFVDSDGKSGYFQQEYTVYGRHNQPCPRCGGLVVKETLGQRGTFYCPNCQK

SEQ ID NO: 23826 - protein, 128 aa, Neisseria meningitidis; identical to SEQ ID NO: 723

SEQ ID NO: 23827 - protein, 242 aa, Neisseria meningitidis; identical to SEQ ID NO: 9676

SEQ ID NO: 23828 - protein, 339 aa, Neisseria meningitidis; identical to SEQ ID NO: 18416

SEQ ID NO: 23829 - protein, 382 aa, Neisseria meningitidis
MPTMGVEMNTRNMRYILLTGLLPMASAFGETALQCAALTDNVTRLACYDRIFAAQLPSSAGQEGQESKAVLNLTETVRSSLDKGEAVIVVEKGGDALPADSAGETADIYTPLSLMYDLDKNDLRGLLGVREHNPMYLMPLWYNNSPNYAPSSPTRGTTVQEKFGQQKRAETKLQVSFKSKIAEDLFKTRADLWFGYTQRSDWQIYNQGRKSAPFRNTDYKPEIFLTQPVKADLPFGGRLRMLGAGFVHQSNGQSRPESRSWNRIYAMAGMEWGKLTVIPRVWVRAFDQSGDKNDNPDIADYMGYGDVKLQYRLNDRQNVYSVLRYNPKTGYGAIEAAYTFPIKGKLKGVVRGFHGYGESLIDYNHKQNGIGIGLMFNDLDGI

SEQ ID NO: 23830 - protein, 155 aa, Neisseria meningitidis
MRKSRLSRYKQNKLIELFVAGVTARTAAELVGVNKNTAAYYFHRLRLNLSKQPTFRNVWRSRSRKLFWRTTQRQTRSRCCRSRRIRSFEAKWGLYGYSTEYSNRYFISYYPTSETQHFLYGLLSLCIRCARIPFLRNFVFVSITAHILPNDKTIL

SEQ ID NO: 23831 - protein, 182 aa, Neisseria meningitidis; identical to SEQ ID NO: 14728

SEQ ID NO: 23832 - protein, 231 aa, Neisseria meningitidis; identical to SEQ ID NO: 3708

SEQ ID NO: 23833 - protein, 178 aa, Neisseria meningitidis; identical to SEQ ID NO: 5654

SEQ ID NO: 23834 - protein, 307 aa, Neisseria meningitidis
MENQRPLLGFALALLAAMTWGTLPIAVRQVLKFVDAPTLVWVRFTVAAAVLFVLLALGGRLPKWRDFSWCSFRLLLLGVAGISANFVLIAQGLHYISPTTTQVLWQISPFTMIVVGVLVFKDRMTAAQKIGLVLLLAGLLMFFNDKFGELSGLGAYAKGVLLCAVGSMAWVCYAVAQKLLSAQFGPQQILLLIYAASAAVFLPFAEPAHIGSLDGTLAWVCFAYCCLNTLIGYGSFGEALKHWEASKVSAVTTLLPVFTVIFSLLGHYVMPDTFAAPDMNGLGYVGALVVVGGAVTAAVGDRLFKRR

SEQ ID NO: 23835 - protein, 390 aa, Neisseria meningitidis; identical to SEQ ID NO: 7103

SEQ ID NO: 23836 - protein, 99 aa, Neisseria meningitidis; identical to SEQ ID NO: 3688

SEQ ID NO: 23837 - protein, 98 aa, Neisseria meningitidis; identical to SEQ ID NO: 1735

SEQ ID NO: 23838 - protein, 105 aa, Neisseria meningitidis; identical to SEQ ID NO: 7739

SEQ ID NO: 23839 - protein, 186 aa, Neisseria meningitidis; identical to SEQ ID NO: 9740

SEQ ID NO: 23840 - protein, 255 aa, Neisseria meningitidis
MQEIMQSIVFVAAAILHGITGMGFPMLGTTALAFIMPLSKVVALVALPSLLMSLLVLCSNNKKGFWQEIVYYLKTYKLLAIGSVVGSILGVKLLLILPVSWLLLLMAIITLYYSVNGILNVCAKAKNIQVVANNKNMVLFGFLAGIIGGSTNAMSPILLIFLLSETENKNRIVKSSNLCYLLAKIVQIYMLRDQYWLLNKSEYGLIFLLSVLSVIGLYVGIRLRTKISPNFFKMLIFIVLLVLALKIGHSGLIKL

SEQ ID NO: 23841 - protein, 92 aa, Neisseria meningitidis; identical to SEQ ID NO: 752

SEQ ID NO: 23842 - protein, 527 aa, Neisseria meningitidis; identical to SEQ ID NO: 7496

SEQ ID NO: 23843 - protein, 169 aa, Neisseria meningitidis
MTDTQNRVAMGYIKGVFGIKGWLKIAANTEYSDSLLDYPEWHLVKDGKTISVTLEAGKVVNGELQVKFEGINDRDLAFSLRGYTIEIPREAFAPTEEDEYYWADLVGMTVVNKDHTVLGKVSNLMETGANDVLMIDGEHGQILIPFVSQYIETVDTGSKTITADWGLDY

SEQ ID NO: 23844 - protein, 469 aa, Neisseria meningitidis; identical to SEQ ID NO: 3744

SEQ ID NO: 23845 - protein, 791 aa, Neisseria meningitidis
MKPLQMLPIAALVGSIFGNPVLAADEAATETTPVKAEIKAVRVKGQRNAPAAVERVNLNRIKQEMIRDNKDLVRYSTDVGLSDSGRHQKGFAVRGVEGNRVGVSIDGVNLPDSEENSLYARYGNFNSSRLSIDPELVRNIEIVKGADSFNTGSGALGGGVNYQTLQGRDLLLDDRQFGVMMKNGYSTRNREWTNTLGFGVSNDRVDAALLYSQRRGHETESAGNRGYAVEGEGSGANIRGSARGIPDSSKHKYHSFLGKIAYQINDNHRIGASLNGQQGHNYTVEESYNLTASSWREADDVNRRRNANLFYEWMPDSNWLSSLKADFDYQKTKVAAVNNKGSFPMDYSTWTRNYNQKDLDEIYNRSMDTRFKRFTLRLDSHPLQLGGGRHRLSFKTFVSRRDFENLNRDDYYFSGRVVRTTSSIQHPVKTTNYGFSLSDQIQWNDVFSSRAGIRYDHTKMTPQELNAECHACDKTPPAANTYKGWSGFVGLAAQLNQAWRVGYDITSGYRVPNASEVYFTYNHGSGNWLPNPNLKAERSTTHTLSLQGRSEKGMLDANLYQSNYRNFLSEEQKLTTSGTPGCTEENAYYGICSDPYKEKLDWQMKNIDKARIRGIELTGRLNVDKVASFVPEGWKLFGSLGYAKSKLSGDNSLLSTQPLKVIAGIDYESPSEKWGVFSRLTYLGAKKVKDAQYTVYENKGWGTPLQKKVKDYPWLNKSAYVFDMYGFYKPAKNLTLRAGVYNLFNRKYTTWDSLRGLYSYSTTNAVDRDGKGLDRYRAPGRNYAVSLEWKF

SEQ ID NO: 23846 - protein, 166 aa, Neisseria meningitidis; identical to SEQ ID NO: 6804

SEQ ID NO: 23847 - protein, 281 aa, Neisseria meningitidis
MLSYRHAFHAGNHADMLKHFTLFLVLQYFNRKDKPYWYIDTHGGAGVYNLEGSEAQKVGEYRQGIALLRQAKNLPTELNGFIAHIQKILPSPELYCGSPWLAQSLTRVGDKLRLFELHPTDFVHLQNNMGEAGLGKRGQVLREDGYKELISLLPPPPRRATVLIDPPYEEKQDYRRVTETLKAALKRFESGCYLIWYPCLSREESRKLPEELKKLLPDNYLHAELHVHAPKADGFGMHGSGMFVINPPYLLAEQLAANLPALTRLLAQDEGARYLLDSKIR

SEQ ID NO: 23848 - protein, 96 aa, Neisseria meningitidis; identical to SEQ ID NO: 3692

SEQ ID NO: 23849 - protein, 171 aa, Neisseria meningitidis; identical to SEQ ID NO: 2424

SEQ ID NO: 23850 - protein, 131 aa, Neisseria meningitidis; identical to SEQ ID NO: 1281

SEQ ID NO: 23851 - protein, 292 aa, Neisseria meningitidis
MMSQHSAGARFRQAVKESNPLAVAGCVNAYFARLATQSGFKAIYLSGGGVAACSCGIPDLGITTMEDVLIDARRITDNVDTPLLVDIDVGWGGAFNIARTIRNFERAGVAAVHIEDQVAQKRCGHRPNKAIVYKDEMVDRIKAAVDARVDENFVIMARTDALAVEGLDAAIERAQACVEAGADMIFPEAMTDLNMYRQFADAVKVPVLANITEFGSTPLYTQSELAENGVSLVLYPLSSFRAASKAALNVYEAIMRDGTQAAVVDSMQTRAELYEHLNYHAFEQKLDKLFQK

SEQ ID NO: 23852 - protein, 344 aa, Neisseria meningitidis; identical to SEQ ID NO: 6373

SEQ ID NO: 23853 - protein, 136 aa, Neisseria meningitidis; identical to SEQ ID NO: 14101

SEQ ID NO: 23854 - protein, 758 aa, Neisseria meningitidis
MEQTTLKPIVLSILLTNTPLLAQAHETEQSVDLETVSVVGKSRPRATSGLLHTSTASDKIISGDTLRQKAVNLGDALDGVPGIHASQYGGGASAPVIRGQTGRRIKVLNHHGETGDMADFSPDHAIMVDTALSQQVEILRGPVTLLYSSGNVAGLVDVADGKIPEKMPENGVSGELGLRLSSGNLEKLTSGGINIGLGKNFVLHTEGLYRKSGDYAVPRYRNLKRLPDSHADSQTGSIGLSWVGEKGFIGVAYSDRRDQYGLPAHSHEYDDCHADIIWQKSLINKRYLQLYPHLLTEEDVDYDNPGLSCGFHDDDDAHAHAHNGKPWIDLRNKRYELRAEWKQPFPGFEALRVHLNRNDYHHDEKAGDAVENFFNNQTQNARIELRHQPIGRLKGSWGVQYLQQKSSALSATSEAVKQPMLLDNKVQHYSFFGVEQANWDNFTLEGGVRVEKQKASIRYDKALIDRENYYNHPLPDLGAHRQTARSFALSGNWYFTPQHKLSLTASHQERLPSTQELYAHGKHVATNTFEVGNKHLNKERSNNIELALGYEGDRWQYNLALYRNRFGNYIYAQTLNDGRGPKSIEDDSEMKLVRYNQSGADFYGAEGEIYFKPTPRYRIGVSGDYVRGRLKNLPSLPGREDAYGNRPFIAQDDQNAPRVPAARLGVHLKASLTDRIDANLDYYRVFAQNKLARYETRTPGHHMLNLGANYRRNTRYGEWNWYVKADNLLNQSVYAHSSFLSDTPQMGRSFTGGVNVKF

SEQ ID NO: 23855 - protein, 172 aa, Neisseria meningitidis; identical to SEQ ID NO: 601

SEQ ID NO: 23856 - protein, 150 aa, Neisseria meningitidis; identical to SEQ ID NO: 3757

SEQ ID NO: 23857 - protein, 177 aa, Neisseria meningitidis; identical to SEQ ID NO: 5671

SEQ ID NO: 23858 - protein, 109 aa, Neisseria meningitidis; identical to SEQ ID NO: 899

SEQ ID NO: 23859 - protein, 165 aa, Neisseria meningitidis
MRKSRLSQYKQNKLIELFVAGVTARTAAELVGVNKNTAAYYFHRLRLLIYQNSPHLEMFDGEVEADESYFGGQRKGKRGRGAAGKVAVFGLLKRNGKVYTVTVPNTQTATLFPIIREQVKPDSIVYTDCYRSYDVLDVREFSHFSFAEISFSYQSQHTFCTTKPY

SEQ ID NO: 23860 - protein, 1391 aa, Neisseria meningitidis; identical to SEQ ID NO: 14495

SEQ ID NO: 23861 - protein, 180 aa, Neisseria meningitidis
VQSWKARRDFNIVKQDLDFSCGAASVATLLNNFYGQTLTEEEVLEKLDKEQMRASFEDMRRIMPDLGFEAKGYALSFEQLAQLKIPVIVYLKYRKDDHFSVLRGIDGNTVLLADPSLGHVSMSRAQFLDAWQTREGNLAGKILAVVPKKAETISNKLFFTHHPKRQTEFAVGQIRQARAE

SEQ ID NO: 23862 - protein, 480 aa, Neisseria meningitidis; identical to SEQ ID NO: 14474

SEQ ID NO: 23863 - protein, 119 aa, Neisseria meningitidis; identical to SEQ ID NO: 1252

SEQ ID NO: 23864 - protein, 228 aa, Neisseria meningitidis; identical to SEQ ID NO: 380

SEQ ID NO: 23865 - protein, 172 aa, Neisseria meningitidis; identical to SEQ ID NO: 6617

SEQ ID NO: 23866 - protein, 64 aa, Neisseria meningitidis; identical to SEQ ID NO: 6143

SEQ ID NO: 23867 - protein, 150 aa, Neisseria meningitidis; identical to SEQ ID NO: 3538

SEQ ID NO: 23868 - protein, 112 aa, Neisseria meningitidis; identical to SEQ ID NO: 7736

SEQ ID NO: 23869 - protein, 358 aa, Neisseria meningitidis; identical to SEQ ID NO: 7769

SEQ ID NO: 23870 - protein, 133 aa, Neisseria meningitidis; identical to SEQ ID NO: 6682

SEQ ID NO: 23871 - protein, 427 aa, Neisseria meningitidis
MTASKSGFIGQIFSRNMLVCIFTGFTSGLPLYFLINLIPAWLRSEQVDLKSIGLMALIGLPFTWKFLWSPLMDAVRLPVLGRRRGWMLLTQAGLLAALAAYAFLNPRNHLPLIAGLSVLVAFFSASQDIVLDAFRREILSDEELGLGNSVHVNAYRIAALIPGSLSLVLADRMPWPEVFVITSLFMLPGLLMTLFLAREPVLPPAVPKTLKQTVVEPFKEFFTRKGIASAVCVLLFIFLYKLGDSMATALATPFYLDMGFSKTDIGLIAKNAGLWPAVAAGILGGVWMLKIGVNKALWLFGAVQAVTVLGFVWLAGFGHFDTVGTGERLMLAAVIGAEAVGVGLGTAAFVSYMARETNPAFTATQLALFTSLSAVPRTVINSFAGYLIEWLGYVPFFQLCFALALPGMLLLLKVAPWNGEKTQDAGR

SEQ ID NO: 23872 - protein, 360 aa, Neisseria meningitidis; identical to SEQ ID NO: 7308

SEQ ID NO: 23873 - protein, 93 aa, Neisseria meningitidis; identical to SEQ ID NO: 3660

SEQ ID NO: 23874 - protein, 84 aa, Neisseria meningitidis; identical to SEQ ID NO: 15659

SEQ ID NO: 23875 - protein, 122 aa, Neisseria meningitidis; identical to SEQ ID NO: 14201

SEQ ID NO: 23876 - protein, 145 aa, Neisseria meningitidis; identical to SEQ ID NO: 3684

SEQ ID NO: 23877 - protein, 78 aa, Neisseria meningitidis; identical to SEQ ID NO: 7882

SEQ ID NO: 23878 - protein, 525 aa, Neisseria meningitidis; identical to SEQ ID NO: 6933

SEQ ID NO: 23879 - protein, 516 aa, Neisseria meningitidis
MKKPLISVAAALLGVALGTPYYLGVKAEESLTQQQKILQEAGFLTVESHQYERGWFTSTETTVIRLKPELLNNARKYLPDNLKTVLEQPVTLVNHITHGPFAGGFGTQAYIETEFKYAPETEKVLERFFGKQVPVSLANTVYFNGSGKMEVSVPAFDYEELSGIRLHWEGLTGKTVYQKGFKSYRNSYDAPLFKIKLADKGDAAFEKAHFDSETSDGINPLALGSSNLTLEKFSLEWKEGVDYNVKLNELVNLVTDLQIGAFINPNGSIAPSKIEVGKLAFSTKTGESGAFINSEGQFRFDTLVYGDEKYGPLDIHIAAEHLDASALTVLKRKFAQISAKKMTEEQIRNDLIAAVKGEASGLFTNNPVLDIKTFRFTLPSGKIDVGGKIMFKDMKKEDLNQLGLMLKKTEADIRMSIPQKMLEDLAVSQAGNIFSVNAEDEAEGRASLDDINETLRLMVDSTVQSMAREKYLTLNGDQIDTAISLKNNQLKLNGKTLQNEPEPDFDEGGMVSEPQQ

SEQ ID NO: 23880 - protein, 134 aa, Neisseria meningitidis; identical to SEQ ID NO: 6496

SEQ ID NO: 23881 - protein, 144 aa, Neisseria meningitidis; identical to SEQ ID NO: 6

SEQ ID NO: 23882 - protein, 138 aa, Neisseria meningitidis; identical to SEQ ID NO: 489

SEQ ID NO: 23883 - protein, 94 aa, Neisseria meningitidis; identical to SEQ ID NO: 3728

SEQ ID NO: 23884 - protein, 573 aa, Neisseria meningitidis; identical to SEQ ID NO: 15087

SEQ ID NO: 23885 - protein, 431 aa, Neisseria meningitidis; identical to SEQ ID NO: 15037

SEQ ID NO: 23886 - protein, 489 aa, Neisseria meningitidis; identical to SEQ ID NO: 15148

SEQ ID NO: 23887 - protein, 699 aa, Neisseria meningitidis
MPSERRFRPIPTTRFVRKRITGKIMEVIRYPDSPFKLHQPFPPAGDQPTAIAGLLEGLSDGLAYQTLLGVTGSGKTYTMANVIAQSGRPAIIMAHNKTLAAQLYAEMREFFPENAVEYFVSYYDYYQPEAYVPSRDLFIEKDSAINEHIEQMRLSATKNLMTRDDVIIVATVSAIYGIGDPTEYQQMVLSVKEGDTIEQRDIIATLVSMQYERGDLDFKRGSFRVRGDVIDVYPAESSENALRISLFDDEIDRLDMFDPLSGSLIQRVGRYTVFPSSHYVTPRDTVLRACDSIKEELRERIDFFTKENRPVEQQRIEQRTRFDLEMLYEMGFCKGIENYSRHFSGKKEGEPPPTLMDYLPSNTIMFIDESHVTVTQIGGMYKGDASRKQNLVDYGFRLPSARDNRPLKFHEFEKVMPQTVFVSATPAKYEEEHAGQVVEQVVRPTGLVDPQIIIRPVATQVDDLMSEINDRIQKGERVLVTTLTKRMAEQLTDYYSELGIKVRYLHSDIDTVERVEIIRDLRLGLFDVLVGINLLREGLDIPEVSLVAILDADKEGFLRSHRSLIQTIGRAARNVNGVAILYADKITDSMKAAIDETERRREKQIKFNEEHGIVPQQIKKQVKDIIDGVYHEEDGSKGRLKGKNKVKVGEIHNEEDAIKEIAKLEKAMQQAARDLQFEEAAVLRDRIRDIKENLLFGAE

SEQ ID NO: 23888 - protein, 196 aa, Neisseria meningitidis; identical to SEQ ID NO: 6860

SEQ ID NO: 23889 - protein, 41 aa, Neisseria meningitidis; identical to SEQ ID NO: 3182

SEQ ID NO: 23890 - protein, 301 aa, Neisseria meningitidis
LARDFYKEYNPLFIKTYQSEHPGTSVSIQQSHGGSSKQALSVANGLQADVVTMNQSSDIDLLEKKGLVEKGWQQALPDHAAPYTSTMVFLVRKNNPKQIRDWNDLAKDGVNIVIANPKTSGNGRYAFLGAYGYGLKATNGNEQEAQKLVASILKNTPVFENGGRAATTTFTQRNIGDVLITFENEANYVSKKLTQGQFEIVYPSYTISAESPVAVVNSVVAKKGTQKTARAYLEYLWSEPAQELAASLYLRPRNPEVLARHKADFPDLDTFSPEKKFGGWDNIMKTYFADGGIFDRLTAQK

SEQ ID NO: 23891 - protein, 94 aa, Neisseria meningitidis
MAGGNKSLKIGTQSVEKSTGRTIPNNLKEQLAMEEVKANPQGKTPARIPPMSDTKNGWLAKDGWVKRVQNVNKIEIHYIENSRTGEKTDFKFKD

SEQ ID NO: 23892 - protein, 217 aa, Neisseria meningitidis
MGLGMEIGKLIVAFLVLINPFSALSLYLDLTNGHSTKERRKVARTAAVAVFAVIAVFALIGGTLLKVLGISVGSFQVGGGILVLLIAISMMNGNDNPAKQNLGAQPETGQARPARNAGAIAVVPIAIPITIGPGGISTVIIYASAAKTYGDIALIIAAGLVVSAICYAILIVAGKVSRLLGATGLTILNRIMGMMLAAVSVEIIVSGLKTIFPQLAG

SEQ ID NO: 23893 - protein, 171 aa, Neisseria meningitidis; identical to SEQ ID NO: 15179

SEQ ID NO: 23894 - protein, 124 aa, Neisseria meningitidis; identical to SEQ ID NO: 961

SEQ ID NO: 23895 - protein, 328 aa, Neisseria meningitidis
VSGAESYRHITVLLNEAVDALAVREDGVYVDGTFGRGGHSRLILSRLGDAGRLIVFDKDPQAIAVAEELARSDKRVGVVHGGFASFQAALDGLGIGKVDGALFDLGISSPQIDDGSRGFSFRFDAPLDMRMDTTRGMSAAEWIAVASEQDLHEVIKNYGEERFSRQIARAIVAQRAESPIDTTRKLAQIVAQNVRTRERGQDPATRTFQAIRIFINRELEEVGAVLPQVMCRLKEGGRLAVIAFHSLEDRIVKQFVKKYSQHAPLPRWAAVREADLPELPLKIVGRALKPGEAEIAANPRARSAVLRVAERTAGPIPEQSQRKTSEWQ

SEQ ID NO: 23896 - protein, 280 aa, Neisseria meningitidis; identical to SEQ ID NO: 5019

SEQ ID NO: 23897 - protein, 105 aa, Neisseria meningitidis; identical to SEQ ID NO: 15362

SEQ ID NO: 23898 - protein, 216 aa, Neisseria meningitidis
MPVTRPAKINTYTRIIDASLVLFNEEGERNISTNHIAAHLGISPGNLYYHFRNKDEIIVQLFKRYSEALLAYLNEAVLPSDVEDSINYMAGIYDVMWEYRFLFSDVNTLLARSAELLGEHNTFTQAKVSPLLVNLLTQLNGLNIIQADQTAMNDLAVNMWMVTKYWFDFDSSLRGRTKLTEDSKARGIRRTLSLLRPYLLPEHRKKYDRKIGNGNP

SEQ ID NO: 23899 - protein, 122 aa, Neisseria meningitidis; identical to SEQ ID NO: 848

SEQ ID NO: 23900 - protein, 816 aa, Neisseria meningitidis
MTQKEKHFEEYAALATLPLRDVVVYPHMVLPLFVGRPKSIAALENAITREEPVFLLAQTDAALEEPVAADLYQTGTVAQVLQVLKLPDGTVKVLVEGLYRGRVLTIEDTGGLFVSHIETVVEEDTGGNTDLEAVRRTLLAQFEQYAKLNKKIPAEIIGSINGIAENSRLTDTVAAHLQLKLAQRQQILEIPEIGKRMEFLLAQLESELDIMQAEKRIRGRVKRQMEKSQREYYLNEQIKAIHKELGEEDENGELDALEAGIKKAGMSKEAEEKCLSELKKLKMMPPMSAESTVVRNYIDTLLELPWKKKSRVSKDIAKAGLVLDTDHYGLEKVKERILEYLAVQKRMDKLKGPILCLVGPPGVGKTSLGESIAKATGRKYVRMALGGVRDESEIRGHRRTYIGSMPGKILQNMAKAGVKNPLFLLDEIDKLGSDFRGDPASALLEVLDPEQNNKFADHYAEVDYDLSDVMFIATSNSLNIPTPLLDRMEIIRLSGYTEDEKINIAMQYLVPKQMKRNGVKEGELAIEESAVRDIIRYYTREAGVRSLDREIAKICRKVVMQITLDEDSKTKKTGKAKPRAVKVNEKNLHDYLGVRRFDYGVAESENRIGQVTGLAWTEVGGELLTVEAAALPGKGVIQCTGQLGDVMKESVSAAWSVVRSRAESVGLAPDFYEKKDIHVHVPEGATPKDGPSAGIAMTLAMVSAFTKIPVRADVAMTGEITLRGEVLPIGGLKEKLLAALRGGIKHVLIPKDNLKDLEEIPENVKTGLTIHPVKWIDEVLALGLESQPEPWAEPSGAEAAAESASKPKPRSRATKH

SEQ ID NO: 23901 - protein, 131 aa, Neisseria meningitidis; identical to SEQ ID NO: 7719

SEQ ID NO: 23902 - protein, 530 aa, Neisseria meningitidis; identical to SEQ ID NO: 6645

SEQ ID NO: 23903 - protein, 613 aa, Neisseria meningitidis
MQTNYLSETDSIMKKLICLFAVFLMLCGRAFALDANDLLPPEKAFVPELAVADDGVNVRFRIADGYYMYQAKIVGKTDPADLLGQPSFSKGEEKEDEFFGRQTVYHHEAQVAFPYAKAVGEPYKLVLTYQGCAEAGVCYPPVDTEFDISGNGTYHPQTDEPASAKDRFLQPSSQNGSGALPPPKGDEGGDSRFKLSWDTLNANLLAFFLAGLGLSFTACMYPLLPIVSSIVVGDKKAGKARAFVLSVVYVQGLALTYTLVGIVAGLTGALLTVWLQQAWVVLAASALMVVLALSMFGLFNIQLPNAVQSYFQNQSSRLSGGKIVSVFIMGILSALIVGPCVAPPLAFALGYIGQTGDAVLGGLALYTLALGTGVPLIAIGTFGGHILPKAGDWMNAVKYAFGFILLAVAVYLATPHLPYYLVVALYTLLMLVPACMLLVNGRRQKRRPKAVAFALGGILLIGGAWFGWQGANGKTTALHHFLTLNPPAEAGKSSEHGKMFADTAALKAAMDTALKEHPDKPVVLDFYADWCISCKEMAAYTLNQPEVHQAVDMERFFQIDVTANTPEHQALLKEYGLFGPPGVFVVRSDGSRSEPLLGFVKADKFIEWYEQNR

SEQ ID NO: 23904 - protein, 635 aa, Neisseria meningitidis
MPSEASRPVRTVLESKSATPMHDTRTMMIKPTALLLPALFFFPHAYAPAADLSENKAAGFALFKNKSPDTESVKLKPKFPVRIDTQDSEIKDMVEEHLPLITQQQEEVLDKEQTGFLAEEASDNVKTMLRSKGYFSSKVSLTEKDGAYTVHITPGPRTKIANVGVAILGDILSDGNLAEYYRNALENWQQPVGSDFDQDSWENSKTSVLGAVTRKAYPLAKLGNTRAAVNPDTATADLNVVVDSGRPIAFGDFEITGTQRYPEQIVSGLARFQPGTPYDLDLLLDFQQALEQNGHYSGASVQADFDRLQGDRVPVKVSVTEVKRHKLETGIRLDSEYGLGGKIAYDYYNLFNKGYIGSVVWDMDKYETTLAAGISQPRNYRGNYWTSNVSYNRSTTQNLEKRAFSGGIWYVRDRAGIDARLGAEFLAEGRKIPGSDIDLGNSHATMLTASWKRQLLNNVLHPENGHYLDGKIGTTLGAFLSSTALIRTSARAGYFFTPENKKLGTFIIRGQAGYTVARDNANVPSGLMFRSGGASSVRGYELDSIGLAGPNGSVLPERALLVGSLEYQLPFTRTLSGAVFHDMGDAAANFKRMKLKHGSGLGVRWFSPLAPFSFDIAYGHSDKKIRWHISLGTRF

SEQ ID NO: 23905 - protein, 348 aa, Neisseria meningitidis
MKMQAVVVNKNVAGDVEIVEREVRPLEYGEALVEVEYCGVCHTDLHVAAGDYGEKPGRVLGHEGIGLVKEVADGVKNLKVGDRVSIAWLFQSCGSCEYCNTGRETLCRSVLNAGYTADGGMATHCIVSADYAVKVPEGLDPAQASSITCAGVTTYKAIKVSSVRPGQWIAIYGAGGLGNLGVQYAKKVFGAHVVAIDINDDKLAFAKETGADLVVNAAKEDAAKVIQEKTGGAHAAVVTAVSAAAFNSAVNCVRAGGRVVAIGLPPESMDLSIPRLVLDGIEVVGSLVGTRKDLEEAFQFGAEGLVVPKVQLRALDEAPAIFQEMREGKITGRMVIDMKKECGCGHHH

SEQ ID NO: 23906 - protein, 56 aa, Neisseria meningitidis
LGLGSTCVCCIFGRNSGFEKIGRILINGMRGVAMGAVAGGINGYAGSTGKNTDIRR

SEQ ID NO: 23907 - protein, 728 aa, Neisseria meningitidis
LSRCLKQTVRHVMPSETGADAAKPSDGIACPLRPNNNHLWENLMPEQNRILCRELSLLAFNRRVLAQAEDKNVPLLERLRFLCIVSSNLDEFFEVRMAWLKRENKLHPRRRLDNGKMPSETIADVTEAARSLIRHQYDLFNNVLQPELAQEGIHFYRRRNWTDTQKKWIENYFDRELLPILTPIGLDPSHPFPRPLNKSLNFAVELDGTDAFGRPSGMAIVQAPRILPRVVPLPSELCGGGHGFVFLSSILHAHVGKLFPGMNVKGCHQFRLTRDSDLTVDEEDLQNLRAAIQNELHDREYGDGVRLEVADTCPAYIHDFLLSQFKLTAAELYQVKGPVNLVRLNAVPDLVNRPDLKFPPHTPGRLKALGKTASIFDLVRQSPILLHHPYQSFDPVVEMMREAAADPDVLAVKMTIYRTGTRSELVRALMKAALAGKQVTVVVELMARFDEANNVNWAKQLEEAGAHVVYGVFGYKVHAKMALVIRREDGVLKRYAHLGTGNYHQGTSRIYTDFGIITADEQITADVNTLFMEITGLGKPGRLNKLYQSPFTLHKMVIDRIARETEHAKAGKPARITAKMNSLIEPTVIEALYRASAAGVQIDLIVRGMCTLRPGVKGLSENIRVRSIIGRQLEHARVYCFHNNGADDTFISSADWMGRNFFRRIETAAPIAAPELKKRVIREGLEMALADNTHAWLMQPDGGYIRAAPAEGESEADLQNDLWTLLGG

SEQ ID NO: 23908 - protein, 642 aa, Neisseria meningitidis; identical to SEQ ID NO: 15324

SEQ ID NO: 23909 - protein, 931 aa, Neisseria meningitidis
MSNRPTLLLVDGSSYLYRAYHAMGQNLTAPDGAPTGALYGVLNMLRRLRSEYPHDYCAVVFDAKGKNFRHQMFEEYKATRPPMPDDLRPQAEALPDLVRLTGWPVLVIGQVEADDVIGTLAKQGAEHGLRVIVSTGDKDMAQLVDERVTLVNTMSSETLDIEGVKAKFGVRPDQIRDYLALMGDKVDNVPGVEKCGPKTAVKWLEAYGSLAGVMEHASEIKGKVGENLQAALPQLPLSYDLVTIKTDVDLHAELSDGIESLRRTTPKWAQLVVDFKRWGFRTWLKEAESNMNTGSTDDLFGSDSIGEQAALNAEMPFEKQAEKATAPEKLDYQAVTTEAQFAALLDKLSRADTIGIDTETTSLDAMNASLVGISIAFQAGEAVYIPVGHSLTAAPEQLDLQDVLGRLKPHLENPALKKIGQNLKYDQHVFANYGIALNGIAGDSMLASYIIESHLGHGLDELSGRWLGLETITYESLCGKGAKQISFADVAIGQATEYAAQDADFALRLEAHLRAQMDAKQLEMYEKMELPVAQVLFEMERNGVQIDRAELARQSAELGAELMKLEQEAYAAAGQPFNLNSPKQLQEILFDKMGIPTKGLKKTAKGGISTNEAVLEQLAPDYPLPKIILQNRSLAKLKSTYTDKLPEMISPKDGRVHTTYAQAVAITGRLASNNPNLQNIPIRTAEGRRVRRAFTAPQGSVIVSADYSQIELRIMAHLSGDKTLIAAFQNGEDVHRRTAAEVFGTAPENVSPEQRRYAKTINFGLIYGMGQYGLAKSLGIDNLSAKNFIDRYFARYPGVAEYMQRTKEQAAAQGFVETLFGRRLYLPDIRNKNANARAGAERAAINAPMQGTASDLIKRAMIDVSRWLVSDDLKSKLIMQVHDELVLEVVETELDFVKEKLPQIMAKVGGGLLDVPLVAEVGVGENWEEAH

SEQ ID NO: 23910 - protein, 56 aa, Neisseria meningitidis; identical to SEQ ID NO: 14523

SEQ ID NO: 23911 - protein, 46 aa, Neisseria meningitidis; identical to SEQ ID NO: 14880

SEQ ID NO: 23912 - protein, 384 aa, Neisseria meningitidis
LLEQDMSQNASVGIVMPQKIPFEMPLVLENGKTLPRFDLMIETYGELNAEKNNAVLICHALSGNHHVAGRHSAEDKYTGWWDNMVGPGKPIDTERFFVVGLNNLGGCDGSSGPLSINPETGREYGADFPVVTVKDWVKSQAALADYLGIEQWAAVVGGSLGGMQALQWAISYPERVRHALVIASAPKLSTQNIAFNDVARQAILTDPDFNEGHYRSRNTVPARGLRIARMMGHITYLAEDGLGKKFGRDLRSNGYQYGYGVEFEVESYLRYQGDKFVGRFDANTYLLMTKALDYFDPAADFGNSLTRAVQDVQAKFFVASFSTDWRFAPERSHELVKALIAAQKSVQYIEVKSAHGHDAFLMEDEAYMRAVAAYMNNVYKECQQ

SEQ ID NO: 23913 - protein, 177 aa, Neisseria meningitidis; identical to SEQ ID NO: 3663

SEQ ID NO: 23914 - protein, 117 aa, Neisseria meningitidis; identical to SEQ ID NO: 16023

SEQ ID NO: 23915 - protein, 114 aa, Neisseria meningitidis; identical to SEQ ID NO: 53

SEQ ID NO: 23916 - protein, 77 aa, Neisseria meningitidis; identical to SEQ ID NO: 760

SEQ ID NO: 23917 - protein, 759 aa, Neisseria meningitidis; identical to SEQ ID NO: 6857

SEQ ID NO: 23918 - protein, 60 aa, Neisseria meningitidis; identical to SEQ ID NO: 15672

SEQ ID NO: 23919 - protein, 136 aa, Neisseria meningitidis; identical to SEQ ID NO: 19752

SEQ ID NO: 23920 - protein, 99 aa, Neisseria meningitidis; identical to SEQ ID NO: 5992

SEQ ID NO: 23921 - protein, 293 aa, Neisseria meningitidis
MCIEMKFIFFVLYVLQFLPFALLHKIADLTGLLAYLLVKPRRRIGEINLAKCFSEWSEEKRKTVLKQHFKHMAKLMLEYGLYWYAPAGRLKSLVRYRNKHYLDDALAAGEKVIILYPHFTAFEMAVYALNQDIPLISMYSHQKNKILDEQILKGRNRYHNVFLIGRTEGLRALVKQFRKSSAPFLYLPDQDFGRNDSVFVDFFGIQTATITGLSRIAALANAKVIPAIPVREADNTVTLHFYPAWKSFPGEDAKADAQRMNRFIEDRVREHPEQYFWLHKRFKTRPEGSPDFY

SEQ ID NO: 23922 - protein, 264 aa, Neisseria meningitidis; identical to SEQ ID NO: 14473

SEQ ID NO: 23923 - protein, 289 aa, Neisseria meningitidis
MKERIVGQSGELFCFGQMPVWKAENLPEILLSGYSSEGGEWVCLNVLQGDVEVRTQDGAAEVWSAESGDCVFAPQQVFSVKPKTDDAEIRLSMYCTAADYFHKKYGMSATHSAVVAAQDTVPAGRALDMGCGQGRNALFLGLKGFDVTAADHNPAALANVAELAEAEGLNVRTLEYDLNAAALQGEFDYIVATVVLMFLMPQRVPDVIADMQAHTAAGGYNLIVSAMDTADFPCPMPFPFKFKEGELKDYYRDWELVEYKEELGSMHAKDENGNPIRFKFVTMLAKKPE

SEQ ID NO: 23924 - protein, 348 aa, Neisseria meningitidis; identical to SEQ ID NO: 7607

SEQ ID NO: 23925 - protein, 264 aa, Neisseria meningitidis
MTLPMQETRFSILLDELAAKQEAAIAPHLLADGTKVWVRKAGRHNARWRYALLGMVARYLKLGVLKPVPSLGGEPAIATESKRLYELRSAGIAVPELLAVRKNALMFGNLAGIPLDTQIRQEAEAGKADAWLAGLEAIARVHKKQQFLSQAFARNMMSDGKNISFLDFEDDPSEVLTIAQCQARDWLCYIHSTALILKNGGLLEAAAEKWGGVLSEQPAEIQRLIAATVKPILPIRRLEHPRWGRDALRLAASISLISLADIPP

SEQ ID NO: 23926 - protein, 144 aa, Neisseria meningitidis; identical to SEQ ID NO: 6930

SEQ ID NO: 23927 - protein, 481 aa, Neisseria meningitidis; identical to SEQ ID NO: 15075

SEQ ID NO: 23928 - protein, 61 aa, Neisseria meningitidis
LLDYFQDSVPREPDYTKKPPSCKAVLKSPVKADTTIAKLEQEAAKAGLSKTALLERLVGIC

SEQ ID NO: 23929 - protein, 175 aa, Neisseria meningitidis; identical to SEQ ID NO: 7725

SEQ ID NO: 23930 - protein, 251 aa, Neisseria meningitidis
MGRLLLGSIRMSIIVENLTVSYRRRPAVHHVDITFEEHSMWAVFGPNGAGKSTFLKSLMGLQPIDTGSIRLDGLSRQDIAYLPQQSDIDRSQPMTVFDLAAMGLWYEIGFFKGINAVQKQRVHEALERVGMRQFARRQIAHLSNGQFQRVLFARMLVQNAKFLLLDEPFNAVDARTTYELLDVLQKCHCGGHAIIAVLHDYEQVRAYFPSTLLLAREKIAAGATETILTEPYLAQANAKMQQQESPDWCAS

SEQ ID NO: 23931 - protein, 98 aa, Neisseria meningitidis; identical to SEQ ID NO: 3727

SEQ ID NO: 23932 - protein, 141 aa, Neisseria meningitidis; identical to SEQ ID NO: 6006

SEQ ID NO: 23933 - protein, 417 aa, Neisseria meningitidis
MRKPRITHLDVWANDERIGTLEKGAMYRFTYDNPGSPLLGLHYQDRGKVYISNNMPHIFAQYFPEGFLDAHITSKYAFHDAPFEDNEMLRLAILCRETLGRIHVRCNDPLFNEWIDGLEMKNPRILTERDLLGINARQVFQQYMAEIFHHGRFVSVSGIQQKMSLEAIRRNTKQTASYIAKGFDASEYPCLAANEFLCMQTIKQAGIAVAQTSLSEDSSVLLVRRFDVSEQGYFLGMEDFTSLRQYSVEDKYKGSYAAIAQIIRQISGRPDEDLIHFFNQLAASCILKNGDAHLKNFSVLYHDEYDVRLAPVYDVLDTSIYRVGTQGIFDAYDDTLALNLTNHGKKTYPSKNTLLDFAEKYCDLGREDASFMIDTIVQAKEQVLVKYSDVLRENEWLAQKWHFIPDENEEGLPFTFR

SEQ ID NO: 23934 - protein, 201 aa, Neisseria meningitidis; identical to SEQ ID NO: 6159

SEQ ID NO: 23935 - protein, 269 aa, Neisseria meningitidis
MAKIGNFAVKSMIEIRSKRMITLPSLNNLPSKWDEIRYWLETRVCECGVMPHPNLTECEAGQFDRDFWDNIGCAPEEYVRIRRAIRLLEARYPDSLNELVCAAIATPLGEMLAVFGNKGLCLLEFVGQKHLEQEIAAVQKALRGRFVFREDERTQLLRQELDLYFKGRLKTFATPLEQIGTEFQKQAWDALLAIPYGETRSYKEQAQRLGNPKAVRAVAAANGQNKVSVLIPCHRVIGSDGKLTGYAGGLNRKQFLLALERGEVQTALF

SEQ ID NO: 23936 - protein, 66 aa, Neisseria meningitidis; identical to SEQ ID NO: 587

SEQ ID NO: 23937 - protein, 150 aa, Neisseria meningitidis; identical to SEQ ID NO: 13725

SEQ ID NO: 23938 - protein, 117 aa, Neisseria meningitidis; identical to SEQ ID NO: 408

SEQ ID NO: 23939 - protein, 120 aa, Neisseria meningitidis
MARIAGVNIPNNAHIVIGLQAIYGIGATRAKLICEAANIAPDTKAKDLDETQLDALRDQIAKYEVEGDLRREVTMSIKRLMDMGCYRGFRHRRGLPCRGQRTRTNARTRKGPRKAIAGKK

SEQ ID NO: 23940 - protein, 101 aa, Neisseria meningitidis; identical to SEQ ID NO: 705

SEQ ID NO: 23941 - protein, 122 aa, Neisseria meningitidis; identical to SEQ ID NO: 3754

SEQ ID NO: 23942 - protein, 163 aa, Neisseria meningitidis
LKNHPPVAAFPPQEEMEHFMREALRQAEQSAADGEIPVGAVIVSDGKIIASAHNTCIADCNVSCHAEINALAQAGSEMQNYRLDGCDIYITLEPCAMCASALIQARIRRVIYGAAEPKTGAAGSIVNLFADKRLNTHTAIRGGILQEECRAVLNRFFQNKRKG

SEQ ID NO: 23943 - protein, 42 aa, Neisseria meningitidis; identical to SEQ ID NO: 6907

SEQ ID NO: 23944 - protein, 182 aa, Neisseria meningitidis; identical to SEQ ID NO: 977

SEQ ID NO: 23945 - protein, 185 aa, Neisseria meningitidis
LMNNMFAAKLSKLVYTASDHPDSLSEMEEFDRLILLIRKLYQILDGQHILSRVTVCLHHQNRRDLIALDKAAAGCDSAMLRAQRWLIYTQIAERLAGSGGGFTVTVESVSAACPELEGRYLELVRRAAVSFGFTQGWENPAGGQEKTQAVPDAASGHSVRKPIKINIEARVERYPAYCPTVALKV

SEQ ID NO: 23946 - protein, 168 aa, Neisseria meningitidis; identical to SEQ ID NO: 7876

SEQ ID NO: 23947 - protein, 237 aa, Neisseria meningitidis
MMVYIMNAFDIKSTKMDVLSISLHTSDLFDLEDVLVKLGKKFQESGVVPFVLDVQEFDYPESLDLAALVSLFSRHGMQILGLKHSDERWAAAAMKYHLLFCLSHSENVKELGQVEVQKTEDGQKARKTVLITSPVRTGQQVYAEDGDLIVTGAVSQGAELIADGNIHIYAPMRGRALAGAKGDTSARIFIHSMQAELVSVAGIYRNFEQDLPDHLHKQPVQILLQDNRLVISAIGSE

SEQ ID NO: 23948 - protein, 92 aa, Neisseria meningitidis; identical to SEQ ID NO: 1005

SEQ ID NO: 23949 - protein, 107 aa, Neisseria meningitidis; identical to SEQ ID NO: 7198

SEQ ID NO: 23950 - protein, 454 aa, Neisseria meningitidis
MQHLTERMTQIAKLLNSSANNPDIDIPDFLTEIKDYSEFSVTDENGTYLHWDKFRRIHTEDTRMKWRAVKESRKKIQKPIDFPFEHQFWFCIPDSLQARLHLIDKSCGSSIGTSSLGGFGRSEQNRFLLKSLIMEEAITSAQLEGAATTRKVAKDMLKSQRKPKTKDEIMIVNNYHLMKKAVELKNTPLSVEMILDLHRIATSNAIENKAEPGQFRQDDEIFIADINGNSLYQPPPHGQVHTLMEEVCAFANNTYDGVENPFIHPVVQAIILHFLIGYIHPFGDGNGRTARALFYWFMLKNGYWLFEYISISRLLKNAPAQYAKSYLYAETDDLDLTYFIYYQCDIIKRAVADLEHYISDKQKHQQEFKAAIAQYTEKIGKLNQRQIGILQKAVEESGKIFTAQEIANQYGISLNTARSDLSKLGEYRFLVPFKSGNALEYVAPQDLLERLEKK

SEQ ID NO: 23951 - protein, 353 aa, Neisseria meningitidis
MSTFFRQTAQAIIAKHIDRFPLLKLDRVIDWQPIEPYLNRQKPVTSEITAAVPPIPCCPCSKPSCSDNGTASPIPNSNTASLPASTSTCFAVSTNASPITAPYAATATGWRKTIPCLNCWNLTANPKKVKRKHPLPSLTPPLFRPPAANSVRPKLTKKDKSAVKPHRVRTKMPVGRKTASTNSVTNNIPVPMRKAISRNCTLPPPMPMSANTCRRCWKDCPKVRPSMPTKATTVRKTGNIWKNISCWTALCAKPAATVRRKRKPNATGICRRPVIVDIIRTRRRSSRQYKYGKARQRRTGLNLIHYMWSNRASVRCTVNSAMRGQPISDLKVRKATRRCVTCKPPTGVRPLPP

SEQ ID NO: 23952 - protein, 179 aa, Neisseria meningitidis; identical to SEQ ID NO: 403

SEQ ID NO: 23953 - protein, 514 aa, Neisseria meningitidis
MNMVSKLDKYWQHPALYWPLLILFAAATPFTFAPYYHFWLMPLIFGAFVRLIELRPRFAVSSAYLFGLTAYTTQFYWIHTALHDVSGLPDLYAVPLTFLLPAYLALYPALCFWLWKKFTLPRGIKIGLVLPILWTLTEFARERFLTGFGWGAIGYSQITPDSPLAGFAPLGGIHMVTLATAFLGVWLVLASNNTARSGKRLLPIILIAALLAAGYTARQTDFTRPDGSRSTVALLQGNIDQTLKWREDQVIPTIQKYYEQVGKTTADIVILPETAIPVMRQNLPENILAKFAEQAQNNGSALAVGISQYTSDGNGYENAVINLTGYQENNQDGIPYYAKNHLVPFGEYKPLPFLTTPLYKMMDMPLSDFRKGGGKQSALLMKNQKIAFNICYEDGFGDELIAAAKDATLLANASNMAWYGKSNAMYQHLQQSQARAMELGRYMVRATNTGATAIISPKGNIIAQAQPDTETVLEGHIKGYVGETPYMKTGSSWWLMGILALAALILFIFRNKEH

SEQ ID NO: 23954 - protein, 182 aa, Neisseria meningitidis; identical to SEQ ID NO: 3766

SEQ ID NO: 23955 - protein, 478 aa, Neisseria meningitidis
LENSLIIGLALAVLLVLLVMRAKQGKKTPKRKSQGVGNTQGQPPGSNDSDWVDQIGQSVSDGTQPDWSWNESAETASAAVSAQEVDPLTEYQVYKQFGYQGKAAESLAAYLDGIPDGEAKPENLIRELLDINLEVGDVDVLADNLQKYGKLIPSELLAKYIEQALQRDSNHLRIRVLAEEGLGWGTQEIEKRAEGGSATAASASPPPDAGGKAYEAEEIKRIPIVRGKKDVSGISQEEIGAIAGLVRADQGAKILKDKVSYETASKQYDRAIQTSEKPANLIIDALKLDYQYADIDRFAGHLWKLYQTLGNYGRQVKERMLGWGYSLGYHEVFDDLEKGPNDRQIKDIGMGHGYLPKNIQKFKSQHRDLVLQDSSLINTGSSPADDAVKEVESLLMYGQIEAAMDVLEQAVLKYPDESQLYITLIDIYERTEDWDRLGQFLRVLRERADRLPEEVVMLMSRLLQRMNQNIKKIKRYGK

SEQ ID NO: 23956 - protein, 452 aa, Neisseria meningitidis
MKPLDLNFICQALKLPMPSESKLVSRIVTDSRDIRAGDVFFALAGGRFDAHDFVEDVLAAGAAAVVVSREDCASLKDALKVDDTLAALQTLAKAWRENVDPFVFGITGSVGKTTVKEMLAAVLRRRFGDNAVLATAGNFNNHIGLPLTLLKLNEKHRYAVIEMGMNHFGELAVLTQIAKPDAALVNNALRAHVGCGFDGVGDIAKAKSEIYQGLCSDGMALIPQEDANMAVFKTATLNLNTRTFGVDSGDVHAENIVLKPLSCEFDLVCGDERAAVVLPVPGRHNVHNAAAAAALALAAGLSLNDVAEGLQGFSNIKGRLNVKSGIKGATLIDDTYNANPDSMKAAIDVLARMPAPRIFVMGDMGELGEDEAAAMHAEVGAYARDQGIEAAYFVGDNSVEAAEKFGADGLWFAAKDPLIQVLRHDLPERATVLVKGSRFMQMEEVVEALEDK

SEQ ID NO: 23957 - protein, 193 aa, Neisseria meningitidis; identical to SEQ ID NO: 640

SEQ ID NO: 23958 - protein, 275 aa, Neisseria meningitidis
LRCFMERIDLALNLVKERSRLGYSRKNFAEQTGCSAESLRLYESGQVNIPADFLLAAVQLGVDIQFVFTGIHSANLNAVSDDLNKKLDDAIGKSNVENQINGNVSNAVIASSGSVVHQINTQNHVIRTRVDSKPGKEHITLEQASKLQQLVKQVAAAEEIAKRSPKSIRAIWASLNAHCKVPSYKLIALSDYDKAETYLRKWLGRLSNTATSKNNDPDWRKKKYAYIKLNVKQLELEDWLKSYLEKNFAVESLTELSNDDLQKTYAAVSTKKRKK

SEQ ID NO: 23959 - protein, 159 aa, Neisseria meningitidis
MRKSRLSQYKQNKLIELFVTGVTARTAAELVGVNKNTAAYYFHRLRLLIYQNSPHLEMFDGEVEADESYFGGQRKGKRGRGAAGKVAVFGLLKRNGKVYTVTVPNSNRYFISYYPTSETQHCLYGLLSLCIRCARIPFLRNFVFVSITAHILPNDKTIL

SEQ ID NO: 23960 - protein, 130 aa, Neisseria meningitidis; identical to SEQ ID NO: 1661

SEQ ID NO: 23961 - protein, 163 aa, Neisseria meningitidis
MRAVIQKTVGAKVDVVSENGTETCGKIDGGFVVLLGVTHSDIEKDARYVADKIAHLRVFEDEAGKLNLSLKDVGGSVLLVSQFTLYADAASGRRPSFSQAAPAEQAQQLYLRTAELLRGHGIHVETGRFRTHMQVSLCNDGPVTILLDSFMTRISPKMKVVPD

SEQ ID NO: 23962 - protein, 206 aa, Neisseria meningitidis; identical to SEQ ID NO: 1193

SEQ ID NO: 23963 - protein, 221 aa, Neisseria meningitidis; identical to SEQ ID NO: 3662

SEQ ID NO: 23964 - protein, 488 aa, Neisseria meningitidis
MVIFYFCGKTFMPARNRWMLLLPLLASAAYAEETPREPDLRSRPEFRLHEAEVKPIDREKVPGQVREKGKVLQIDGETLLKNPELLSRAMYSAVVSNNIAGIRVILPIYLQQAQQDKMLALYAQGILAQADGRVKEAISHYRELIAAQPDAPAVRMRLAAALFDNRQNEAAADQFDRLKAENLPPQLMEQVELYRKALRERDAWKVNGGFSVTREHNINQAPKRQQYGKWTFPKQVDGTAVNYRLGAEKKWSLKNGWYTTAGGDVSGRVYPGNKKFNDMTAGVSGGIGFADRRKDAGLAVFHERRTYGNDAYSYTNGARLYFNRWQTPKWQTLSSAEWGRLKNTRRARSDNTHLQISNSLVFYRNARQYWMGGLDFYRERNPADRGDNFNRYGLRFAWGQEWGGSGLSSLLRLGAAKRHYEKPGFFSGFKGERRRDKELNTSLSLWHRALHFKGITPRLTLSHRETRSNDVFNEYEKNRAFVEFNKTF

SEQ ID NO: 23965 - protein, 47 aa, Neisseria meningitidis; identical to SEQ ID NO: 3740

SEQ ID NO: 23966 - protein, 120 aa, Neisseria meningitidis; identical to SEQ ID NO: 6845

SEQ ID NO: 23967 - protein, 362 aa, Neisseria meningitidis; identical to SEQ ID NO: 6713

SEQ ID NO: 23968 - protein, 181 aa, Neisseria meningitidis; identical to SEQ ID NO: 3765

SEQ ID NO: 23969 - protein, 183 aa, Neisseria meningitidis
MKVLNGWSDRKMWRVLSALPIGVVFFDLIYGFVLNVLQGFDLQRAVPDSEGVLAVTPDIAFNSLQIVANGGMAAVVCFGLAVVFLLNRSVRRRQVLEIGVFRMLGLVAVLAFSAPSLWEWANALPLLLNGADVVNTGNARYVLTALCMPFPAVSCVIGLVGRFRLQTASGRAAKAGGAGKADG

SEQ ID NO: 23970 - protein, 374 aa, Neisseria meningitidis
VCGLCHKTVPAPIAGASGDWKSCLKNVQCRTFLKRGPIMHIGGYFIDNPIALAPMAGITDKPFRRLCREFGAGWAVCEMLTSDPTLRNTRKTLHRSDFVDEGGIVAVQIAGSDPQQMADAARYNVSLGAQLIDINMGCPAKKVCNVQAGSALMQNEPLVAAILEAVVRAAGVPVTLKTRLGWHDDHQNLPVIAKIAEDCGIAALAVHGRTRTQMYKGEARYELIAETKCRLNIPVWVNGDITSPQKAQAVLKQTAADGIMIGRGAQGRPWFFRDLKHYAEHGVLPPALSLAECAAAILNHIRAIHAFYGDTAGVRIARKHIGWYIDEMPDGEQTRREINRLDSAAAQYDMLAGYLERLAEKTDSWACAYRPNAF

SEQ ID NO: 23971 - protein, 307 aa, Neisseria meningitidis; identical to SEQ ID NO: 7794

SEQ ID NO: 23972 - protein, 144 aa, Neisseria meningitidis; identical to SEQ ID NO: 1668

SEQ ID NO: 23973 - protein, 71 aa, Neisseria meningitidis; identical to SEQ ID NO: 1785

SEQ ID NO: 23974 - protein, 135 aa, Neisseria meningitidis; identical to SEQ ID NO: 1686

SEQ ID NO: 23975 - protein, 105 aa, Neisseria meningitidis; identical to SEQ ID NO: 3792

SEQ ID NO: 23976 - protein, 247 aa, Neisseria meningitidis; identical to SEQ ID NO: 15777

SEQ ID NO: 23977 - protein, 326 aa, Neisseria meningitidis; identical to SEQ ID NO: 7891

SEQ ID NO: 23978 - protein, 111 aa, Neisseria meningitidis; identical to SEQ ID NO: 7149

SEQ ID NO: 23979 - protein, 164 aa, Neisseria meningitidis; identical to SEQ ID NO: 7730

SEQ ID NO: 23980 - protein, 242 aa, Neisseria meningitidis; identical to SEQ ID NO: 15784

SEQ ID NO: 23981 - protein, 273 aa, Neisseria meningitidis; identical to SEQ ID NO: 7740

SEQ ID NO: 23982 - protein, 124 aa, Neisseria meningitidis; identical to SEQ ID NO: 3797

SEQ ID NO: 23983 - protein, 99 aa, Neisseria meningitidis; identical to SEQ ID NO: 7743

SEQ ID NO: 23984 - protein, 99 aa, Neisseria meningitidis; identical to SEQ ID NO: 1679

SEQ ID NO: 23985 - protein, 421 aa, Neisseria meningitidis
MSHLFRKEVFVAQQNKWTGQVILTRPFSFLFLTFCAFLIALCIIIFLIFGSYTNKTTVEGQLLPIMGVVRVYSSDIGTITHKFVEDGNFVKAGEPLFKLSTSRFGEKGNVQAKLAAEANLKKTLALQELERLKRIHQNEQKNVHNNIHRLNNQLENIKQQITGQNRQIRLAEKTLNKNKFLASQGAVSQQDKMTAESHLLEQRSRLESLKREQNNAIRELDEQKITLSSLPERHKTELSQLNRAITEMNQEILDFDLKSEQTIRASKSGYISTINVDIGQQVEPSKLLLSIVPEQTELVANLYIPSKAVGFIKPKDKVVLRYQAYPYQKFGHATGEIISVARTALGKQELSGLGIIFTNPTLLNEPAYLVKVKLEKQTIKAYGENKPLQIGMILEADILHERKKLYEWVLDPLYSISGKIN

SEQ ID NO: 23986 - protein, 308 aa, Neisseria meningitidis
MKVIFAGTPDFAAAALRAVAAAGFEIPLVLTQPDRPKGRGMQLTAPPVKQAALELGLRVEQPEKLRNNAEALQMLKEVEADVMVVAAYGLILPQDVLDVPKHGCLNIHASLLPRWRGAAPIQRAIEAGDAETGVCIMQMDIGLDTGDVVSEHRYAIRPTDTANEVHDALMEIGAAAVVADLQQLQSKGRLNAVKQPEEGVTYAQKLSKEEARIDWSESAAVIERKIRAFNPVPAAWVEYQGKPMKIRRAEVVAQQGTAGEVLSCSADGLVVACGENALKITELQPAGGKRMNIAAFAAGRHIEAGTKL

SEQ ID NO: 23987 - protein, 106 aa, Neisseria meningitidis; identical to SEQ ID NO: 7757

SEQ ID NO: 23988 - protein, 290 aa, Neisseria meningitidis; identical to SEQ ID NO: 1540

SEQ ID NO: 23989 - protein, 119 aa, Neisseria meningitidis; identical to SEQ ID NO: 7767

SEQ ID NO: 23990 - protein, 483 aa, Neisseria meningitidis; identical to SEQ ID NO: 5802

SEQ ID NO: 23991 - protein, 674 aa, Neisseria meningitidis; identical to SEQ ID NO: 7403

SEQ ID NO: 23992 - protein, 363 aa, Neisseria meningitidis
MMKIKALMIAAALLAAADVHAAPQKAKTASAKAAKAAKVAKVAKVAKVAKVAKVAKVAKVAKVAKVAATAQKEAAPAQQQGGIRFSDGIAAVADNEVITRRRLAEAVAEAKANLPKDAQISESELSRQVLMQLVNQSLIVQAGKRRNIQASEAEIDAVVAKNPALKNLSPAQRRDFADNIIAEKVRQQAVMQNSRVSEAEIDAFLEQAQKQGITLPEGAPLRQYRAQHILIKADSENAAVGAESTIRKIYGEARSGTDFSSLARQYSQDASAGNGGDLGWFADGVMVPAFEEAVHALKPGQVGAPVRTQFGWHIIKLNEVRDAGTPQERIRNSVRQYIFQQKAEQATVNLLRDLHSGAYVDIR

SEQ ID NO: 23993 - protein, 792 aa, Neisseria meningitidis
VLALGLCFGTHCAAADAVAAEETDNPTAGGSVRSVSEPIQPTSLSLGSTCLFCSNESGSPERTEAAVRGSGEASIPEDYTRIVADKVEGQSQVQVRAEGNVVVERNRTTLNTDWADYDQSGDTVTAGDRFALQQDGTLIRGETLTYNLEQQTGEAHNVRMETEQGGRRLQSVSRTAEMLGEGHYKLTETQFNTCSAGDAGWYVKAASVEADREKGIGVAKHAAFVFGGVPLFYTPWADFPLDGNRKSGLLVPSLSAGSDGVSLSVPYYFNLAPNLDATFAPGVIGERGAVFDGQVRYLRPDYAGQSDLTWLPHDKKSGRNNRYQAKWQHRHDISDTLQAGVDFNQVSDSGYYRDFYGNKEIAGNVNLNRRVWLDYGGRAAGGSLNAGLSVLKYQTLANQSGYKDKPYALMPRLSADWRKNTGRAQIGVSAQFTRFSHDSRQDGSRLVVYPDIKWDFSNSWGYVRPKLGLHATYYSLNRFGSQEARRVSRTLPIVNIDSGMTFERNTRMFGGGVLQTLEPRLFYNYIPAKSQNDLPNFDSSESSFGYGQLFRENLYYGNDRINTANSLSAAVQSRILDGATGEERFRAGIGQKFYFKNDAVMLDGSVGKKPRSRSDWVAFASSGIGSRFILDSSIHYNQNDKRAENYAVGASYRPAQGKVLNARYKYGRNEKIYLKSDGSYFYDKLSQLDLSAQWPLTRNLSAVVRYNYGFEAKKPIEVLAGAEYKSSCGCWGAGVYAQRYVTGENTYKNAVFFSLQLKDLSSVGRNPADRMDVAVPGYITAHSLSAGRNKRP

SEQ ID NO: 23994 - protein, 214 aa, Neisseria meningitidis; identical to SEQ ID NO: 1743

SEQ ID NO: 23995 - protein, 82 aa, Neisseria meningitidis; identical to SEQ ID NO: 1744

SEQ ID NO: 23996 - protein, 65 aa, Neisseria meningitidis; identical to SEQ ID NO: 3913

SEQ ID NO: 23997 - protein, 149 aa, Neisseria meningitidis; identical to SEQ ID NO: 628

SEQ ID NO: 23998 - protein, 216 aa, Neisseria meningitidis; identical to SEQ ID NO: 7775

SEQ ID NO: 23999 - protein, 387 aa, Neisseria meningitidis
MSEQLPVAVATETKAERKKPKKKSWIKKLSPLFWVTVIIPTVISLVYFGFFASDRFTSQSSFVVRSPKSQSSLNGLGAILQGTGFARAQDDIYTVGEYMRSRSSLDELRKILPVREFYETKGDVFSRFNGFGFRGEEEAFYQYYKDKLNINFDAISGISTLNVTSFDALESKKINEALLKQGEALINQLNDRARSDTVRYAEEVVKTAEERVKETSQNLTNYRISNGVFDLKAQSEVQMGLVSKLQDELIVIQTQLDQVKAVTPENPQIPGLQAREKSLRKEINQQLRAISGGGQSSLSNQAADYQRVYLENQLAEQQLAAAMTSLESAKAEADRQQLYLEVISQPSLPDLAHEPKRLYNIVATLIIGLMVYGILSLLTASIREHKN

SEQ ID NO: 24000 - protein, 316 aa, Neisseria meningitidis; identical to SEQ ID NO: 5807

SEQ ID NO: 24001 - protein, 322 aa, Neisseria meningitidis; identical to SEQ ID NO: 1760

SEQ ID NO: 24002 - protein, 68 aa, Neisseria meningitidis; identical to SEQ ID NO: 3821

SEQ ID NO: 24003 - protein, 369 aa, Neisseria meningitidis; identical to SEQ ID NO: 7792

SEQ ID NO: 24004 - protein, 180 aa, Neisseria meningitidis; identical to SEQ ID NO: 3825

SEQ ID NO: 24005 - protein, 213 aa, Neisseria meningitidis; identical to SEQ ID NO: 9820

SEQ ID NO: 24006 - protein, 155 aa, Neisseria meningitidis
MQIDNISDEQVVIVRMSCYLKKDEIFKNIERYGYQSSDIKKISPPFPLNILPAPKPYYFYLYDTHLNQIYDLAWSCNDFLMFEIFILDRESIKYIDKDKLFKSGETLYSNFKSIKNQCKNYFFCGFDFDAPYFKSGVSQVADYNFVPDAFSLFFI

SEQ ID NO: 24007 - protein, 104 aa, Neisseria meningitidis; identical to SEQ ID NO: 1772

SEQ ID NO: 24008 - protein, 186 aa, Neisseria meningitidis; identical to SEQ ID NO: 9825

SEQ ID NO: 24009 - protein, 134 aa, Neisseria meningitidis; identical to SEQ ID NO: 1773

SEQ ID NO: 24010 - protein, 136 aa, Neisseria meningitidis; identical to SEQ ID NO: 1774

SEQ ID NO: 24011 - protein, 145 aa, Neisseria meningitidis; identical to SEQ ID NO: 1775

SEQ ID NO: 24012 - protein, 130 aa, Neisseria meningitidis; identical to SEQ ID NO: 7797

SEQ ID NO: 24013 - protein, 186 aa, Neisseria meningitidis; identical to SEQ ID NO: 7798

SEQ ID NO: 24014 - protein, 106 aa, Neisseria meningitidis; identical to SEQ ID NO: 15845

SEQ ID NO: 24015 - protein, 399 aa, Neisseria meningitidis
LSTFPNHTMHTISFPNRTRLTALPPLSLYIHIPWCIKKCPYCDFNSHSLKNGLPEAAYIDALLTDLQLELPNIWGRPVETIFFGGGTPSLFQAESIDRLLSGVRSLLRLQPEAEITLEANPGTFEIEKFQGFKDAGITRLSIGVQSFNDDMLSRLGRVHNGKEALTAIDTALKLFDKVNIDLMYALPNQTVQTALDDVQTAIATGATHISAYHLTMEPNTPFGHTPPKGLPQDEAALDIEDAVHGALEGAGFVHYETSAFAKPAMQCRHNLNYWQFGDYLGIGAGAHGKISYPDRIERTVRRRHPNDYLALMQSQPGEAVERKTVAAEDLPFEFMMNALRLTDGVPAAMLQERTGVPAAKIMAQIETARQKGLLETDPAVFRPTEKGRLFLNDLLQCFL

SEQ ID NO: 24016 - protein, 109 aa, Neisseria meningitidis; identical to SEQ ID NO: 6762

SEQ ID NO: 24017 - protein, 86 aa, Neisseria meningitidis; identical to SEQ ID NO: 15847

SEQ ID NO: 24018 - protein, 105 aa, Neisseria meningitidis; identical to SEQ ID NO: 5128

SEQ ID NO: 24019 - protein, 129 aa, Neisseria meningitidis; identical to SEQ ID NO: 11676

SEQ ID NO: 24020 - protein, 114 aa, Neisseria meningitidis; identical to SEQ ID NO: 6153

SEQ ID NO: 24021 - protein, 183 aa, Neisseria meningitidis
MEFLSLYPWWSFFIILTIILSYIGFCAHLHIQNRAVFFYSYRDVTIIFLTPVILIALSYLIKNKEILSACILCITLIAFSWAWIITYRSNTKRFFLSLLIVCGKLLLSTIVWAILAISLGLAVITGNSKRKKYERRDRHAERNEKAFIGALLVGFELSRNLLNLCCLHKDFSTPSKNIEVNRS

SEQ ID NO: 24022 - protein, 74 aa, Neisseria meningitidis
VGCRVCFSPLHQKFLENRRESAVLVSAGTVEMGNIDGIDGSGGLKPTLVYWNHCIIATNRPAATRAHPRHTTVA

SEQ ID NO: 24023 - protein, 500 aa, Neisseria meningitidis
MSREMLQLAEALASEKNVDAEVVFQALEFALSTAAKKKADREHMDVRVQINRDTGEYQTFRRWLIVADEDYTYPDVEKTIEEIQEEIPGTAIQIGEYYEEQLPNEGFGRQAAQTAKQIILQRIRDAEREQNLNEFLAVKEDIVSGTVKRVERHGIIVEVVAGKLDALIPRDQMIPRENFRSGDRIRALFLRVEEIGNTGRKQVILSRTSGDFLVKLYANEVPEIADGMLEIRAVARDPGQRAKVAVKANDQRIDPQGTCIGVRGSRVNAVSNELSGERIDVVLWSPEPAQFVMSALSPAEVSRIVIDEDKHAVDVIVAEDQLALAIGRGGQNVRLASDLTGWQLNIMTSAEADERNAAEDAAIRRLFMDHLNVDEETADVLVQEGFATLEEVAYVPAAELLAIEGFDEEIVDMLRNRARDAILTMAIAAEEKLGEVSDDMRNLEGIDADMLRSLAEAGITTRDDLAELAVDELIEITGVNEETAKAVILTAREHWFTEDK

SEQ ID NO: 24024 - protein, 511 aa, Neisseria meningitidis
VSDSKTKERATFGTRRAFMIAAIGSAVGLGNIWRFPYIAFENGGGAFILPYLVALLTAGIPLLLLDYAIGHRYRGSAPLAFRRLGRWFEPVGWWNVMTNIVICIYYAVIIGWAASYTYYSVNAAWGADPQGFFFKDFLQMAGPEALGLDFVGKVAGPLAGVWVFTAAIMALGVQKGVARASSFFMPLLLVMFLIMVGISLTLPGAAKGLDALFTPDWSKLADSKVWVAAYGQIFFSLSICFGIMVTYSSYLKKKTDLGGTGLVVGFANSSFELLAGIGVFAALGFMAQAGGKAVNEVASGGIGLAFIAFPTIINQAPMGWLIGILFFGSLVFAGVTSMISILEVIVAAIQDKLNIGRVNATLLVCIPMGIVSTLLFGTATGLPVLDVMDKFVNTYGIVAAGFVYVAAIIISGRLPELRKHLNALSSIRIGGLWTVCVVVTVVMLGYMLFKDTSGLMEKNYEGYPDGFLSIFGWGMSAALVVFGLLLSLLPWKHGQDFNVKDEHEHEQGDEK

SEQ ID NO: 24025 - protein, 74 aa, Neisseria meningitidis; identical to SEQ ID NO: 7804

SEQ ID NO: 24026 - protein, 121 aa, Neisseria meningitidis; identical to SEQ ID NO: 7805

SEQ ID NO: 24027 - protein, 142 aa, Neisseria meningitidis; identical to SEQ ID NO: 5523

SEQ ID NO: 24028 - protein, 391 aa, Neisseria meningitidis; identical to SEQ ID NO: 2276

SEQ ID NO: 24029 - protein, 451 aa, Neisseria meningitidis
MSDFFHSDVLSVSELNAFAKSILENHLAGLWIAGEVSNLTRAASGHYYFSLKDSRAQVRCAMFKGAAARLAKPLKEGDHIEVSGKISIYEARGEFQITVNEVRLKGLGQLYEAYERLKAQLQAEGAFAAERKKPLPVRPQCIGIVTSLAAAALRDVVTTLKRRAPEIPVIVYPTPVQGAGSELQIAQAIKTASQRAECDVLIVCRGGGSIEDLWAFNEEPVVRAIESCTVPVVSGVGHETDFTLADFVADMRAPTPTGAAELVSPNRQESLHRLAQAQCRLKTVLEQRYFDASQKLDWLARQIRHPRQKLDEQRASIGKLAQTLSYSMTQNVRTHTARFERQTQALKHCRPDVSVCKKNIDRFQTALSHAFHQLLTHRRQSLTAQAALLEAVSPQHILERGFSVVKNTRGQVIRNADVLKQGQKLHIIFADGETDVRVSKEQGQQDLFDCI

SEQ ID NO: 24030 - protein, 117 aa, Neisseria meningitidis; identical to SEQ ID NO: 3854

SEQ ID NO: 24031 - protein, 140 aa, Neisseria meningitidis; identical to SEQ ID NO: 6150

SEQ ID NO: 24032 - protein, 90 aa, Neisseria meningitidis
VFAVIFFSTLGCILAWIRDIPKIKSKKILARSLYIIGIINVIIGYVLIKNILVSVSDEDGTKYLAIYLSNLFFGTVLMYVLVKRLSKKPS

SEQ ID NO: 24033 - protein, 90 aa, Neisseria meningitidis; identical to SEQ ID NO: 11808

SEQ ID NO: 24034 - protein, 173 aa, Neisseria meningitidis
  misc_feature 2, 3, 4: 'Xaa' is any amino acid
VXXXPAASSPCPDLNLIHYKLIELFVAGVTARKAAELVGVNKNTAAYYFHRLRLLIYQNSPHLEMFDGEVEADESYFGGQRKGKRGRGAADKVAVFGLLKRNGKVYTVTVPNTQTATLFPIIREQVKPDSIVYTDCYRSYDVLDVREFSHFSFAETSFSYQSQHTFCRTTKPY

SEQ ID NO: 24035 - protein, 143 aa, Neisseria meningitidis; identical to SEQ ID NO: 2619

SEQ ID NO: 24036 - protein, 37 aa, Neisseria meningitidis; identical to SEQ ID NO: 970

SEQ ID NO: 24037 - protein, 154 aa, Neisseria meningitidis; identical to SEQ ID NO: 15862

SEQ ID NO: 24038 - protein, 814 aa, Neisseria meningitidis
MHHFGRAATSCAAVWMRAFIKNYVLTLLFLKYVSDKHKYGGGMIELHAGTTFDDIVKLKNTADIGDRLNKIIAQIAEANDLKGVIDVTDFNDEDKLGKGKEMIDRLSRLVGIFKKLNLSSNQAEDDDLLGDAYEYLMRHFATESGKSKGQFYTPAEVSRIMAKIIGISADCRPAPAFMTRPAARVRCCSKPPPKPAAKSAFTVRKKMWQPRPLPVIFCTTTKPPKSTPGTPCPIRLSVMKTTGLRPSILPLPIRLIPPEKNGDYAFLLHLLKSLKPSGKGAIILPHGVLFRGNAEARIRTELLNLDLIKGIIGLPANLFYGTGIPACIIVIDKEHAQTAQFAEEGTNQVISGGSVFMIDASRGFIKDGNKNRLREQDIHKIIDTFTNLVTAVWCIAKSQHKITTLICLAISTAEKLKTCKISPPIFMAAYLRTIWTHWKPIGKFAVKTSCLPNTMAALPLYNGIDCKSFPLSTANPAGLVWNLGLIYSPKFNPLNRKQPNQSPYIGAPRLRRLQSRTPGKVCRVAHSKRPCRHPTGQAYPEMERKPAGRVQTRQPDRIRFLPNPDGLLGGNPARRCLSHRPRWLEGGKPGRNHQRKRRREPDRRLGNRNRQKRQSQNQAHQQKIPQRSHRPRAGCPPLLFRRHRQAGRKTKRAGTPKPRIGKPHRRTRRRRGCAERRIGCKRQTFRQTSENRIGRKRHRRRRTGCFTNHPNTDDAGKSRERRSQNPNRSPEPCRIQTIRPTFRSRNQAACRSRQMACRFTKPNRKSLGKQYSAAYQPLEHAGRPLPQPDGRACPRSGKVAKQSQCPPKYGFWRL

SEQ ID NO: 24039 - protein, 92 aa, Neisseria meningitidis; identical to SEQ ID NO: 3856

SEQ ID NO: 24040 - protein, 407 aa, Neisseria meningitidis
VGRRKLWFALAAAGVIGGLVGIVLTELMHFIQHTAYGYGTDGVSISFCEGVAQASGMRRVAVLTLCGAVAGSGWWLLKRFGKPQIEIKAALKQPLQGLPFLTTVFHVLLQIITVGLGSPLGREVAPREMTAAFAFAGGRRLGLDEDEMRLLIACASGAGLAAVYNVPLASTLFILEAMLGVWTQQAVAAALLTSVIATAVARIGLGDVQQYHPANLAVNTSLLWFSAVIGPILGATAVFFQRTAQKFPFIKRDNIKIIPLAVCMFALIGVIAVWFPEILGNGKAGNQLTFGGLTGWQHSLELTAVKWLVVLMALAAGAYGGLITPSMMLGSTISFAAAAAWNSVFPEMPSGSAAVVGAAVFLGVSLKMPLTAIVFVLELTYAPLSLLLPLCIGMAGALGTSGKMGFK

SEQ ID NO: 24041 - protein, 380 aa, Neisseria meningitidis
MSIHLDFGISPKTFRQTYLYQKPKLFKGAVRNLEAASWKDINEIYQRADPTAPLFHLRKKGAIVPKEEYVESFDDLGKTRYRFIKSVIYEHMKNGASLLYNHIIVDITSTALPRLAGAHTIVSGYLAFGSDESYKNHWDTRDVYAIQLFGKKRWQLTAPDFPMPLYMQQTKDTDISIPEHIDMDIILEAGDVLYIPRGWWHRPIPLGCETFHLAVGTFPPNGYNYLEWLMKKFPTIESLRHSFSDWEQDRTRINDTAAQIAAMIADPVNYEAFSEDFLGKERTDTAFHLEQFANPNATPLSDDVRLRLNANNLDTLEKGYLIGNGMKISVDELGKKVLEHIGKNEPLLLKNLLVNFNQGKHEEVRKLIYQLIELDFLELL

SEQ ID NO: 24042 - protein, 203 aa, Neisseria meningitidis
MRRTALLLLALAAGTSLAAGFSQKDTPINTRYRETPEEAAAREFKEHTAKLPPLPDTHSDGWFDIYVDENYGKQPKILLDSLQIMPAPDGSIRYILNIRSDKGYDNLTAEGIFCARFSIRFGNGKPSSYKVFGYGDTVNRRWIQPRNAEWKPIGGTLSRNDALRTVLYQAFCEGGVPADTKGLVQRLKERAGRYAPSMKPHDK

SEQ ID NO: 24043 - protein, 442 aa, Neisseria meningitidis; identical to SEQ ID NO: 19956

SEQ ID NO: 24044 - protein, 421 aa, Neisseria meningitidis; identical to SEQ ID NO: 7830

SEQ ID NO: 24045 - protein, 333 aa, Neisseria meningitidis; identical to SEQ ID NO: 7831

SEQ ID NO: 24046 - protein, 313 aa, Neisseria meningitidis
MAIQWFPGHMNKAKKAIAERAKSVDMVIEMLDARMPASSENPLLAQLSKGKPKLKILNKQDLADPERTKIWLEHYNSRPDTCAIALDSSETGAHGKITQACRAMIPHRQGIDKPLRVLICGIPNVGKSTLINGMIGKKSAKTGNEPGITKAEQRLFLADDFWLYDTPGMLWPKIIVEESGYNLAAGGSVGRNALDEEEVALELLDYLRRHYLPMLQERYQADKDPSSHWDENVWLEWIAKKRGAVLSGGRINYQKAAENILTDFREGKIGRITLETPNQWETWLKKARQKEAELKAIREARKAERKGQKPSEA

SEQ ID NO: 24047 - protein, 303 aa, Neisseria meningitidis
MNVSVLNFGNTPVSFRQDGFLNATAIASHFGKLPKDYLKSEQTQQYISALAENLSVRRKILTEANQIVIVKRGGSEQGTWLHPKLAIHFARWLNPKFAVWCDEQIEILLNGKISDGIKTVTPKPTRALPDGLTGEQIEAVKKLHNALTKSAPKEAQARIAITLWSAVKSKFGCSYKEVPAEQFPEVLSVMSRVAVENGVLYGEVLDREPLPAPQPALPISGNALYDLAVAVRYGAWAIQMGRDVSLPLKQLGCKQAVTMWTVWAETRSRPNALEALNAHADAEHAAKIRPMLPEIRNLSSVCS

SEQ ID NO: 24048 - protein, 258 aa, Neisseria meningitidis
MNRPKQPFFRPEVAVARQTSLTGKVILTRPLSFSLWTTFASISALLIILFLIFGNYTRKTTAEGQILPASGVIRVYAPDTGTITAKFVEDGEKVKAGDKLFALSTLRFGAGGSVQQQLKTEAVLKKTLAEQELGRLKLIHGNETRSLKATVERLENQKLHISQQIDGQKRRIRLAEAVAKTALGRQELSGLGMVSSDLAKSNEPVYLVKIKPDKPTITAYGEEKPLQIGMTLEADILHEKRRLYEWVLEPIYSISGKL

SEQ ID NO: 24049 - protein, 300 aa, Neisseria meningitidis
MNPAMIERLKAVENQAEAMGRGARSAYLKQQAQELGISLATLYRKLEAVSIKPTRKRRSDAGKTELKPEEAKLISAVLVEAMRRNGKRLMSVRQAVEMLRANGKIEAARIDGETGEVIPSVRTAFRPLARHRPHRPVMAHPRRRHEDQTPLYRPTVGLGGRNTPRAAHADRRQHPPFPRHPPTAQTRPPPDHISIKFAHNAIRRLGYDGSTPGKSKHTMHGFRHLFTNISLTAGKDTLTTDLALGHISRAALQRAGFSSLHHYLTADSYRLQERRELAEWYSRRHRQAYEAAAQNTCNKT

SEQ ID NO: 24050 - protein, 327 aa, Neisseria meningitidis; identical to SEQ ID NO: 294

SEQ ID NO: 24051 - protein, 508 aa, Neisseria meningitidis
MDYPPLKGAALAWVTLSLGLAVFMEVLDTTIANVAVPVIAGNLGAATTQGTWVITSFAVANAVSVPLTGFLAKRIGEVKLFTAAAVGFVITSWLCGIAPNLQALVFFRILQGFIAGPLIPLSQSLLMASYPPAKRTLALALWAMTVVVAPVLGPILGGWISGNWHWGWIFFINIPIGIISAWITWKHLKYRETETVKMPTDYVGLTLMVVGIGALQMMLDRGKELDWFASGEIITLGVVALVCLSYFIVWELGEKYPIVDLSLFKDRNFTVGVIATSLGFMVYMGTLTLLPLVLQTNLGYTSTWAGLAAAPVGILPVFLSPLIGRFGNKIDMRLLVTASFLTFAFTFYWRTDFYADMDIGNVIWPQFWQGAGVAMFFLPLTTITLSHMKGGQIAAAGSLSNFLRVLMGGVGVSVVSTLWERREALHHTRFAEHITPYSATLHETAAHLSQHGVSDIQTAGIINNTITQQGFIIGSNEIFMAGSLLFIIMIPVIWLAKPPFHNGGGGGH

SEQ ID NO: 24052 - protein, 702 aa, Neisseria meningitidis; identical to SEQ ID NO: 7846

SEQ ID NO: 24053 - protein, 209 aa, Neisseria meningitidis; identical to SEQ ID NO: 7848

SEQ ID NO: 24054 - protein, 453 aa, Neisseria meningitidis
MSSPSNTNRQTSSRLTYILTVAGATVGFGATWRFPYLVGENGGGAYVFLFCIAMLVIGIPMILVENVIGRRKGVNALDAFGGSMNGKPVAKIWKLVGWAGLLGAFGIMAYYMVLGGWVISYIVNIIGGNLDISSPVDGMVTKSFFTEHIENSPWEIAFYTLLFVAVNQWILVKGVIGGIEKAAKLMPLLFLFLIAMVVRNVTLPGAMEGVAFYLKPDFSKITAELFVFVLGQVFFALSLGFGVMITLSSYLDKNENLVQTAVITAITNTIIAILAGFMIFPSLFSFGVAPDSGPTLVFQSLPIVFSHMWAGSVFAVIFFSLLLIAALTTSLTIYEVLITTIQEKTKIRRTAAITIVLAAIFIFGNIPSILSYGPWKDVLFGKNIFDAFDYISGNILFMLTALGFALFVGFVMKDEAKEELLYKGNHTTVNIWFAYVKYLVPLVILLIFVSNLF

SEQ ID NO: 24055 - protein, 622 aa, Neisseria meningitidis
MSQALPYRPDIDTLRAAAVLSVIVFHIEKNWLPGGFLGVDIFFVISGFLMTMILHREMSGGGGFSLKAFYIRRIKRILPAFFAVLAATLAGGFFLFTKDDFFLLWKSALTALGFASNLYFARGKDYFDPAQEEKPLLHIWSLSVEEQFYFVFPILLLLVARKSLRVQFGFLAALCALSLAASFIPSALDKYYLPHLRACELLIGSLTAVWMRCRQPAVGRRCAAVGALFAVCILSTCLFSYSEQTAYFPGPAALIPCLAVAALIYFNHYEHPLKKFFQSKITVAAGLISYSLYLWHWPILAFMRYIGPDNLPPYSPAAAVVLILLLSLFSYHCIEKPFKKWQGSFAQSVLWIYALPMLILGAGSFFAMRLPFMAQYDRLGLTRSNTSCHNNTGKQCLWGDTEKQPELLVLGDSHADHYKTFFDAVGKKEKWSATMVSADACAYVEGYASRVFQNWAACRAVYRYAEEHLPRYSKVVLAMRWGSQMPENSRSLAYDAGFFQKFDRMLHKLSSEKQAVYLMADNLASSYNVQRAYILSSRIPGYRQALRPDDESTLKANARIRELAAKYPNVYIIDAAAYIPADFQIGGLPVYSDKDHINPYGGTELAKRFSEKQRFLDTRHNH

SEQ ID NO: 24056 - protein, 326 aa, Neisseria meningitidis
MQENPTVWLFDLDNTLHNADAGLFTLINRAMTRYMARRLKLSESAASDLRQDYWHRYGATLAGLQIHHPEIDIAEFLRESHPIDAILTRLHGMADTENTLCRLNGRKAVFSNGPSFYVRAVVGALGLENRFDALFGTDDFGLLYKPNPQAYLNVCRLLDVPPECCIMVDDSADNLHQAKALGMKTVRFGAKVHDLPFIDASVSDMAQLARYAETLSEHRQNHYNTRTPPPKIRKNVMRKTFLILMTAAALLSGCAWETYQDGNGKTAVRQKYPAGTPVYYQDGSYSKNMNYNQYRPERHAVLPNQTGNNADEEHRQHWQKPKFQNR

SEQ ID NO: 24057 - protein, 495 aa, Neisseria meningitidis
MLKKIKKALFQPKKFFQDSMWLTTSPFYLTPPRNNLFVISNLGQLNQVQSLIKIQKLTNNLLVILYTSKNLKMPKLVHQSANKNLFESIYLFELPRSPNNITPKKLLYIYRSYKKILNIIQPAHLYMLSFTGHYSYLISIAKKKNITTHLIDEGTGTYAPLLESFSYHPTKLERYLIGNNLNIKGYIDHFDILHVPFPEYAKKIFNAKKYNRFFAHAGGISINNNIANLQKKYQISKNDYIFVSQRYPISDDLYYKSIVEILNSISLQIKGKIFIKLHPKEMGNNYVMSLFLNMVEINPRLVVINEPPFLIEPLIYLTNPKGIIGLASSSLIYTPLLSPSTQCLSIGELIINLIQKYSMVENTEMIQEHLEIIKKFNFINILNDLNGVISNPLFKTEETFETLLKSAEFAYKSKNYFQAIFYWQLASKNNITLLGHKALWYYNALYNVKQIYKMEYSDIFYIDNISVDFHSKDKLTWEKIKHYYYSADNKIGRDR

SEQ ID NO: 24058 - protein, 346 aa, Neisseria meningitidis; identical to SEQ ID NO: 15897

SEQ ID NO: 24059 - protein, 170 aa, Neisseria meningitidis; identical to SEQ ID NO: 7849

SEQ ID NO: 24060 - protein, 141 aa, Neisseria meningitidis; identical to SEQ ID NO: 7863

SEQ ID NO: 24061 - protein, 119 aa, Neisseria meningitidis; identical to SEQ ID NO: 7865

SEQ ID NO: 24062 - protein, 106 aa, Neisseria meningitidis; identical to SEQ ID NO: 7868

SEQ ID NO: 24063 - protein, 58 aa, Neisseria meningitidis; identical to SEQ ID NO: 1171

SEQ ID NO: 24064 - protein, 63 aa, Neisseria meningitidis; identical to SEQ ID NO: 7871

SEQ ID NO: 24065 - protein, 124 aa, Neisseria meningitidis; identical to SEQ ID NO: 1868

SEQ ID NO: 24066 - protein, 78 aa, Neisseria meningitidis
MRILDIFKNPATGNVSHSKLWANVACAAGTFKFVMLPDPSAEIWAVYLGIVGGYAVARSLVSVKRQEVENESRETASE

SEQ ID NO: 24067 - protein, 96 aa, Neisseria meningitidis; identical to SEQ ID NO: 7875

SEQ ID NO: 24068 - protein, 171 aa, Neisseria meningitidis
MPDLLTYQYYNMTHISSPRNEFIRGIKESSPILIGLLPWALILGMQGGQKGMSWLEMLLMTSMNFAGGSEFATVNLWAEPLPILLIATVTFMINSRHILMGAALALHLKEIPLKKAVPALFFMCDESWAMAFSEIQKRKATGLPAFNMPFYSGLTKTSTALPRLSSKRTIL

SEQ ID NO: 24069 - protein, 139 aa, Neisseria meningitidis; identical to SEQ ID NO: 1180

SEQ ID NO: 24070 - protein, 119 aa, Neisseria meningitidis
LERKNNIIELSIEDLELIYGGGLGERILEGGANGAQIGGSIGAGIGLGVGIVSGGIPAGPAIILGGTVGAAVGAATGMGVAAYEYYQETQPKGTVTVGPISAFAVDKSGNGYTDSTNYC

SEQ ID NO: 24071 - protein, 80 aa, Neisseria meningitidis; identical to SEQ ID NO: 1154

SEQ ID NO: 24072 - protein, 104 aa, Neisseria meningitidis
MNKPFITQAQLALYKYQPSSKYYGKTMAYTFASELLDYSKVNKFIIHEEIQCFLNRRISNNIWKIYFSDESVAYIKILELQDDSSRGIEIKTFDFNPNVGDVFG

SEQ ID NO: 24073 - protein, 68 aa, Neisseria meningitidis
PMDMTLKHKAEALLGEPLLDEPVRPESWECCGSDCGEACIQTIYWADKARYDAQRRKLKEAGWSDDAV

SEQ ID NO: 24074 - protein, 68 aa, Neisseria meningitidis; identical to SEQ ID NO: 3910

SEQ ID NO: 24075 - protein, 68 aa, Neisseria meningitidis; identical to SEQ ID NO: 3911

SEQ ID NO: 24076 - protein, 64 aa, Neisseria meningitidis
VKRKLAAWWETAKLTANLMAGVPDYENYVAQQRKHNPNAPVMTKLQFQDYCRKRRCGANGGRCC

SEQ ID NO: 24077 - protein, 147 aa, Neisseria meningitidis; identical to SEQ ID NO: 4898

SEQ ID NO: 24078 - protein, 43 aa, Neisseria meningitidis; identical to SEQ ID NO: 15919

SEQ ID NO: 24079 - protein, 264 aa, Neisseria meningitidis
MADILPSDKRRQPPKTKGSTMNIIEQEMKHSSLRKVDVEIAKIIADAHKINAESVKIAQESRWYPMMAATGLVTAIAAVLALIFKFAPQAPREALSPEQNEQSRTIQPLPRMDYRARRRKPFHYPLPLSPPDCQNPQADRRRMPGRALPPFRKRHHPLRFYFFRRKTGRRSPICRRPYRNLPPGSQKNMRNKINRNDMELGYTPYNLRNRCKLIQAELAQIVGVKHYIQVGRWEAEPDTETRRADMPLEKWRQFLDWTEKTNAV

SEQ ID NO: 24080 - protein, 83 aa, Neisseria meningitidis; identical to SEQ ID NO: 15899

SEQ ID NO: 24081 - protein, 144 aa, Neisseria meningitidis
MKKQITAAVMMLSMIAPAMANGLDNQAFEKYVFHTQADAPMQLAELSQKEMKETEGEWIPNAVGGIMGGVGGHFSYMASAIASGSYNREAHWTAIGGGALIGAMNPINGGRALINGMRGVAVGAVAGGINGYAGSTGKNTDIRR

SEQ ID NO: 24082 - protein, 100 aa, Neisseria meningitidis; identical to SEQ ID NO: 1890

SEQ ID NO: 24083 - protein, 73 aa, Neisseria meningitidis; identical to SEQ ID NO: 1891

SEQ ID NO: 24084 - protein, 72 aa, Neisseria meningitidis; identical to SEQ ID NO: 202

SEQ ID NO: 24085 - protein, 97 aa, Neisseria meningitidis; identical to SEQ ID NO: 7898

SEQ ID NO: 24086 - protein, 67 aa, Neisseria meningitidis; identical to SEQ ID NO: 5876

SEQ ID NO: 24087 - protein, 65 aa, Neisseria meningitidis; identical to SEQ ID NO: 1894

SEQ ID NO: 24088 - protein, 74 aa, Neisseria meningitidis; identical to SEQ ID NO: 3918

SEQ ID NO: 24089 - protein, 690 aa, Neisseria meningitidis
MGKANAFTAPITVVNYDEQALNNTEARTLVDAVAKKDASVWQFGGESNTLTGLYFRGYQLDARQFSVNGLTGMYGTQGTTSVQVGSAQLIQGASTAVNGMNPDGAVSGSVNIETKKAADEGNRKIGLARFGNNRAQGTFDLGQRFGENKAFGVRANGKLRHGDTPRHGYSEDNKEFAVNADYRGETLRVAFDSIYAKRKTNGGRARMQDIQNAGGRLSLWADVSKRLNTPIRKNHAERQPELARKRQTEILSINWHRLQPTIPILGRTLPTWMPISKSTAWLCPTPWASWITNTVGAPDGKTNLLPSWNWQNTAGQTNMLTFEWDAFDNAQITGGIGYNKARYYGTLISPTVCGTSGASDQTATCSSAKQYHTGTASLTDQYFRTLSMNLTARGEFETGPVTHNWSTAFDRVIRQRKTIQSGDAKRFSPMLMAAWVPQPDLVVYGNYMEDLEPADIKTDDSGETTMAKPRVSRQFEVGVRKNWGNFVTTLNAFQIKRPGYWRGQTNKDGSLTYGNNSDFARYKAQGGAAKDEQGMERNRGIEFNTYANLLNNTLRPTLGLMYLQSTVKEYPNSRDMLVNGVQVANPRVIAKAGVEWDTPFAKGLTLNGNVSYFGKSYQDTKKQYAFPSYTLVDVGARYKTKLGKNTLTVSSSVENLFNKNYWQVQRGQYDRSFAVVGMPRTYWLKAELDF

SEQ ID NO: 24090 - protein, 104 aa, Neisseria meningitidis; identical to SEQ ID NO: 15932

SEQ ID NO: 24091 - protein, 410 aa, Neisseria meningitidis; identical to SEQ ID NO: 7906

SEQ ID NO: 24092 - protein, 133 aa, Neisseria meningitidis; identical to SEQ ID NO: 9910

SEQ ID NO: 24093 - protein, 96 aa, Neisseria meningitidis; identical to SEQ ID NO: 737

SEQ ID NO: 24094 - protein, 71 aa, Neisseria meningitidis; identical to SEQ ID NO: 3926

SEQ ID NO: 24095 - protein, 279 aa, Neisseria meningitidis; identical to SEQ ID NO: 3315

SEQ ID NO: 24096 - protein, 142 aa, Neisseria meningitidis
MTENAQDKARQAVETVVKSPELVEQILSDEYVQIMIARRFHSGPLPPPSDLAQYNDIISNGADRIMAMAEKEQAVRHETIRQDQTFNRRGQLYGFISVILILLAVFLVWSGYPATAASLAGGTVVALAGAFVIGRSRDQGKN

SEQ ID NO: 24097 - protein, 90 aa, Neisseria meningitidis; identical to SEQ ID NO: 1889

SEQ ID NO: 24098 - protein, 336 aa, Neisseria meningitidis; identical to SEQ ID NO: 18006

SEQ ID NO: 24099 - protein, 132 aa, Neisseria meningitidis; identical to SEQ ID NO: 3931

SEQ ID NO: 24100 - protein, 343 aa, Neisseria meningitidis
MDLSIVVPIYNVESYLEACLSSIEPILSNENVELILVNDGSKDGSEDICYKYIDKTTNNKQQTTNNKQQTTNNKQQNRTPNIKYIYQDNQGLSEARNTGIKNSNGKYIVFIDSDDFINCQVLLDFLSKDDIDMPDVVFLNAVKYDKGSVSYFGEDYQPEKILNQSKVEVLKGLCRFRKFPGSAWNKIIKRELIIKEKLFFEKGIYSEDIEWSMRLFNAATTFFYLDGCYYYYRQGRKDSITGTVSEKSIKSLLYILEKNAEMEFNRDISSYLYSFLSYEYLVLLFIMTSKNIECDADIKRRAYHLRFMLLKSNKLIYKLIFPIITLFGVDITGRILKVIRGNV

SEQ ID NO: 24101 - protein, 243 aa, Neisseria meningitidis; identical to SEQ ID NO: 20036

SEQ ID NO: 24102 - protein, 1082 aa, Neisseria meningitidis
MRTTPTFPTKTFKPTAMALAVATTLSACLGGGGGGTSAPDFNAGGTGIGSNSRATTAKSAAVSYAGIKNEMCKDRSMLCAGRDDVAVTDRDAKINPPPPNLHTGDFPNPNDAYKNLINLKPAIEAGYTGRGVEVGIVDTGESVGSISFPELYGRKEHGYNENYKNYTAYMRKEAPEDGGGKDIEASFDDEAVIETEAKPTDIRHVKEIGHIDLVSHIIGGRSVDGRPAGGIAPDATLHIMNTNDGTKNEMMVAAIRNAWVKLGERGVRIVNNSFGTTSRAGTADLFQIANSEEQYRQALLDYSGGDKTDEGIRLMQQSDYGNLSYHIRNKNMLFIFSTGNDAQAQPNTYALLPFYEKDAQKGIITVAGVDRSGEKFKREMYGEPGTEPLEYGSNHCGITAMWCLSAPYEASVRFTRTNPIQIAGTSFSAPIVTGTAALLLQKYPWMSNDNLRTTLLTTAQDIGAVGVDSKFGWGLLDAGKAMNGPASFPFGDFTADTKGTSDIAYSFRNDISGTGGLIKKGGSQLQLHGNNTYTGKTIIEGGSLVLYGNNKSDMRVETKGALIYNGAASGGSLNSDGIVYLADTDQSGANETVHIKGSLQLDGKGTLYTRLGKLLKVDGTAIIGGKLYMSARGKGAGYLNSTGRRVPFLSAAKIGQDYSFFTNIETDGGLLASLDSVEKTAGSEGDTLSYYVRRGNAARTASAAAHSAPAGLKHAVEQGGSNLENLMVELDASESSATPETVETAAADRTDMPGIRPYGATFRAAAAVQHANAADGVRIFNSLAATVYADSTAAHADMQGRRLKAVSDGLDHNGTGLRVIAQTQQDGGTWEQGGVEGKMRGSTQTVGIAAKTGENTTAAATLGMGRSTWSENSANAKTDSISLFAGIRHDAGDIGYLKGLFSYGRYKNSISRSTGADEHAEGSVNGTLMQLGALGGVNVPFAATGDLTVEGGLRYDLLKQDAFAEKGSALGWSGNSLTEGTLVGLAGLKLSQPLSDKAVLFATAGVERDLNGRDYTVTGGFTGATAATGKTGARNMPHTRLVAGLGADVEFGNGWNGLARYSYAGSKQYGNHSGRVGVGYRF

SEQ ID NO: 24103 - protein, 350 aa, Neisseria meningitidis; identical to SEQ ID NO: 7917

SEQ ID NO: 24104 - protein, 106 aa, Neisseria meningitidis
LGEKIKDGKKTVLSREEEQKICNTFTHKQAVEDFSVVIGYDEIKAKNHSLSAGQYFEVKIDYVDISADEFAQKMAGFSADLDKLFAESAELEKEIKDRLAMLKFNS

SEQ ID NO: 24105 - protein, 140 aa, Neisseria meningitidis; identical to SEQ ID NO: 15946

SEQ ID NO: 24106 - protein, 600 aa, Neisseria meningitidis
MPAETTVSGAHPAAKLPIYILPCFLWIGIVPFTFALKLKPSPDFYHDAAAAAGLIVLLFLTAGKKLFDVKIPAISFLLFAMAAFWYLQARLMNLIYPGMNDIVSWIFILLAVSAWACRSLVAHFGQERIVTLFAWSLLIGSLLQSCIVVIQFAGWEDTPLFQNIIVYSGQGVIGHIGQRNNLGHYLMWGILAAAYLNGQRKIPAALGVICLIMQTAVLGLVNSRTILTYIAAIALILPFWYFRSDKSNRRTMLGIAAAVFLTALFQFSMNTILETFTGIRYETAVERVANGGFTDLPRQIEWNKALAAFQSAPIFGHGWNSFAQQTFLINAEQHNIYDNLLSNLFTHSHNIVLQLLAEMGISGTLLVAATLLTGIAGLLKRPLTPLICTLAVSMCHSMLEYPLWYVYFLIPFGLMLFLSPAEASDGIAFKKAANLGILTASAAIFAGLLHLDWTYTRLVNAFSPATDDSAKTLNRKINELRYISANSPMLSFYADFSLVNFALPEYPETQTWAEEATLKSLKYRPHSATYRIALYLMRQGKVAEAKQWMRATQSYYPYLMPRYADEIRKLPVWAPLLPELLKDCKAFAAAPGHPEAKPCK

SEQ ID NO: 24107 - protein, 382 aa, Neisseria meningitidis
MWTGFFSKSGTGIAEKRHQNCRACTDVPLLAERNSKHPDRPYGFAQYRQKGLDIYAWHGMYFFPRFPLIDIDRIRWVRAGLKAFERYIGENGIPDIIHAHCMNYAGILAFKISQKYGIPYVVTEHSSTITRGLVRPHQWQPMKNAAAHASALLAVSCRFAQVLQHKYGTTWQYLPNILGNIFTRAFNPPQINRPDKYFTFCTISHLRRLKGHDVLLSAFARALAKHPNLRLNIGGSGQEETSLKRQARQLGIAHAVTFLGALQPEAVLDLMRNSDAFVLASRTETFGVVYIEALSQGLPVIATRCGGAESIVSDGNGYLVPVDDDDALADALIKMYEHHSDFEPDRLRENCLNEFGEDTVIGKLIGIFRQAIAEYGKKIPVK

SEQ ID NO: 24108 - protein, 375 aa, Neisseria meningitidis
MYTFRPFPNLHTETHIMNIQNIRTLLDTVAVPNTARTLGGEKAVRSVEQRSDGIHIALHFGFPVAHIASETADRIQEILMPETGDTHIHLSMDTEIGTHKVQPGVTTIKGVKNIIAVASGKGGVGKSTTTANLAAAMARMGARVGVLDADLYGPSQPTMLGVDDRKPDQKNQKLIPVESSDGIQVMSIGFLVDTDQAVVWRGPMVSQALQQLMFQSEWDEVDYLFIDLPPGTGDIQLTLSQRIPVTGSVIVTTPQDIALIDARKAVDMFRKVNIPILGVLENMSVHICSNCGHSEALFGTDGGKDLAARLNVPLLGQLPLSLPVREAMDGGTPAQLFDEHPAIAKIYTDAAFQIALSIADKGKDFSSRFPKIVVE

SEQ ID NO: 24109 - protein, 667 aa, Neisseria meningitidis
MKLEASKQQKFKKSFIVSLFFSILYTSPLLAVDYVYDKTKLTDDEITRLKKLRDRNSEYWKEETYHIKSNNRVYPNIPALFPKHPFDPFENINNSKRISFYDKEYTEDYLVGFAQGLGVAKRNGETEKPIRQYFKECLNTGKYSDDTCKSQQSIPTVRSDIFALNTKIKNSHINSEIFAVGNYTKLMYSAQHHSIWSEHLYSNSELSLDVDNSHVIGQTIDLGALELTNSLWEPRWNSNIDYLITKNAEIRFNTKSESLLVKEDYAGGARFRFAYGLKDKVPETPVLTFEKNITGTSDIIFENPIDDLKSLDGHQIIKVNGTADKHAFRLSGKHQKGIYTLSLQQRPEGFFTKVQERDDISIYAQQAQAANTLFALRLNDKNSDIFDRTLPRKGLWLRVIDGHSNQWVQGKTAPVESNRKGVQLGGEVFTWQNESNQLSVGLMSGQAEQRSTFRNPDTDNLTTGNVKGFGAGVYATWHQLQDKQTGAYADSWMQYQRFRHRINTEDATERFTSKGITASIEAGYNALLAEHVTKKGNSLRVYLQPQAQLTYLGVNGKFSDSENAHVNLLGSRQLQSRVGVQAKAQFAFTNGVTFQPFVSVNSIYQQKPFGVEMDGERRVINNKTAIESQLGVAVKIKSHLTLQASFNRQTGKHHQAKQGALNLQWTF

SEQ ID NO: 24110 - protein, 682 aa, Neisseria meningitidis; identical to SEQ ID NO: 18021

SEQ ID NO: 24111 - protein, 703 aa, Neisseria meningitidis
MTLKASKQASKQASKQASKQQASGRVNLLTLSVLSLFCTPYVGSDAYDPVKEAEIKNKFILEAAEDRNSHVWRGPCSISFDCFGMFRAQLGSNTRSTKIGDDADFSFSDKPKPGTSHYFSSGKTDQNSSEYGYDEINIQGKNYNSGILAVDNMPVVKKYITEKYGADLKQAVKSQLQDLYKTRPEAWAENKKRTEEAYIAQFGTKFSTLKQTMPDLINKLVEDSVLTPHSNTSQTSLNNIFNKKLHVKIENKSHVAGQVLELTKMTLKDSLWEPRRHSDIHMLETSDNARIRLNTKDEKLTVHKAYQGGADFLFGYDVRESDEPALTFEDKVSGQSGVVLERRPENLKTLDGRKLIAAEKADPNSFAFKQNYRQGLYELLLKQCEGGFCLGVQRLAIPEAEAVLYAQQAYAANTLFGLRAADRGDDVYAADPSRQKLWLRFIGGRSHQNIRGGAAADGRRKGVQIGGEVFVRQNEGSRLAIGVMGGRAGQHASVNGKGGAAGSDLYGYGGGVYAAWHQLRDKQTGAYLDGWLQYQRFKHRINDENRVERYKTKGWTASVEGGYNALVAEGVVGKGNNVRFYLQPQAQFTYLGVNGGFTDSEGTAVGLLGSGQWQSRAGIRAKTRFALRNGVNLQPFAAFNVLHRSKSFGVEMDGEKQTLAGRTALEGRFGIEAGWKGHMSARIGYGKRTDGDKEAALSLKWLF

SEQ ID NO: 24112 - protein, 142 aa, Neisseria meningitidis; identical to SEQ ID NO: 18752

SEQ ID NO: 24113 - protein, 183 aa, Neisseria meningitidis
MPSERRPFQTAFLSNRKTVGKLAERVQSRYDGLHKFKHICSAAMALIKEPLDKAKQRNEELEAAEEAAAQEALGREQEVDRVSEWEERYKLSRSEFEQFWKGLPQTIQNKLQASQKTWKSGMDKICANNAKAEGETPNGIKFSELACKTAETEARLEELHNRKKALIDEMAREADKKELPKRL

SEQ ID NO: 24114 - protein, 269 aa, Neisseria meningitidis; identical to SEQ ID NO: 1709

SEQ ID NO: 24115 - protein, 299 aa, Neisseria meningitidis
MWFKQISFYPLNKEKLPEADVLADKLAEAEFTHCQGLDWFSEGFAAPVSFSPELVFPADFTLRVALKKEEKVLPAGVIRDILEEKVAEIQNNEARNVGRKEKQELKEQITDDLLPRAFTRSSRTEAVFNTRHGYLLVNNAASAKAENILTKLREALGGLEASLPNTKQSPSSLMTGWLLQGHCEGGFELDSDCELKGTGDIVPVVKVSKQDLTADEVVQHVKNGKTVTQLGLVWREQIAFILTQDFTLKRIQYLDVLQEEAESNGDDAAGLAFASQILMAESVSTMLEELVSYLGGWQD

SEQ ID NO: 24116 - protein, 158 aa, Neisseria meningitidis; identical to SEQ ID NO: 19791

SEQ ID NO: 24117 - protein, 90 aa, Neisseria meningitidis; identical to SEQ ID NO: 1115

SEQ ID NO: 24118 - protein, 580 aa, Neisseria meningitidis
MKFFPAPCLLVILAVIPLKTLAADENDAELIRSMQRQQHIDAELLTDANVRFEQPLEKNNYVLSEDETPCTRVNYISLDDKTARKFSFLPSVLMKETAFKTGMCLGSNNLSRLQKAAQQILIVRGYLTSQAIIQPQNMDSGILKLRVSAGEIGDIRYEEKRDGKSAEGSISAFNNKFPLYRNKILNLRDVEQGLENLRRLSSVKTDIQIIPSEEEGKSDLQIKWQQNKPIRFSIGIDDAGGKTTGKYQGNVALSFDNPLGLSDLFYVSYGRGLAHKTDLTDATGTETASGSRSYSVHYSVPVKKWLFSFNHNGHRYHEATEGYSVNYDYNGKQYQSSLAAERMLWRNRLHKTSVGMKLWTRQTYKYIDDAEIEVQRRRSAGWEAELRHRAYLNRWQLDGKLSYKRGTGMRQSMPAPEENGGGTIPGTSRMKIITAGLDAAAPFMLGKQQFFYATAIQAQWNKTPLVAQDKLSIGSRYTVRGFDGEQSLFGERGFYWQNTLTWYFHPNHQFYLGADYGRVSGESAQYVSGKQLMGAVVGFRGGHKVGGMFAYDLFAGKPLHKPKGFQTTNTVYGFNLNYSF

SEQ ID NO: 24119 - protein, 228 aa, Neisseria meningitidis; identical to SEQ ID NO: 445

SEQ ID NO: 24120 - protein, 275 aa, Neisseria meningitidis; identical to SEQ ID NO: 67

SEQ ID NO: 24121 - protein, 218 aa, Neisseria meningitidis
MDFEKARFNMVEQQIRPWDVLDFDVLDALAEIPRELFVDEDLQGLAYADMALPLANGHKMLEPKVVARLAQGLKLTKNDTVLEIGTGSGYATALLAKLASRVVSDDIDAEQQKRAKAVLDGLSLENIDYVQNNGLTELSAGAPFDAVYVGGAVNLVPEVLKEQLKDGGRMAVIVGRKPVQRALLITRKGDVFEEKVLFDTLVAHLDDKDADPFGGFDF

SEQ ID NO: 24122 - protein, 147 aa, Neisseria meningitidis; identical to SEQ ID NO: 2466

SEQ ID NO: 24123 - protein, 389 aa, Neisseria meningitidis; identical to SEQ ID NO: 10410

SEQ ID NO: 24124 - protein, 463 aa, Neisseria meningitidis
MLLVMRAKQGKKTPKRKSQGVGNTQGQTPGSNDSDWVDQIGQSVSDGTQPDWSWNESAETASAAVSAQEVDPLTEYQVYKQFGYQGKAAESLAAYLDGIPDGEAKPENLIRELLDINLEVGDVDVLADNLQKYGKLIPSELLAKYIEQALQRDSNHLRIRVLAEEGLGWGTQEIEKRAEGGSATAASASPPPDAGGKAYEAEEIKRIPIVRGKKDVSGISQEEIGAIAGLVRADQGAKILKDKVSYETASKQYDRAIQTSEKPANLIIDALKLDYQHADIDRFAGHLWKLYQTLGNYGRQVKERMLGWGYSLGYHEVFDDLEKGPNDRQIKDIGMGHGYLPKNIQKFKSQHRDLVLQDSSLINTGSSPADDAVKEVESLLMYGQIEAAMDVLEQAVLKYPDESQLYITLIDIYERTEDWDRLGQFLRVLRERADRLPEEVVMLMSRLLQRMNQNIKKIKRYGK

SEQ ID NO: 24125 - protein, 381 aa, Neisseria meningitidis; identical to SEQ ID NO: 18979

SEQ ID NO: 24126 - protein, 375 aa, Neisseria meningitidis; identical to SEQ ID NO: 8635

SEQ ID NO: 24127 - protein, 93 aa, Neisseria meningitidis; identical to SEQ ID NO: 19520

SEQ ID NO: 24128 - protein, 205 aa, Neisseria meningitidis
MVIAAIMAMIALPNMSQWIASRRIASHAERIANLLRFSRGEAVRLNLPVYICPVQVKKDGTVNNKCDSGKKGQGMLAFGDKNGNKGYDNDTADVLLRSVVLNDDINDKRINYAFNHIAFGQTQPTTDRVVWTFNQNGTFGYTKDQHLTKQSSFFYSDGYIQIVLTDARAVSDADKKFRSAVVLIDSSGRVEVCPRNDRRTVCQYK

SEQ ID NO: 24129 - protein, 349 aa, Neisseria meningitidis; identical to SEQ ID NO: 6547

SEQ ID NO: 24130 - protein, 246 aa, Neisseria meningitidis
MLIVRPSGRAKDDVETCRRAGWQAEVLSPIEIEADAAGLELLSEQYARADAVFWVSPTAVETAVPYLNLSDGIKIHIAVGQGSRRALERYLGRTVIAPHDGNDSEAVLRLPVWNSLPEGARVLFVRGHGGRDFLMNALQEKGFRTEMAEVYFRRHKPLNFQNFQTENIAAAYITSTELVRLLFGQLPPQFSRFFKSLLYFTHHPRIAEALKREGVCSVETVPTLEAALSHSSISVSDGMVFPGTSN

SEQ ID NO: 24131 - protein, 335 aa, Neisseria meningitidis
MSTFFQQTAQAMIAKHIDRFPLLKLDQVIDWQPIEQYLNRQKTRYLRDHRGRPAYPLLSMFKAVLLGQWHSLSDPELEHSLITRIDFNLFCRFDELSIPDYSTLCRYRNWLAQDNTLSELLELINRQLTEKGLKVEKASAAVIDATIIQTAGSKQRQAIEVDEEGQVSGQTTLSKDKNARWTKKNGLYKLGYKQHTRTDAEGYIEKLHITPANAHECKHLSPLLEGLPKGTTVYADKGYDSAENRQHLEEHQLQDGIMRKACRNRPLTETQTKRNRYLSKTRYVVEQSFGTLHRKFRYARAAYFGLIKVSAQSHLKAMCLNLLKAANRLSAPAAA

SEQ ID NO: 24132 - protein, 350 aa, Neisseria meningitidis; identical to SEQ ID NO: 8682

SEQ ID NO: 24133 - protein, 741 aa, Neisseria meningitidis
MTQKSTIIYTHTDEAPALATQSLLPIVQAFARHADIDVKTADISLSGRILAAFPEYLTEAQRVPDALAELGELVKQPDANVIKLPNISASVPQLTAAIKELQSKGFAVPDYPADPQTDEEKAVRERYDRIKGSAVNPVLREGNSDRRAPKAVKNFAKKNPHSMGAWAKDSKTHVATMQSGDFFHNEQSVTVPEATSVSIVFTDKQGNKKELRAPVALKAGEIIDATVMSKKALLAFLAEQVKDAKAKGVLFSLHMKATMMKVSDPIIFGHAVKVFFAPVFEKFGGKLAAAGVNVNNGFGNLLANLDKLDADTRAAVEAEIAAVYAANPDLAMVDSDKGITNLHVPSDVIVDASMPAMIRNSGRMWDKNGKAQDTKAVIPDSSYAGVYQATIDFCREHGAFDPTTMGTVPNVGLMAQAAEEYGSHNKTFEIEADGQVQVVDAAGKVLMQHDVEAGDIWRMCQTKDAPVKDWVQLAVNRARLSNTPAVFWLDENRPHDKSLLAKVKAYLAELDTNGLDIRVLAPEEAAKFSLGRLKNGEDTISVTGNVLRDYLTDLFPILELGTSAKMLSIVPLMNGGGMFETGAGGSAPKHVQQFLEENHLRWDSLGEFLALAVSFEHLAQKTGNTKAQVLADTLDAATEKLLLNDKSPKRKTGELDNRGSHFYLTLYWAQELAAQDKDAELKAAFAPLAKSLAENEAKIVEELSAVQGKAVDIGGYYAANPEKAAQAMRPSATFNQALSTL

SEQ ID NO: 24134 - protein, 164 aa, Neisseria meningitidis; identical to SEQ ID NO: 18028

SEQ ID NO: 24135 - protein, 277 aa, Neisseria meningitidis; identical to SEQ ID NO: 19458

SEQ ID NO: 24136 - protein, 138 aa, Neisseria meningitidis
MRLLHTMLRVGNLEKSLDFYQNVLGMKLLCRKDYPEGRFTLAFVGYGDETDSTVLELTHNWDTERYDLGNAYGHIAIEVDDAYEACERVKRQGGNVVREAGPMKHGTTVIAFVEDPDGYKIEFIQKKSGDDSVAYQTA

SEQ ID NO: 24137 - protein, 96 aa, Neisseria meningitidis; identical to SEQ ID NO: 2317

SEQ ID NO: 24138 - protein, 391 aa, Neisseria meningitidis
MQNIFDPLVIRGKSLTPIVQGGMGVGVSASGLSSAVARENGIGTIASVDLRHLHEDLLAESQINPSEEKYTSLNCTALDREIQKAKSASEGKGLIAVNVMKAVKDHAAYVRQACESGADAVVMGAGLPLDLPEMTEGYHKYVALLPILSESRGINIVLKRWMKKGILPDAIVVEHPAHAAGHLGASTVEGVNDAKFDFKRVIEETFEVFKSLGLESEKIPLILAGGMANFEKVKTALKNWGASAVQIGTAFAVTEEGDAHLNFKKTLAGAETEKVVEFMSVAGLPARGVRTKFLDSYIKRESKLQTNAKADPRRCTQGLNCLTSCGLRDGLSKAGQFCIDIQLAAAFRGEVDKGLFFRGKDPLPFGNAIRTVRETIQYLLTGSEPVATLGR

SEQ ID NO: 24139 - protein, 105 aa, Neisseria meningitidis; identical to SEQ ID NO: 18770

SEQ ID NO: 24140 - protein, 489 aa, Neisseria meningitidis
LALALAVITRRVLLSLGIGILVGVAFLVGGNPVDGLTHLKDMVVGLAWSDGDWSLGKPKILVFLILLGIFTSLLTYSGSNQAFADWAKRHIKNRRGAKMLTACLVFVTFIDDYFHSLAVGAIARPVTDKFKVSRAKLAYILDSTAAPMCVLMPVSSWGASIIATLAGLLVTYKITEYTPMGTFVAMSLMNYYALFALIMVFVVAWFSFDIGSMARFEQAALNEAHDETAASDATKGRVYALIIPVLALIASTVSAMIYTGAQASETFSILGAFENTDVNTSLVFGGTCGVLAVVLCTLGTIKTADYPKAVWQGAKSMFGAIAILILAWLISTVVGEMHTGDYLSTLVAGNIHPGFLPVILFLLASVMAFATGTSWGTFGIMLPIAAAMAVKVEPALIIPCMSAVMAGAVCGDHCSPISDTTILSSTGARCNHIDHVTSQLPYALTVAAAAASGYLALGLTKSALLGFGTTGIVLAVLIFLLKDKKRANA

SEQ ID NO: 24141 - protein, 141 aa, Neisseria meningitidis; identical to SEQ ID NO: 6006

SEQ ID NO: 24142 - protein, 121 aa, Neisseria meningitidis; identical to SEQ ID NO: 5618

SEQ ID NO: 24143 - protein, 157 aa, Neisseria meningitidis; identical to SEQ ID NO: 140

SEQ ID NO: 24144 - protein, 426 aa, Neisseria meningitidis
MENSLKEAALKFHELPVPGKISVTPTKSLATSKDLALAYSPGVAAPCMEIHADPQNAYKYTAKGNLVAVISNGTAVLGLGDIGALAGKPVMEGKGVLFKKFAGVDVFDIEIDEKDPQKLVDIIAALEPTFGGINLEDIKAPECFYIERELRKRCKIPVFHDDQHGTAIITAAAVLNALRFTGRKIEEATLVCSGAGAAAIACLNQLLDLGLKRENVTVCDSKGVIYQTREDKDRMDESKKFYAVEDNGQRVLVDAVKGKDIFLGLSGANLLTPEMLNTMNEKPIVFAMANPNPEILPPLAKETRPDVVIGTGRSDFPNQVNNVLCFPFIFRGALDVGATTINEEMKRSCVYALADLAMEEVTEEVVAAYGKKFEFGAEYLIPTPFDSRLLPRVATAAAKAAMESGVATRPIADFEAYAAKLGEWKL

SEQ ID NO: 24145 - protein, 186 aa, Neisseria meningitidis; identical to SEQ ID NO: 1228

SEQ ID NO: 24146 - protein, 106 aa, Neisseria meningitidis; identical to SEQ ID NO: 18989

SEQ ID NO: 24147 - protein, 640 aa, Neisseria meningitidis; identical to SEQ ID NO: 19467

SEQ ID NO: 24148 - protein, 823 aa, Neisseria meningitidis; identical to SEQ ID NO: 18962

SEQ ID NO: 24149 - protein, 384 aa, Neisseria meningitidis; identical to SEQ ID NO: 3177

SEQ ID NO: 24150 - protein, 65 aa, Neisseria meningitidis; identical to SEQ ID NO: 127

SEQ ID NO: 24151 - protein, 336 aa, Neisseria meningitidis; identical to SEQ ID NO: 1943

SEQ ID NO: 24152 - protein, 222 aa, Neisseria meningitidis
MTTHLSNVAPDLQNYLNAIGEPEHPVLTRLREKTEHHRMGKMAIAREQAAVLVWLAKLIRAEKYLEVGVFTGYSSTVLALALPKHGRITACDINVTFTDTARQVWNEAGVAHKISLHLQPALLTLDDLIAQGEAGSYDLALIDADKPPTPQYFERCLKLVRQGGIIAIDNILLNGRVMREAASDAPPSVGILKDFNQNLPNDPRIVPITLPVGDGLTLLLKK

SEQ ID NO: 24153 - protein, 228 aa, Neisseria meningitidis; identical to SEQ ID NO: 18794

SEQ ID NO: 24154 - protein, 328 aa, Neisseria meningitidis; identical to SEQ ID NO: 991

SEQ ID NO: 24155 - protein, 296 aa, Neisseria meningitidis; identical to SEQ ID NO: 12763

SEQ ID NO: 24156 - protein, 85 aa, Neisseria meningitidis; identical to SEQ ID NO: 18915

SEQ ID NO: 24157 - protein, 199 aa, Neisseria meningitidis; identical to SEQ ID NO: 2043

SEQ ID NO: 24158 - protein, 463 aa, Neisseria meningitidis; identical to SEQ ID NO: 19775

SEQ ID NO: 24159 - protein, 410 aa, Neisseria meningitidis; identical to SEQ ID NO: 14901

SEQ ID NO: 24160 - protein, 151 aa, Neisseria meningitidis
MVDAVVKTPEFLPFTSVGIFRFGADITEYKNILETFMYEPPDEFRTEYYESPDSNLLISVKKNKIISIFCYQELYFMGVNIIGLNFEDFKQLFHHPKSYGVDKYYLSNESYPTYVYEFDEIGVQAWEAKGKIVTIIAGGKDNYSTEPYYDE

SEQ ID NO: 24161 - protein, 302 aa, Neisseria meningitidis
MNQTAINRADVRTRFIFDDMPVRGLHVRLENVWQHIVKQKNYPAAIRRALGELLAAGVLLSGNLKNEGTLIVQVQGQGRLKMLVAEATSDRTVRATARWDEAAEIADDESLGDLLGGNGVFVLTLQPKDGEPWQGVVPLEGDGIAQMLMNYMKRSEQLDTHIVLSASDEAAGGLLVQRLPEEVLDEEAWEHVSTLARTLTAEELAELDAQHVLYRLFHETPPRVFEPETFEFSCTCSRGKVSDMLLMLGGEEVGGVVAEQGSIEVDCDFCHSKYVFDETDVNALFGEDVVGVAKGLPRHTVQ

SEQ ID NO: 24162 - protein, 208 aa, Neisseria meningitidis
MRKIRTKICGITTPEDAAAAAAAGADAVGLVFFQGSSRVVDIARAKKITAALPPFVSVVALFVNESAQNIRRILAEVPIHIIQFHGDEDDTFCRQFHRPYIKAIRVQTTSDIRNAADRFPDAQALLFDAYHPSEYGGTGHRFDWTLLAEYSGKPWVLAGGLTPENVGEAVRITGAEAVDVSGGVEASKGKKDPAKVAAFIATTNRLSR

SEQ ID NO: 24163 - protein, 243 aa, Neisseria meningitidis; identical to SEQ ID NO: 19739

SEQ ID NO: 24164 - protein, 143 aa, Neisseria meningitidis; identical to SEQ ID NO: 4713

SEQ ID NO: 24165 - protein, 290 aa, Neisseria meningitidis; identical to SEQ ID NO: 10998

SEQ ID NO: 24166 - protein, 377 aa, Neisseria meningitidis; identical to SEQ ID NO: 2272

SEQ ID NO: 24167 - protein, 518 aa, Neisseria meningitidis
MDFSWLAEPHTWIGFATLLVLEVVLGIDNLVFVAILANKVQPARRDRARIIGLGLAVVIRIIMLAFMAHIITLTEPLFQIGGLAVSGKDMIMLAGGIFLLYKATTELHERLEGHNRFTVADNQKKHAPFWGVVAQILILDAVFSIDSVITAVAMVDHIVVAMGAVVVAMAVMISASKLLTEFVDRHPTVVMLCLGFLLMIGFSLIAEAFHFHIPKGYLYAAIGFSILIELFNQISQRNSRKNDYIGSSWRKRTAENVLGMMGIRESVLADAGGESGDDAHFEENEKSMIRSVLTLAERPIMGVMIPRRDIERLDISQSREEQCAQLQNTPYSRLLVVGKAGVDEPLGYINKKDLLSQLLETGGLDIQTALRQPLVLPDGTTALGALELFRQSSADYALVVDEFGAVLGMVTMKDLLETIAGEFPEEFEREEEPAVQGNPDESLTVEGALEYVELASQLNLPQQEEDADFHTVAGLIMEELQTIPDVGDFADFHGWRFEVVEKEGQRIERVKITKLPEE

SEQ ID NO: 24168 - protein, 149 aa, Neisseria meningitidis; identical to SEQ ID NO: 3543

SEQ ID NO: 24169 - protein, 123 aa, Neisseria meningitidis; identical to SEQ ID NO: 7208

SEQ ID NO: 24170 - protein, 107 aa, Neisseria meningitidis; identical to SEQ ID NO: 23266

SEQ ID NO: 24171 - protein, 358 aa, Neisseria meningitidis
MICRKPIGHKPYFDMNKTICRTAALLISGFSYANTVIPDVSPVAQGQHVFINIPQQRLFLYTDGKLTKVYPVAVGRAMTQTNLGEHKIGAKAYNPVWYIPKSIQKERGDGVKTIAAGPDNPLGPVFVRLGDPKLGLGIHGTNAPASVPGVRSHGCVRMKSPDALEFAKTIASGSPASVIYQMAGLNEDADRNLWLAAFRDPYGKNNLDIASLKKSIAQWAKTQGKTIAPEKVDAVLKDRTGSAVCLTCGKNGKMKMPLKSLAWIQGSSSYSQAEVIEQTEETNSAEISETRTPEVPDVHTPEAQPHLNTQSDGTPTAYTEPAADSSPQVETPDQAASEPVDVLFSIDVIRQGNLRLGN

SEQ ID NO: 24172 - protein, 167 aa, Neisseria meningitidis; identical to SEQ ID NO: 18251

SEQ ID NO: 24173 - protein, 753 aa, Neisseria meningitidis
LKVTKRDGRLEAIDLDKIHRVVTWAAEGLENVSVSQVELKSHIQFYNGIRTDDIHETIIKAAADLISEDTPDYQYLAARLAIFHLRKIAYGEYEPPHLYDHVKKLTDAGKYDRHILEDYSREEFDELNAYIDHERDMSFSYAAVKQLEGKYLVQNRVTSQIYETPQFLYVLVAMCLFSKYPKETRLDYVKRFYDAVSTFKVSLPTPIMSGVRTPTRQFSSCVLIECDDSLDSINATTSAIVKYVSQRAGIGINAGRIRGLDSEIRGGEARHTGCIPFFKMFQAAVKSCSQGGVRGGAATLFYPLWHIEAESLLVLKNNRGVEDNRIRQLDYGVQINRLLYTRLIKGGNITLFSPNEVPGLYEAFFADQDEFERLYTKYEQDPNIRKRIIPAADLFSTLMQERAGTGRIYIQNVDHCNTHSPFDPCVAPVHQSNLCMEIALPTKPLDNINDPNGEIALCTLSAFNLGALNSLDELEGLADLTVRALDALLDYQGYPVEAARTSTMGRRSLGIGVINYAYYLAKNGVRYSDGSALGLTHRTFEAIQYYLLKASANLAKEYGACTLFNQTVYSQGKLPIDTYKKDLDAVCGEPLHYDWESLRADIVKYGLRNSTLTALMPSETSSQIANATNGIEPPRGLVTVKASKDGILKQVVPEFETLKNAYETLWQLPGNEGYLKLVGVMQKFVDQSISANTAYDPGKFEGGKVSMKQMLKDLLTAYKYGVKTLYYHNTRDGADDTQTDIQDDGCAGGACKI

SEQ ID NO: 24174 - protein, 230 aa, Neisseria meningitidis; identical to SEQ ID NO: 675

SEQ ID NO: 24175 - protein, 245 aa, Neisseria meningitidis; identical to SEQ ID NO: 1449

SEQ ID NO: 24176 - protein, 333 aa, Neisseria meningitidis; identical to SEQ ID NO: 465

SEQ ID NO: 24177 - protein, 134 aa, Neisseria meningitidis; identical to SEQ ID NO: 4298

SEQ ID NO: 24178 - protein, 87 aa, Neisseria meningitidis; identical to SEQ ID NO: 932

SEQ ID NO: 24179 - protein, 174 aa, Neisseria meningitidis; identical to SEQ ID NO: 3281

SEQ ID NO: 24180 - protein, 351 aa, Neisseria meningitidis
MKTYAPALYTAALLTACSPAADSNHPSGQNAPANTESDGKNITLLNASYDVARDFYKEYNPLFIKTYQSEHPGTSVSIQQSHGGSSKQALSVANGLQADVVTMNQSSDIDLLEKKGLVEKGWQQALPDHAAPYTSTMVFLVRKNNPKQIRDWNDLAKDGVNIVIANPKTSGNGRYAFLGAYGYGLKATNGNEQEAQKLVASILKNTPVFENGGRAATTTFTQRNIGDVLITFENEANYVSKKLTQGQFEIVYPSYTISAESPVAVVNSVVAKKGTQKTARAYLEYLWSEPAQELAASLYLRPRNPEVLARHKADFPDLDTFSPEEKFGGWDNIMKTYFADGGIFDRLTAQK

SEQ ID NO: 24181 - protein, 335 aa, Neisseria meningitidis
MSTFFRQTAQAMIAKHIDRFPLLKLEQVIDWQPIEHYLNRQKTRYLRDHRGRPAYPLLSMFKAVLLGQWHSLSDPELEHSLITRIDFNLFCRFDELSIPDYSTLCRYRNWLAQDDTLSELLKLINRQLTEKGLKIEKASAAVIDATIIQTAGSKQRQAIEVDEEGQVSGQTTPSKDKDARWTKKNGLYRLGYKQHTRTDEEGYIKKLHITPANAHECKHLSPLLEGLPKGTTVYADKGYDSAENRQHLEEHQLLDGIMRKACRNRPLSETQTKRNRYLSKTRYVVEQSFGTLHRKFRYARAAYFGLIKVSAQSHLKAMCLNLLKAANRLSAPAAA

SEQ ID NO: 24182 - protein, 138 aa, Neisseria meningitidis; identical to SEQ ID NO: 18118

SEQ ID NO: 24183 - protein, 89 aa, Neisseria meningitidis; identical to SEQ ID NO: 9425

SEQ ID NO: 24184 - protein, 488 aa, Neisseria meningitidis
MMKLGFKPIPLAIAAVLCALVLALPVPDGVKPQAWTLLAMFIGVIAAIIGKAMPLGALSIIAVGLVAVTGVTADKPGAAMSDALSAFANPLIWLIAIAVMISRGLLKTGLGMRIGYLFIAVFGRKTLGIGYSLALSELLLAPVTPSNTARGGGIIHPIMQSIAGSYGSNPAKGTEGKMGKYLALVNYHSNPISSAMFITATAPNPLIVNLIAENLGSSFRLSWGAWAWAMAVPGVIAFFVMPLILYFLYPPEIKETPNAVQFAKDRLREMGKMSADEIIMAVIFGILLLLWADVPALITGNHAFSINATATAFIGLSLLLLSGVLTWDDVLKEKSAWDTIIWFGALIMMAAFLNKLGLIKWFSGVLAESVGGLGVSGTAAGVILVLAYMYAHYMFASTTAHITAMFGAFFAAAVSLNAPAMPTALMMAAASNIMMTLTHYATGTSPVIFGSGYTTMGEWWKAGFIMSVVNFLIFFVIGSIWWKVLGYW

SEQ ID NO: 24185 - protein, 240 aa, Neisseria meningitidis
MKPAYFISDLHLSEKHPELTALLLRFLRSSAAGQARAIYILGDLFDFWVGDDEVSELNTSVAREIRKLSDKGVAVFFVRGNRDFLIGQDFCRQAGMTLLPDYSVLDLFGCKTLICHGDTLCTDDRAYQRFRKIVHRKRLQKLFLMLPLKWRTRLAAKIRRVSKMEKQVKPADIMDVNAAFTARQVRAFNAERLIHGHTHREHIHHENGFTRIVLGDWHNDYASILRVDGDGAVFVPLEKC

SEQ ID NO: 24186 - protein, 281 aa, Neisseria meningitidis
MNIADGRQAFPAPAKLNLDLRITGKREDGYHNIESIFCLIDLQDTVYLKLRDDGKIILHNPVDGMPQEVDLSYRAASLLQKYARNPAGVEIWLDKKIPTGAGLGGGSSDAATVLLVLNRWWQCSRTTQQLIDLGATLGADVPFFIFGKNAFASGIGEKLIGMDIPKQWYVIVKPPVHVSTAKIFTHEGLTRNSASSIMPTFQNLQPFRNDMQAVVFKEYPEVWKAYSELSRYGFALMTGSGACVFTACQDRDSAYNIYRQVSDLYEAYLAEGLSKHPWLSV

SEQ ID NO: 24187 - protein, 161 aa, Neisseria meningitidis; identical to SEQ ID NO: 3482

SEQ ID NO: 24188 - protein, 463 aa, Neisseria meningitidis; identical to SEQ ID NO: 19954

SEQ ID NO: 24189 - protein, 168 aa, Neisseria meningitidis; identical to SEQ ID NO: 18232

SEQ ID NO: 24190 - protein, 223 aa, Neisseria meningitidis; identical to SEQ ID NO: 1391

SEQ ID NO: 24191 - protein, 1491 aa, Neisseria meningitidis; identical to SEQ ID NO: 19610

SEQ ID NO: 24192 - protein, 228 aa, Neisseria meningitidis
MTVLQERYCEVSDRIGKLVLQAGREPHSVSLIAVSKTFPSDGIREVYAAGQRDFGENYIQEWYGKTEELADLTDIVWHVIGDVQSNKTKFVAERAHWVHTVCRLKTAVRLSGQRPSSMPPLQVCIEVNIAGEAAKHGVAPEEAVALAVEVAKLPNIVVRGLMCVAKANSSETELKVQFQTMRKLLADLNTAGVKADVLSMGMSDDMPAAIECGATHVRIGSAIFGKRG

SEQ ID NO: 24193 - protein, 371 aa, Neisseria meningitidis
MGLKKACLTVLCLIVFCFGIFYTFDRVNQGERNAVSLLKDKLFNEEGEPVNLIFCYTILQMKVAERIMAQHPGERFYVVLMSENRNEKYDYYFNQIKDKAERAYFFHLPYGLNKSFNFIPTMAELKVKSMLLPKVKRIYLASLEKVSIAAFLSTYPDAEIKTFDDGTINLIQSSSYLGDEFSVNGTIKRNFARMMIGDWSIAKTRNASDEHYTIFKGLKNIMDDGRRKMTYLPLFDASELKAGDETGGTVRILLGSPDKEMKEISEKAAKNFNIQYVAPHPRQTYGLSGVTTLNSPYVIEDYILREIKKNPHTRYEIYTFFSGAALTMKDFPNVHVYALKPASLPEDYWLKPVYALFTQSGIPILTFDDKD

SEQ ID NO: 24194 - protein, 129 aa, Neisseria meningitidis; identical to SEQ ID NO: 1031

SEQ ID NO: 24195 - protein, 333 aa, Neisseria meningitidis; identical to SEQ ID NO: 19210

SEQ ID NO: 24196 - protein, 421 aa, Neisseria meningitidis; identical to SEQ ID NO: 19068

SEQ ID NO: 24197 - protein, 305 aa, Neisseria meningitidis
MSVYTSVSDDEMRGFLDDYDLGEFVSLQGIAQGITNSNYFLTTTSGRYVLTVFEVLKQEELPFFLELNRHLSMKGVAVAAPVARKDGRLDSVLAGKPACLVACLKGSDTALPTAEQCFHTGAMLAKMHLAAADFPLEMENPRYDAWWTEACARLLPVLSQDDAALLCSEIDALKDNLGNHLPSGIIHADLFKDNVLLDGGQVSGFIDFYYACRGNFMYDLAIAVNDWARTADNKLDEALKKAFIGGYEGVRPLSAEEKAYFPTAQRAGCIRFWVSRLLDFHFPQAGEMTFIKDPNAFRNLLLSLG

SEQ ID NO: 24198 - protein, 399 aa, Neisseria meningitidis; identical to SEQ ID NO: 18454

SEQ ID NO: 24199 - protein, 114 aa, Neisseria meningitidis; identical to SEQ ID NO: 5923

SEQ ID NO: 24200 - protein, 212 aa, Neisseria meningitidis; identical to SEQ ID NO: 9292

SEQ ID NO: 24201 - protein, 46 aa, Neisseria meningitidis; identical to SEQ ID NO: 8701

SEQ ID NO: 24202 - protein, 249 aa, Neisseria meningitidis; identical to SEQ ID NO: 131

SEQ ID NO: 24203 - protein, 207 aa, Neisseria meningitidis; identical to SEQ ID NO: 3013

SEQ ID NO: 24204 - protein, 67 aa, Neisseria meningitidis; identical to SEQ ID NO: 966

SEQ ID NO: 24205 - protein, 369 aa, Neisseria meningitidis; identical to SEQ ID NO: 18151

SEQ ID NO: 24206 - protein, 335 aa, Neisseria meningitidis
MSTFFQQTAQAMIAKHINRFPLLKLDQVIDWQPIEQYLNRQKTRYLRDHRGRPAYPLLSMFKAVLLGQWHSLSDPELEHSLITRIDFNLFCRFDELSIPDYSTLCRYRNWLAQDNTLSELLELINRQLTEKGLKIEKASAAVVDATIIQTAGSKQRQAIEVDEEGQISGQTTPSKDSDARWIKKNGLYKLGYKQHTRTDVEGYIEKLHITPANAHECKHLPPLLEGIAEGTTVYADKGYDSAENRQHLEERQLLDGIMRKACRNRPLSEAQTKRNRYLSKTRYVVEQSFGTLHRKFRYARSTYFGLIKVSAQSHLKAMCLNLLKAANRLSAPAAA

SEQ ID NO: 24207 - protein, 633 aa, Neisseria meningitidis
MTTPKKTAKTSGNEARELADLSEDIGIRFKYPNSERVYLQGSRGDIRVPLREIRQDDTYTAQGTEANPPIPVYDTSGVYGDPAAHIDLKQGLPHIRTAWLNERGDTEILPKLSSEYGIERAHDPKTAHLRFNQITRPRRAKSGGNVTQLHYARRGIITPEMEFVAIRERLKLDELSQKPEYAKLLKQHAGQSFGANIPTHPDQITPEFVRQEIAAGRAIIPANINHPELEPMIIGRNFRVKINGNLGNSAVTSSLTEEVEKMVWSLRWGADTIMDLSTGAHIHETREWIIRNAPVPIGTVPIYQALEKTGGIAEDLTWDLFRDTLIEQAEQGVDYFTIHAGVLLRYVPMTANRLTGIVSRGGSIMAKWCLAHHRENFLYTHFDEICEIMKAYDVSFSLGDGLRPGCIADANDESQFAELHTLGELTDKAWKHDVQVMIEGPGHVPLQRVKENMTEELQHCFEAPFYTLGPLVTDIAPGYDHITSGIGAANIGWYGTAMLCYVTPKEHLGLPDKEDVRTGIITYKLAAHAADLAKGWPGAQLRDNALSKARFEFRWRDQFRLSLDPERAESFHDETLPAEGAKIAHFCSMCGPKFCSMKITQEVRDYADKQKAQRQGMEEKAVEFVKKGAKIYS

SEQ ID NO: 24208 - protein, 428 aa, Neisseria meningitidis
MIYIVLFLAAVLAVVAYNMYQENQYRKKVCDQFGHSDKDALLNSKTSHVRDGKPSGGSVMMPKPQPAVKKTAKPQDPAMRNLQEQDAVYIAKQKQAKASPFKTEIETALEESGIIGNSAHTVSEPQTGHSAPKPADAPAKPAPVPQTPAKPLITLKELSKVELPWFDVRFDFISYIALTEAKELHALPRLSNRCRYQIVGCTMDDHFQIAEPIPGIRYQAFIVGIQAVSRNGLASQEELSAFNRQVDAFAQSMGGQTLHTDLAAFIEVASALDAFCARVDQTIAIHLVSPTSISGVELRSAVTGVGFVLEDDGAFHYTDTSGSTMFSICSLNNEPFTNALLDNQSYKGFSMLLDIPHSPAGEKTFDDLFMDLAVRLSGQLNLNLVNDKMEEVSTQWLKDVRTYVLARQSEMLKVGIEPGGKTALRLFS

SEQ ID NO: 24209 - protein, 362 aa, Neisseria meningitidis; identical to SEQ ID NO: 18731

SEQ ID NO: 24210 - protein, 693 aa, Neisseria meningitidis
MKSLKTFLIWGIVVLVGLASFTTLALSRGEQVSAVWMVTAAISVYCIAYRFYSLYIANRVMRLDPNRLTPAERHNDGLDYVPTHKGVLFGHHFAAIAGAGPLVGPVLAAQMGYLPGTLWIIFGVVFAGAVQDMMVLFVSMRRDGKSLGDIVKQELGTVPGVIASIGILMIMVIIMAVLALIVVKALVHSPWGTFTIAATMPIALFMGIYTRYIRPGKIGEISIVGFILLMLAVIYGEDVAKSSIGHWFDLDGIQLTWAIMIYGFVASVLPVWLLLTPRDYLSTFLKIGTIAALALGIVIVNPALQMPAVTHFIDGSGPVFSGALFPFLFITIACGAVSGFHALISSGTTPKMLENETHVRMIGYGGMLMESFVAIMALAAAASLDPGVYFAMNSPAALIGTDANTAAEVITTKLQFPVDAATLLHTAKEVGENTILSRAGGAPTLAVGMAHIMSRLIPGEAMMAFWYHFALLFEALFILTAVDAGTRVARFMIQDLGSIFYKPFGNTDSIPANLIATFFAVALWGYFLYTGVTDPLGGINSLWPLFGIANQMLAGVALIMCAVVLIKMKRDRYVWVVLVPAVGVLFVTCYAGLQKLFHSDPRISFLAHAGKYSDALAKNEILAPAKDIGEMAQIIFNDKINAGLTILFLSVVVIVAAYGLRTALKARKVGWPTAKEIPAVYRDGKQPEAQSEA

SEQ ID NO: 24211 - protein, 217 aa, Neisseria meningitidis
MKITHCKLKKKVQKELLRFFVLEVTARSAADILGIHPNSAALFYRKIRTVINHHLALAADEVFEGPVEPDESDFGGRRKGRRGRGAAGKVVVFGILKRNGRVYTVVVDNAKSDTLMPVIKQKIMPDSIVYTDSLSSYDKLDVSGFIHYRINHSKEFADRQNHINGIENFWNQAKRVLRKYNGIDCKSFPLFLKECEFRFNFGTPSQQLKILRDWCGI

SEQ ID NO: 24212 - protein, 316 aa, Neisseria meningitidis
MSTFFQQTAQAMIAKHIDRFPLLKLDRVIDWQPIEQYLNRQRTRYLRDHRGRPAYPLLSMFKAVLLGQWHSLSDPELEHSLITRIDFNLFCRFDELSIPDYSTLCRYRNWLAQDDTLSELLELINRQLTEKGLKIEKASAAVVDATIIQTAGSTQRQVIEVDEEGQISGQTTPSKDKDARWIKKNGLYKLGYKQHTRTDAEGYIEKLHITPANAHECKHLPPLLEGLPKDTTVYADKGYDSAENRQHLEEHQLQDGIMRKACRNRPLTEAQTKRNRYLSKTRGDVFEPVESRQQAKCARCRPKGDRMPDYRVSRED

SEQ ID NO: 24213 - protein, 365 aa, Neisseria meningitidis
MNQTFTLPDTRPYPQNPIKNHLLLNAYQLAHNSSQASRKLSSGQLQTEIRGMLEQNHYINLSLALTMSPDAGTYAALLSSVNAVLDCEKEGEVQWFALPVVLVSGCKKERAIEMKLPTEALFACLQNYPHLRALTQETQWLPYLVHSSDLSAVAPDEWWRAKQNTEAAAQHLRRFAPRPLLLPEGQSVHVVYALGFGSGKVQTALGQNLLQAGLPLMQVWQENLASEGVTLFANPLSPDSPVRALSDGSHTRQRMAMDVFAANAIRAVRMQSPRVGVVAAAKAGGQVLFGFNATDGAFEVVPQVFSWQLSFTDNIAVIQQNFLDLMAECRVEHVYLLHNPLGEQESIPSYAEALKREGHNPFFSA

SEQ ID NO: 24214 - protein, 619 aa, Neisseria meningitidis
LEDGFLRSLGLGVAGYPPFALVYDDIGIYYDTTRPSRLEQLILAANMPSEMLNQAQQAIDLILTHRLSKYNHALDFSDGLVQDSKNIVLVIDQTFGDMAIQYGGADEATFRQMFQTALAENPDAEIWVKTHPDVLSGKKQGYLTDLAQQPRVRLLAEDINPISLLQAVDKVYCVTSQMGFEALLCGKPLVTFGLPWYAGWGVSDDRHPKIDSLVQTQRRAPRNLLQLFAAAYLQYSRYLNPNTGEAGSLFDVIDYLATVKRKNDKLRGELYCVGMSLWKRAVAKPFFNVPSCRLKFISSTQKLAGVKLSDDARILAWGNGKEAIVRFAEQHHIPLLRMEDGFIRSVGLGSNLVPPLSLVTDDMSIYFNAETPSRLEYILQNQNFDDQDFQTALKLQKMLTENHISKYNVGSSDFTAPSTDKTVILVPGQVEDDASIRYGSPQIYRNLDLLRTVRERNPNAYIIYKPHPDVVSGNRIGHISPEDAARYADQTAEQTDILTCLQYADEVHTMTSLTGFEALLRGKKVSCYGLPFYAGWGLTQDLLPIPRRSRRLELWQLIAGTLIHYPDYIHPETHQAINAETAAQILIRQKNMQKNNNGLHRGYFAKKLGKIKQLYRSFK

SEQ ID NO: 24215 - protein, 630 aa, Neisseria meningitidis
MPILTIREVCNINHWGIGYYDVDDSGEIIVRPNPSQHNQTVSLQKLTEAVQQKHQARLPVLFCFPQILEHRLRDINRAFQTAREECGYKGGYCLVYPIKVNQHRRVIESLMSSGQPHGLEAGSKAELMAVLAHAGTRQTLIVCNGYKDREYIRFALMGEKLGHQVYLVIEKLSEIQMVLEEAEKLGIKPRLGVRARLASQGSGKWQSSGGEKSKFGLSASQVLQLVDILKQKNRLDCLQLLHFHLGSQLGNIRDVATGVHESARFYVELHKLGVNIRCFDVGGGLGVDYEGNRTQSDCSVNYSLNEYAATVVWGISQACLEHGLPHPTIITESGRGITAHHAVLVANVIGVERYKPRRLDAPSPEAPRVLHSMWETWTDISASREKRSLRSWIHEGQFDLADVHNQYNVGLLSLAQRAWAEQLYLNICHEVGELFNEKHRSHRTIIDELQERFADKLYVNFSLFQSLPDAWGIDQLFPVCPITGLNEPIARRAVLLDITCDSDGTIDHYIDGDGIAGTMPMPDYPEEEPPLLGFFMVGAYQEILGNMHNLFGDTATADVVVGEDGQFTVIDYDEGNTVADMLEYVYQDPKELMKRYREQIEHSDLPASQAMSFLKELEAGLNGYTYLEDE

SEQ ID NO: 24216 - protein, 192 aa, Neisseria meningitidis; identical to SEQ ID NO: 9025

SEQ ID NO: 24217 - protein, 94 aa, Neisseria meningitidis; identical to SEQ ID NO: 3480

SEQ ID NO: 24218 - protein, 181 aa, Neisseria meningitidis; identical to SEQ ID NO: 2183

SEQ ID NO: 24219 - protein, 414 aa, Neisseria meningitidis; identical to SEQ ID NO: 19743

SEQ ID NO: 24220 - protein, 106 aa, Neisseria meningitidis; identical to SEQ ID NO: 853

SEQ ID NO: 24221 - protein, 154 aa, Neisseria meningitidis
MTYEKLYELRQTLRPTTKDGLYTDNEKNREILTVRWSGNTENPKNFSAVAIGINPSKANDERSDKTLTQLARFLDMYGFTNFKMLNIFSSYSTQQTGIRTNTQTDFSKFKGCLEDADMIILAWGTDRGAYKDEKKQNTGISKSRKIYGKSILYF

SEQ ID NO: 24222 - protein, 219 aa, Neisseria meningitidis; identical to SEQ ID NO: 19810

SEQ ID NO: 24223 - protein, 65 aa, Neisseria meningitidis; identical to SEQ ID NO: 926

SEQ ID NO: 24224 - protein, 94 aa, Neisseria meningitidis
MKKLLLVAVVSLSAAAAFAGDSAERQIYGDPHFEQNRTKAVKMLEQRGYQVHDVDADDHWGKPVLEVEAYKDGREYDIVLSYPDLKIIKEQLDR

SEQ ID NO: 24225 - protein, 273 aa, Neisseria meningitidis; identical to SEQ ID NO: 19705

SEQ ID NO: 24226 - protein, 553 aa, Neisseria meningitidis; identical to SEQ ID NO: 18342

SEQ ID NO: 24227 - protein, 220 aa, Neisseria meningitidis
MIHAVLFDLDGTLADTALDLGGALNTLLARHGLPAKSMDEIRTQASHGAAGLIKLGAGITPDHPDYARWRTEYLEEYDRRYAQDTELFDGVNELIAELNQRGIKWGIITNKPMRFTDKLVPKLGFIIPPAVVVSGDTCGEPKPSIKPMLYACGQIHADPQHTLYVGDAERDIQAGRNAGMKTVLAEWGYISDEDDTDSWQADFHIRTPLDLLECLDKIQP

SEQ ID NO: 24228 - protein, 258 aa, Neisseria meningitidis; identical to SEQ ID NO: 3248

SEQ ID NO: 24229 - protein, 329 aa, Neisseria meningitidis; identical to SEQ ID NO: 247

SEQ ID NO: 24230 - protein, 145 aa, Neisseria meningitidis; identical to SEQ ID NO: 1767

SEQ ID NO: 24231 - protein, 170 aa, Neisseria meningitidis
LGDGCRNGINMSIKYIAMPAAWKYMPTDVSRVAKEVFGYLYNSQGASTRFDKYFNTIDNRADFFAASNLYEQNLGSKARWFGGADFVSRAAITGLGADGEASYITFAAGKVVGNPPIYEWRAASGNALIVNGFYNFRDLFNKKTNPREWDIQQLKSEQKLLQPIQPKIFE

SEQ ID NO: 24232 - protein, 473 aa, Neisseria meningitidis; identical to SEQ ID NO: 19913

SEQ ID NO: 24233 - protein, 68 aa, Neisseria meningitidis; identical to SEQ ID NO: 4044

SEQ ID NO: 24234 - protein, 1201 aa, Neisseria meningitidis
MFHFAFPAQTALRQAITDAYRRNEIEAVQDMLQRAQMSDEERNAASELARRLVTQVRAGRTKAGGVDALMHEFSLSSEEGIALMCLAEALLRIPDNATRDRLIADKISDGNWKSHLNNSPSLFVNAAAWGLLITGKLTATNDRQMSSALSRLISKGGAPLIRQGVNYAMRLLGKQFVTGQTIEEALQNGKEREKMGYRFSFDMLGEAAYTQADADRYYRDYVEAIHAIGKDAAGQGVYEGNGISVKLSAIHPRYSRAQHGRVMGELLPRLKELFLLGKKYDIGINIDAEEANRLELSLDLMEALVSDPDLAGYKGIGFVVQAYQKRCPFVIDYLIDLARRNNQKLMIRLVKGAYWDSEIKWAQVDGLNGYPTYTRKVHTDISYLACARKLLSAQDAVFPQFATHNAYTLGAIYQMGKGKDFEHQCLHGMGETLYDQVVGPQNLGRRVRVYAPVGTHETLLAYLVRRLLENGANSSFVNQIVDENISIDRLIKSPFDTIAEQGIHLHNALPLPRDLYGKCRLNSQGVDLSNENVLQQLQEQMNKAAAQDFHAASIVNGKARDVGEAQPIKNPADHDDIVGTVSFADAALAQEAVGAAVAAFPEWSATPAAERAACLRRFADLLEQHTPALMMLAVREAGKTLNNAIAEVREAVDFCRYYANEAEHTLPQDAKAVGAIVAISPWNFPLAIFTGEVVSALAAGNTVIAKPAEQTSLIAGYAVSLMHEAGIPTSALQLVLGAGDVGAALTNDARIGGVIFTGSTEVARLINKALAKRGDNPVLIAETGGQNAMIVDSTALAEQVCADVLNSAFDSAGQRCSALRILCVQEDVADRMLDMIKGAMDELVVGKPIQLTTDVGPVIDAEAQQNLLNHINKMKGVAKSYHEVKTAADVDSKKSTFVRPILFELNNLNELQREVFGPVLHVVRYRADELDNVIDQINSKGYALTHGVHSRIEGTVRHIRSRIEAGNVYVNRNIVGAVVGVQPFGGHGLSGTGPKAGGSFYLQKLTRAGEWVAPTLSQIGQADEAALKRLEALVHKLPFNAEEKKAAAAALGHARIRTLRRAETVLTGPTGERNSISWHAPKRVWIHGGSTVQAFAALTELAASGIQAVVEPDSPLASYTADLEGLLLVNGKPETAGISHVAALSPLDSARKQELAAHDGALIRILPSENGLDILQVFEEISCSVNTTAAGGNASLMAVAD

SEQ ID NO: 24235 - protein, 460 aa, Neisseria meningitidis; identical to SEQ ID NO: 19249

SEQ ID NO: 24236 - protein, 945 aa, Neisseria meningitidis
MLDKYSPAEIESKHYQNWESQGYFQPDMDLTKPSFSIQLPPPNVTGTLHMGHAFNQTIMDGLTRYYRMKGCNTAWIPGTDHAGIATQIVVERQLAAQNVSRHNLDREKFLEKVWEWKEVSGGTITQQMRRVGCSADWTREYFTMDDVRAETVTEVFVRLYEQGLIYRGKRLVNWDPVLGTAVSDLEVESVEEQGSMWHIRYPLADNPAEAVIVATTRPETLLGDVAVAVNPEDERYTHLIGKELILPLTGRTIPVIADEYVEKDFGTGCVKITPAHDFNDYEVGKRHDTRLVNVFDLEAKVLANAEVFNFKGEAQPSFAMPEKYAGLDRFAARKQMVADLQEQGFLVEIKAHTLMTPKGDRTGSVIEPMLTSQWFVAMSATPNGGEPDSEFKGLSLADKAKKAVDSGAVRFIPENWVNTYNQWMNNIQDWCISRQLWWGHQIPAWYDEAGNVYVARNQVEAEKQAGKTGLTREEDVLDTWFSSALVPFSTLGWPSETDELKAFLPSNVLVTGYEIIFFWVARMIMMTTHFTGKVPFKDVYIHGIVRDHEGKKMSKSEGNVIDPVDLIDGIGLEKLLVKRTTGLRKPETAPKVEEATKKLFPEGIPSMGADALRFTMASYASLGRSVNFDFKRAEGYRNFCNKIWNATNFVLMNTENQDCGYGATAAEPRGYSFPDMWIVGRLNQTIEQVTQAYETYRFDLAAETLYSFVWNDYCDWYLELAKVQLQTGCASRQRATRHTLLRVLEAALRLLHPIIPFITEELWQTVAPMCDAKTADSIMLARFPEADGGDIVQTAFGQMTVLQDLIGAVRNLRGEMGIQPNVKAPLFVESADDLADYLKYLPMMTRLTEAQQVATLPESEDAPVAVCNGARLMLKVEIDKATETARLSKEAEKLQKALDKLNAKLSKPGYTEKAPAHLVEKDKADLAELEDKMAKVQTQLSKLKD

SEQ ID NO: 24237 - protein, 260 aa, Neisseria meningitidis; identical to SEQ ID NO: 16467

SEQ ID NO: 24238 - protein, 61 aa, Neisseria meningitidis; identical to SEQ ID NO: 1836

SEQ ID NO: 24239 - protein, 562 aa, Neisseria meningitidis; identical to SEQ ID NO: 12334

SEQ ID NO: 24240 - protein, 208 aa, Neisseria meningitidis
MADMKRLKHLMFSPFINNNPIALQVLGICSALAVTTKLQTAIVMGISVALVTGFSSFFISLVRNYIPNSIRIIVQMAIIASLVTLVDQLLQAFAYELSKQLSVFVGLIITNCIVMGRAEAFAMKEPPLESLIDGIGNGAGYGIMLLVVATVRELIGSGKLLGYTVFQTVQDGGWYQTNGLFLLAPSAFFIIGFLIWGLRTWKPEQAEE

SEQ ID NO: 24241 - protein, 366 aa, Neisseria meningitidis
MTRIAILGGGLSGRLTALQLAEQGYQIALFDKGCRRGEHAAAYVAAAMLAPAAEAVEATPEVIKLGRQSIPLWRNIRGHLKTPAMMQENGSLIVWHGQDKPLSSEFVRHLKRGGVADDEIVRWRADEIAEREPQLGGRFSDGIYLPTEGQLDGRQILSALADALDELNVPCHWEHECVPEGLQAQYDWLIDCRGYGAKTAWNQSPEHTSTLRGIRGEVARVYTPEITLNRPVRLLHPRYPLYIAPKENHVFVIGATQIESESQAPASVRSGLELLSALYAVHPAFGEADILEIATGLRPTLNHHNPEIRYNRARRLIEINGLFRHGFMISPAVTAAAVRLAVALFDGKDAPERDEESGLAYIRRQD

SEQ ID NO: 24242 - protein, 70 aa, Neisseria meningitidis; identical to SEQ ID NO: 19466

SEQ ID NO: 24243 - protein, 42 aa, Neisseria meningitidis; identical to SEQ ID NO: 6907

SEQ ID NO: 24244 - protein, 644 aa, Neisseria meningitidis
MSLIECKNINRYFGSGENRVHILKDISLSIEKGDFVAIIGQSGSGKSTLMNILGCLDTAGSGSYRIDDIETAKMQPDELAALRRERFGFIFQRYNLLSSLTARDNVALPAVYMGAGGKERSARAEKLLQDLGLASKEGNKPGELSGGQQQRVSIARALMNGGEIIFADEPTGALDTASGKNVMEIIHKLHKAGHTVIMVTHDPGIAANANRVIEIRDGEIISDTSKNPEIPASNVGRIREKASWSFYYDQFVEAFRMSVQAVLAHKMRSLLTMLGIIIGIASVVSVVALGNGSQKKILEDISSIGTNTISIFPGRGFGDRRSGRIKTLTIDDAKIIAKQSYVASATPMTSSGGTLTYRNTDLTASLYGVGEQYFDVRGLKLETGRLFDENDVKEDAQVVVIDQNVKDKLFADSDPLGKTILFRKRPLTVIGVMKKDENAFGNSDVLMLWSPYTTVMHQITGESHTNSITVKIKDNANTQVAEKGLTDLLKARHGTEDFFMNNSDSIRQIVESTTGTMKLLISSIALISLVVGGIGVMNIMLVSVTERTKEIGIRMAIGARRGNILQQFLIEAVLICVIGGLVGVGLSAAVSLVFNHFVTDFPMDISAASVIGAVACSTGIGIAFGFMPANKAAKLNPIDALAQD

SEQ ID NO: 24245 - protein, 109 aa, Neisseria meningitidis; identical to SEQ ID NO: 10359

SEQ ID NO: 24246 - protein, 581 aa, Neisseria meningitidis
MERQTDEFAQAAARAAIWFLARYAGSGSEVLANCTERLFQALQNGHSFIRLSGGEADALSALAPVVGTSAAPLILEGRRLFLGRMWQLEYDLAAEIKRLAAAGTSAPDAAGARQNLAKWFQGTGSEGQRDAAALALLQSFMVITGGPGTGKTTTVAKLLALICGEDENLPNIALAAPTGKAAAHMARALHRAINGFDAPEAIRRHLLKLEGQTVHRLLKLRPPKMQAAFNPVYPLPLDVLVIDEASMLDTALMLQLLKAVKTGARVILLGDENQLPSVGIGAVLSVLSHKTVLDGETHQRLAGFLPEHGFSVSANPPVLAQNTAHLSFSHRFGDNSGIGCLARAAVSGDEGAWALFDRFPDELEHSECSPNARVERLYRAHKAYWQAVKDGNIEAAYAGISDIVVLAAWRQDAEDFNEAYCSHVRRKMNIPEHQAYFAGEPIMIRQNDYALELFNGDIGLIMEDVGRQGSLAAYFADADGFKKVAVSCLPDFEPAFAMTVHKSQGSEYREVWLLPPSAAPSDEGDDALSGLSKELLYTAITRAREKFVFFGGEETFRQAAATVKTRQTALGSMLERVFSQE

SEQ ID NO: 24247 - protein, 217 aa, Neisseria meningitidis; identical to SEQ ID NO: 115

SEQ ID NO: 24248 - protein, 356 aa, Neisseria meningitidis; identical to SEQ ID NO: 5919

SEQ ID NO: 24249 - protein, 601 aa, Neisseria meningitidis; identical to SEQ ID NO: 18531

SEQ ID NO: 24250 - protein, 148 aa, Neisseria meningitidis
MIFEDYFSELQADMVSICLEYVQGKADKIYIYAAFEPRVSGAGCFFSVKGKLVQRHLVNQEIPEVNLDHQIQVLDILMEDLEKLNSICQKFNQPMPTEIKMIYDVKKNSLSANYQYNLILSSESGLLALPQDVEDAWFEEIKKQMEDN

SEQ ID NO: 24251 - protein, 203 aa, Neisseria meningitidis; identical to SEQ ID NO: 18365

SEQ ID NO: 24252 - protein, 201 aa, Neisseria meningitidis
MNTDFQNILKQLGKQAQKEAAEKQAAEKNKQKQEQDFDFSQAVGQVSPLKNRQQYYAPPDKPPIKVRPKDNRADEENYFYIGSTYNDPPASFSKNGQGKNDIQRLKNGYYPVVTDVDLHGYTQEEAQKVLNEFIAFTQKRGVCGEIIHGSGLGSKGYKPVLKNMTRNWLMQHPDVLAYAEPREGNDGCVRILLKRKLRQQD

SEQ ID NO: 24253 - protein, 354 aa, Neisseria meningitidis; identical to SEQ ID NO: 2527

SEQ ID NO: 24254 - protein, 503 aa, Neisseria meningitidis
MSEQNHPQTEPQLDENQIIALRREKLHNIRQQRNAYPNDFKRDSFAADLHAQYGEIGKEELDPQGIPVKVAGRMMLKRQMGKASFATIQDVSGQIQLYLNNKGVSQEVLDDFNHWDLGDIVGAEGTLFKTNHGELTVRVSDIRLLSKSLRPLPDKHKGLSDQETKYRQRYVDLIANEESRNTFIKRSQIIQSVRNFMVGEHYLEVETPMMHPIPGGATAKPFVTHHNALDIPLYLRIAPELYLKRLVVGGLERVFEINRSFRNEGMSVRHNPEFTMIEFYEAFSDYERMMQMAEDIIRNASRTVNGTANITYNGKEVDLESPFERLTILEAIKKYNPHYTDEQLNDAEWLKKEIVKHGESLPPSPGIGSLQLALFEGCAEGKLWNPTFIIDYPVEVSPLARASDTKQGLTERFELFVVGRELANGYSELNDPEDQAERFKSQVAQKDAGDDEAMHYDADYIRAMEFGLPPTGGCGIGIDRLVMLLTDSQTIRDVILFPQMRPE

SEQ ID NO: 24255 - protein, 109 aa, Neisseria meningitidis; identical to SEQ ID NO: 4604

SEQ ID NO: 24256 - protein, 449 aa, Neisseria meningitidis; identical to SEQ ID NO: 481

SEQ ID NO: 24257 - protein, 140 aa, Neisseria meningitidis; identical to SEQ ID NO: 3245

SEQ ID NO: 24258 - protein, 384 aa, Neisseria meningitidis; identical to SEQ ID NO: 19546

SEQ ID NO: 24259 - protein, 56 aa, Neisseria meningitidis; identical to SEQ ID NO: 8938

SEQ ID NO: 24260 - protein, 498 aa, Neisseria meningitidis
MSLALVYSRALSGMNAPLVEVEAHLANGLPHFNIVGLPDTEVKESRDRVRAAIIQSGFEFPAKKITVNLAPADLPKESGRFDLPIAIGILAASGQVAPEKLAEYEFAGELALSGLLRPVRGALAMAWQGMQAKRAFVLPEENAGQAAVMRGITVYGARSLGEVAAHLNGIEPLAQTECSVPQMPSEHGGQPDLCDVKGQHTARLALEIAAAGGHSLLMMGPPGTGKSMLSQRLPGILPPLTEDELVEVWALRSLLPNHQQQLDSHRPFRSPHHSASAAAMVGGGSDPRPGEISLAHHGVLFLDELPEFDRKVLEVLREPLENGEIHISRAARQAVYPAKFQLVAAMNPCPCGYLGHPVKPCRCTPESVARYRSKISGPLLDRIDLTIEVPSLSAAELMQQEAGESSASVLERVIAARDKQYARQGKVNAALSVSELDSQARIQKEAQEALGGLLEKLSLSARSFHRIMRVARTLADLAGDEEVGRSHVMKAIGFRRAL

SEQ ID NO: 24261 - protein, 46 aa, Neisseria meningitidis; identical to SEQ ID NO: 13095

SEQ ID NO: 24262 - protein, 113 aa, Neisseria meningitidis; identical to SEQ ID NO: 118

SEQ ID NO: 24263 - protein, 668 aa, Neisseria meningitidis
MADMKKITPQNLRPLLSESLGHTDFVNVLNALIKFLRRGGKKCAGERFDLIIDTFKQDRELLSRFSRCFYIWLAQIHIYPALIKLGIFSRHSFAREMGIRIYERFSPSYKDFANLGEVFLYLFHSENDDKWLQTLNIRQWLVLYELIRSHAEPSKLQTAGIRLADARLRAIEMLSVWTASEAIEPDLIRIAPRLLEADSSFVALQRETAKLVEHYRNGTTPYDTAHLEVMFDQCFSQIDYLRRKGTGAGSGSSVKVAHLLERLRQTVDRLKLLTDIQTGAGNSNRLTIALMNSLIYAAVEQYSTRHLRRSSIRMLARSITENKSHHGEHYITRNRKEYFKMFYSAAGGGIIIALMALLKIRIGTLGLSPFLTSLSAGFNYGIGFMIIHMLHCTVATKQPAMTAASFAEQVDLNEGGKAVDNKLAKLLIDVCRSQSVAVFGNVSIAILLACAISFGYAHLYRLPILDAHTAAYQFKSIDIIAYPTLWYAAIAGLWLFCSGIIAGFFDNRADYLNLRQRLPFNPLLRKIMRPGPRRVLAAYIHKHYGSLVGNFIFGMLLGMTGYFGHLLGLPLDIRHVAFSSANLGYAAVSGNVGLGTFVLGIFSVLTIGLVNLCVSFSLALFVALRSRGTKIGSIRNLIKSFWNQIKSNPCILFLPPAKEQGHPPSDKP

SEQ ID NO: 24264 - protein, 38 aa, Neisseria meningitidis; identical to SEQ ID NO: 6664

SEQ ID NO: 24265 - protein, 69 aa, Neisseria meningitidis
MILNIRKMGNSQGVILPKSLLGQIGAVDSLAVTVEKGNIILSCPTVRRGWAEAAAMLVETEQEHFFFRN

SEQ ID NO: 24266 - protein, 101 aa, Neisseria meningitidis
VATSTDIKGKYVQSVEVKNGVVTATMASSNVNNEIKGKKLSLWAKRQNGSVKWFCGLPVTRNNAKANAANADDVAKTGTDSEKINTKHLPSTAPTRKSTPN

SEQ ID NO: 24267 - protein, 95 aa, Neisseria meningitidis; identical to SEQ ID NO: 738

SEQ ID NO: 24268 - protein, 413 aa, Neisseria meningitidis; identical to SEQ ID NO: 963

SEQ ID NO: 24269 - protein, 268 aa, Neisseria meningitidis; identical to SEQ ID NO: 3556

SEQ ID NO: 24270 - protein, 371 aa, Neisseria meningitidis; identical to SEQ ID NO: 19086

SEQ ID NO: 24271 - protein, 156 aa, Neisseria meningitidis
MTDTDTQADRFEQMMWQAVDKLFEQHDGKLESMDGREQELVLIWRAEADIGNGGILQFVCNWGFPAAEKTCSVLKKIGAIHSAMLIHRAADALRKEIRHLQSEGKNLKEMWDITKHLDNKTASLPNSLDEQYWQDPDKLYLPGWQYYSGNPVQTLF

SEQ ID NO: 24272 - protein, 165 aa, Neisseria meningitidis
MNNLPVADLLVFAIIAACIVISTMRGVIAEAGSMAAWVVSFFFAKLFAAPFADLAFASFQPRLFALALSFISLFVIACLIQKMLRSLLTGAVSAVGLGFANRILGGVFGALKGVLIVTLLVMLASKTDLPDTEEWRQSYTLPFFVSLSEAVLNHSGGTAETPEDD

SEQ ID NO: 24273 - protein, 122 aa, Neisseria meningitidis; identical to SEQ ID NO: 19227

SEQ ID NO: 24274 - protein, 103 aa, Neisseria meningitidis; identical to SEQ ID NO: 392

SEQ ID NO: 24275 - protein, 657 aa, Neisseria meningitidis
MHPIETPDKTFHDGDGVSELGTILPAWWLNQVQSELLAVLTAAGIQPDKSQPNQLLAALNRLAVVTTGDQTITGQKTFTAQTQFQSGIHLSANQTNWNGGHKAYIGAAADNAHIVFGDNTLRLHGANNRISYNNHDIFHKANKPRFAEDIKGKPNTLSGYGIGNFKVETFRGDLNTLKTDGIYSLPTAVGSSNLPVENTACHIQVIAGTQPGWCRQLGYPAYTSDVYERHQTSSANDNWSAWKKLNSDGIPAGAIVSFPKAVQNPAGYLKANGTTFAQNTFPDLYRALGNSNRLPDLSRTDIGITAWFPSDQIPTGWLAFDDIRTRVTETAYPELYRLLTGKYGSIQNVPQAEDRFIRNAGNSLAVGTKQEDEIKRHVHKVFSHWTNHTDTAAVGYEDHNERQRSALVSTWTDGDLNDNGFLTPRSDSKMATGGDENRPKALVLKLCIKAADTLGEAVFWIKSHGETINAGALDAGTLAQGLQDKADRDHTHTAAQIQGLDEKISTAVAAQFTRQTIGGVDIVRFPDGTMIQTGSYRFTRSGGPIENEVVFPVAFADGNVKCFVSERHSGRVTGDRRQHNWLFIRAKNHAAAIITNWYEGSCDWMAIGKAASGNAASSPIGPEIPETNEEPQRESGRTSTGPRNRRRRDGLLEALQD

SEQ ID NO: 24276 - protein, 267 aa, Neisseria meningitidis; identical to SEQ ID NO: 2269

SEQ ID NO: 24277 - protein, 462 aa, Neisseria meningitidis; identical to SEQ ID NO: 18612

SEQ ID NO: 24278 - protein, 166 aa, Neisseria meningitidis; identical to SEQ ID NO: 18838

SEQ ID NO: 24279 - protein, 201 aa, Neisseria meningitidis; identical to SEQ ID NO: 14993

SEQ ID NO: 24280 - protein, 89 aa, Neisseria meningitidis; identical to SEQ ID NO: 4489

SEQ ID NO: 24281 - protein, 225 aa, Neisseria meningitidis; identical to SEQ ID NO: 1002

SEQ ID NO: 24282 - protein, 133 aa, Neisseria meningitidis; identical to SEQ ID NO: 18594

SEQ ID NO: 24283 - protein, 126 aa, Neisseria meningitidis; identical to SEQ ID NO: 3371

SEQ ID NO: 24284 - protein, 620 aa, Neisseria meningitidis
MALLQISEPGMSAAPHRHRLAAGIDLGTTNSLVATVRSGSAACLPDAEGRVTLPSVVRYLENGGIEVGKTALSAQKTDPLNTVSSAKRLIGRTLADLHQNTHYLPYRFGDNQRVIELHTRQGVKTPVEVSAEILKTLKSRAEETLGGDLVGVVITVPAYFDDAQRQATKDAARLAGLNVLRLLNEPTAAAIAYGLDNASEGTFVVYDLGGGTFDVSVLQLTKGLFEVKATGGNSALGGDDFDHRLFCYLLEQNGLSQLNEQDSQLLLSLVRAAKEQLTTQTEARIQATLSDGMAIDTSISRAEFHNLTQHLVMKTLEPVKQALKDAGVGKNEVKGVIMVGGSTRMLHVQQAVATFFGQTPLNNLNPDEVVALGAAIQANVLAGNKADGEWLLLDVTPLSLGLETYGGLAEKIIPRNSTIPTARAQDFTTFKDGQTAMTIHVVQGERELVADCRSLAKFTLRGIPPMAAGAARIRVTFQIDADGLLSVSAQEQSTGVHAQIEVKPSYGLDDGAITRMLKDSMDNAAEDMAARARAEAVVEAESLTDAVNAALELDSDLLDAEELQQIRQGIADLQGRLKDGKAEDIRAAAAKLGSITDNFAAKRMNRNIQRALTGQSVDNI

SEQ ID NO: 24285 - protein, 185 aa, Neisseria meningitidis
MKPKFKTVLTALLLAVSLPSMAATHVLMETDMGNIRLVLDESKAPKTVANFVRYARKGFYDDTVFHRVIDGFVIQGGGFTEDLVQKATDKAVANESGNGLKNTAGTIAMARTADPDSATSQFFINLADNASLDYKNGQYGYTVFGRVESGMDTVSKIARVKTATRGFYQNVPVQPVKIRRVVVGQ

SEQ ID NO: 24286 - protein, 159 aa, Neisseria meningitidis; identical to SEQ ID NO: 929

SEQ ID NO: 24287 - protein, 263 aa, Neisseria meningitidis; identical to SEQ ID NO: 18955

SEQ ID NO: 24288 - protein, 284 aa, Neisseria meningitidis; identical to SEQ ID NO: 18516

SEQ ID NO: 24289 - protein, 111 aa, Neisseria meningitidis; identical to SEQ ID NO: 16634

SEQ ID NO: 24290 - protein, 376 aa, Neisseria meningitidis
MKQTDSTIKSRAAVAFAPNQPLQIVEIDVEMPRKGEVLIRNTHTGVCHTDAFTLSGSDPEGVFPVVLGHEGAGVVVAVGEGVSSVKPGDHVIPLYTAECGECEFCCSGKTNLCVSVRDTQGKGLMPDGTTRFSYQGQPIYHYMGCSTFSEYSVVAEVSLAKINPEANHEQVCLLGCGVTTGIGAVHNTAKVQEGDSVAVFGLGAIGLAVVQGARQAKAGRIIAIDTNPAKFELAKQFGATDCLNPNDYDKPIKDVLLDINKWGIDHTFECIGNVNVMRQALESAHRGWGQSIIIGVAGAGQEISTRPFQLVTGRVWKGTAFGGVKGRSELPKMVEDSMKGDIELEPFVTHTMTLDQINEAFDLMHEGKSIRAVIHY

SEQ ID NO: 24291 - protein, 94 aa, Neisseria meningitidis; identical to SEQ ID NO: 11561

SEQ ID NO: 24292 - protein, 1277 aa, Neisseria meningitidis
MTTTTAPQRIREIPYNYTSYTDREIVIRLLGDEAWQILQDLRGQRKTGRSARMLFEVLGDIWVVVRNPYLVDDLLEHPKRRAALVREMRHRLNEIRKRRDDNRQVDVLVAAAEKAVERFDSSFDETSQKRHQILERLSKITKPHNIMFDGLARVTHVTDATDWRVEYPFVVVNPDTEAEVAPLVRALIELDLVIIPRGGGTGYTGGAIPLDAMSAVINTEKLDKHRGVEFVELAGLDGRHPIIRCGAGVVTRRVEETAHQAGLVFAVDPTSADASCVGGNVAMNAGGKKAVLWGTALDNLAYWQMVNPQGEWLRIERVRHNFGKIHDEETAIFDVHTLDSDGLNVVKTERLEIPGHKFRKVGLGKDVTDKFLSGLPGVQKEGTDGIITSVAFVLHKMPKYTRTVCMEFFGTVATATPSIVEIRDFLLAHESVRLAGLEHLDWRYVRAVGYATKAAGKGRPKMVLLADVVSDDEAAVEAAAEHICELARARDGEGFIAISPEARKTFWLDRSRTAAIAKHTNAFKINEDVVIPLERLGEYSDGIERINIELSIQNKLKLCAALEQYLSGKLPIDKMGTDLPTAELLGERGKHALAHVSAVKARWDWLLANLDTPLADYKARYGAAVHAAPEAKDNESCFTAFRDFRLRVSVKADVMKPLSEIFSGKTDTKIIEGLGKIHAKTVRGRVFVALHMHAGDGNVHTNIPVNSDDAEMLQTAYRSVERIMKIARSLNGVISGEHGIGITKLEFLSDEEMQPFWNYKNQVDPKHTFNRHKLMKGSDLRNAYTPSFELLGAESLIMEKSDLGTIADSVKDCLRCGKCKPVCSTHVPRANLLYSPRNKILGVGLLTEAFLYEEQTRRGVSVKHFEELMDIGDHCTVCHRCVKPCPVNIDFGDVTVAVRNYLADSGHKRFAPAAAMGMAFLNATGPKTIKALRAAMIQTGFPAQNFAYKIGKLLPIGTKKQKAEPKATVGKAPIKEQVIHFINRPLPKSVPAKTPRSLLGIEDGKSIPIIRNPAAPEDAEAVFYFPGCGSERLFSQIGLAVQAMLWHVGVQTVLPPGYMCCGYPQDAGGNKAKAEEMSTNNRVAFHRMANTLNYLDIKTVVVSCGTCYDQLEKYRFEEIFPGCRIIDIHEYLLEKGVKLDGVQGQQYLYHDPCHTPIKTMNATQMASSLMGQKVVLSDRCCGESGMFAVKRPDIATQVKFRKQEEIEKNLKELPQGEPVKMLTSCPACLQGLSRYTDDNNMPADYIVIEMAKHILGENWLDEFVKKANNGGVEKVLL

SEQ ID NO: 24293 - protein, 275 aa, Neisseria meningitidis
MPELPEVETTLRGITPHIEGKTVEAVVLRQLKLRWQINPDLGEILSGRQVLSCGRRAKYLIVRFQTGILLIHLGMSGSLRIFTPSDERIGRPDRHDHVDIVFSDGTVMRYRDPRKFGAILWYEGIEEHHPLLEKLGPEPLSEAFCADYLYARLKAQKRAVKLALMDNAVVVGVGNIYANESLFRAGISPYRPANRLKKKECALLVETVKAVLQRAIETGGSTLRDFVDSDGKSGYFQQEYTVYGRHNQPCPQCGGLVVKETLGQRGTFYCPNCQK

SEQ ID NO: 24294 - protein, 205 aa, Neisseria meningitidis; identical to SEQ ID NO: 13224

SEQ ID NO: 24295 - protein, 298 aa, Neisseria meningitidis; identical to SEQ ID NO: 18812

SEQ ID NO: 24296 - protein, 63 aa, Neisseria meningitidis
LLPTRSVSSLLLGEYLEFEENGTKIAAEIGSAWHFLDAACWISINGKYYAGNRIVWFAKKAES

SEQ ID NO: 24297 - protein, 280 aa, Neisseria meningitidis
MLVCNPYEVVIHGTTSSGKIFRPSDWAERLCGILSSFTKDNRLSYSKWVRPMLVDNIRCVAVDKKLETDNPQMFRFLMDFAADNDLRVIDCKALLEEREQGGQNDPTDERVLLAQAIEEKHAAEKAQEQTVSGASYVLREIGADDTATAFAALSVLRSALTDINRFTEQINKVQRPQGYRLLGIFEEGKHNAVAVCGFREACTLAGGRHIHIDDIVTLPQSRRKGYASRLLEEVRKIGAETGVTKIHLNVHVNHDRADAHRLYFKNGFEICAYHFRCDPK

SEQ ID NO: 24298 - protein, 242 aa, Neisseria meningitidis; identical to SEQ ID NO: 9647

SEQ ID NO: 24299 - protein, 89 aa, Neisseria meningitidis; identical to SEQ ID NO: 12045

SEQ ID NO: 24300 - protein, 489 aa, Neisseria meningitidis; identical to SEQ ID NO: 7627

SEQ ID NO: 24301 - protein, 262 aa, Neisseria meningitidis
MSTFFQQTAQAMIAKHINRFPLLKLDQVIDWQPIEQYLNRQRTRYLRDHRGRPAYPLLSMFKAVLLGQWHSLSDPELEHSLITRIDFNLFCRFDELSIPDYSTLCRYRNRLAQDDTLSELLKLINRQLTEKGLKVEKASAAVIDATIIQTAGSKQRQAIEVDEEGQISGQTTPSKDSDARWIKKNGLYKLGYKQHTRTDAEGYIEKLHITPANAHECKHLSPLLEGIAEGTTVYADKGYDSAENRQHLEEHQLQDGIMRKAT

SEQ ID NO: 24302 - protein, 138 aa, Neisseria meningitidis; identical to SEQ ID NO: 937

SEQ ID NO: 24303 - protein, 152 aa, Neisseria meningitidis
MNIQTRLAATALALFLSACGNGGAPAQPKGEISENRTAAFKSMMPEFTRMGKMVKDEEPYDVEKFKQAAAAFAESSKKPFTLFESDPQGNGRALPAVWSDGAKFEAEKTKFAAAVEKLNAAAQTGKLDEIKAAYGETGASCKSCHDSFRAPE

SEQ ID NO: 24304 - protein, 887 aa, Neisseria meningitidis
VLKTPPTLAAELSGKTGVSISAPYANENSRILLSTTDISSENGKIKIQSYGDQYYYARQSELYTFERRSYKTGKWYNRKHITEVKEHKNAKPDAVNLSASQGIDIKSGGSIDAYATAFDAPKGSINIEAGRKLTLYAVEELNYDKLDSQKRRRFLGISYSKAHDTTTQVMKTALPSRVVAESANLQSGWDTKLQGTQFETTLGGATIRAGVGEQARADAKIILEGIKTTIHNETVSSSKSALWQKQAGRGSNIETLQLPSFTGPVAPVLSAPGGYIVDIPKGNLKTEIEKLAKQPEYAYLKQLQTAKNVDWKQVQLAYDKWDYKQEGLTGAGAAIVVIIVTALTYGYGAAAAGSVTAAGSSTAAAATTTAAATTTVSTAAAMQTAALASLYSQAAVAIINNKGDVGKALKDLGTSDTVKQIVTSALTAGALNQMGADIAQLNSKVRTELFSSTGNQTIANLGGRLATNLSNAGISAGINTAVNGGSLKDNLGNAALGALVNSFQGEAASKIKTTFSDDYVAKQFAHALAGCVSGLVQGKCKDGAIGAAVGEIVAESILGGRNPATLSDAEKHKVISYSKIIAGSVAALNGGDVNTAANAAEVAVVNNALNFDSTPTNAKKHQPQKPDKTALEKIIQSIMPAHAAGAMTNPQDKDAAIWISNIRNGITGPIVITSYGVYAAGWTAPLIGTAGKAAISTCMANPSGCTVMVTQAAEAGAGIATGAVTVGNAWEAPVGALSKAKAAKQAIPTQTVKELDGLLQESKNIGAVNTRINIANSTTRYTPMRQTGQPVSAGFEHVLEGHFHRPIANNRSVFTISPNELKVILQSNKVVSSPVSMTPDGQYMRTVDVGKVIGTTSIKEGGQPTTTIKVFTDKSGNLITTYPVKGN

SEQ ID NO: 24305 - protein, 209 aa, Neisseria meningitidis; identical to SEQ ID NO: 7848

SEQ ID NO: 24306 - protein, 531 aa, Neisseria meningitidis; identical to SEQ ID NO: 3351

SEQ ID NO: 24307 - protein, 178 aa, Neisseria meningitidis; identical to SEQ ID NO: 19367

SEQ ID NO: 24308 - protein, 93 aa, Neisseria meningitidis
MKKSLFAAALLSLVLAACGGEKAAEAPATEAPAAEAPATEAPAAEAPATEAPAAEAPAAEAAATEAPAAEAPAAEAAATEAPAAEAPAAEAAK

SEQ ID NO: 24309 - protein, 456 aa, Neisseria meningitidis
MPQNTLNIVILAAGKGTRMYSKMPKVLHRIGGKPMLGRVIDTAAALNPQNICVVIGHGKDQVLNAVKRDVVWVEQTEQLGTGHAVKTALPHLAAEGRTLVLYGDVPLIDVETLETLLEAAGNEVGLLTDVPVDPSGLGRIIRDGSGSVTAIVEEKDADAAQKAVKEINTGILVLPNAKLENWLNSLSSNNAQGEYYLTDLIAKAVADGIKVHPVQVRASHLAAGVNNKRQLAELERIFQTEQAQELLKAGVTLRDPARFDLRGRLKHGQDVVIDVNCIFEGEVELGDNVEIGANCVIKNAKIGANSKIAPFSHLESCEVGENNRIGPYARLRPQAKLAADVHVGNFVEIKNAAIGKGTKANHLTYIGDAEVGSKTNFGAGTIIANYDGVHKHKTVIGDEVRIGSNCVLVAPVTLGNKVTTGAGSTITRNIEDNKLALARARQTVIEGWMRPEKDKQ

SEQ ID NO: 24310 - protein, 231 aa, Neisseria meningitidis; identical to SEQ ID NO: 5335

SEQ ID NO: 24311 - protein, 259 aa, Neisseria meningitidis
MAASPEAKFTEEKILWVKHHTPKLITFAISRPESYRFKAGQFSRLGFYEGEGFIWRAYSIVSAEYADTLEYFAVLIQDGPMSARFAKMQQGDTILLDKNATGFLLPERFPDGKDLVMLCTGSGIAPFLSILEQPEIRQRFDTVNLIHSVSFPEELIFNDRLAALSEHPLVGEYGHSLRFVPVTTRAANPSGLSGKRIPELLKNNSIEQALHTKFTLESTRFMICGNPEMVKDTFQTLLDMGYAMHRNRIPGQIMMENGF

SEQ ID NO: 24312 - protein, 725 aa, Neisseria meningitidis; identical to SEQ ID NO: 18113

SEQ ID NO: 24313 - protein, 121 aa, Neisseria meningitidis; identical to SEQ ID NO: 1070

SEQ ID NO: 24314 - protein, 116 aa, Neisseria meningitidis; identical to SEQ ID NO: 5541

SEQ ID NO: 24315 - protein, 129 aa, Neisseria meningitidis
MKNVQKGFTLLELMIAVAILGILTLITYPSYKTYIRRVRLSEVRTTLLHNAQTMERYYRQKGTFATYDKNKLKQNEYFKITLSEVSPDHFTLQAAPDPMTNDGETCVVTLNDGGTIAASGTNQSCPGFD

SEQ ID NO: 24316 - protein, 65 aa, Neisseria meningitidis; identical to SEQ ID NO: 1389

SEQ ID NO: 24317 - protein, 650 aa, Neisseria meningitidis
MRFAVALLSLLGIASVIGTVLQQNQPQTDYLVKFGSFWAQIFGFLGLYDVYASAWFVVIMMFLVVSTSLCLIRNVPPFWREMKSFREKVKEKSLAAMRHSSLLDVKIAPEVAKRYLEVQGFQGKTINREDGSVLIAAKKGTMNKWGYIFAHVALIVICLGGLIDSNLLLKLGMLTGRIVPDNQAVYAKDFKPESILGASNLSFRGNVNISEGQSADVVFLNADNGILVQDLPFEVKLKKFHIDFYNTGMPRDFASDIEVTDKATGEKLERTIRVNHPLTLHGITIYQASFADGGSDLTFKAWNLGDASREPVVLKATSIHQFPLEIGKHKYRLEFDQFTSMNVEDMSEGAEREKSLKSTLNDVRAVTQEGKKYTNIGPSIVYRIRDAAGQAVEYKNYMLPVLQEQDYFWITGTRSGLQQQYRWLRIPLDKQLKADTFMALREFLKDGKGRKRLVADATKDAPAEIREQFMLAAENTLNIFAQKGYLGLDEFITSNIPKEQQDKMQGYFYEMLYGVMNAALDETIRRYGLPEWQQDEARNRFLLHSMDAYTGLTEYPAPMLLQLDGFSEVRSSGLQMTRSPGALLVYLGSVLLVLGTVLMFYVREKRAWVLFSDGKIRFAMSSARSERDLQKEFPKHVESLQRLGKDLNHD

SEQ ID NO: 24318 - protein, 183 aa, Neisseria meningitidis; identical to SEQ ID NO: 4319

SEQ ID NO: 24319 - protein, 517 aa, Neisseria meningitidis
MNRTYANFYEMLTTACRKNGNGTAVFDGKEKTAYRALKQEAEAVAAYLQNIGVKFGDTVALAVSNSTEFITAYFAISAIGAVAVPMNTFLKNSEYAYILNDCKARFLFASVGLSKELAGLKAQTPIEKIIWTGKSRPVGETAEGDAFFEDVRRFPEKPDLGRQPRINDLAHIIYTSGTTGHPKGALISYANLFANLNGIERIFKISKRDRFIVFLPMFHSFTLTAMVLLPIYMACSIILVKSVFPFSNVLKQTLLKRATVFLGIPAIYTAMSKAKIPWYFRWFNRIRLFISGGAPLAEQTILDFKAKFPRAKLLEGYGLSEASPVVAVNTPERQKARSVGIPLPGLEAKAVDEELVEVPRGEVGELIVRGGSVMRGYLNMPAATDETIVNGWLKTGDFVTIDEDGFIFIVDRKKDLIISKGQNVYPREIEEEIYKLDAVEAAAVIGVKDRYADEEIVAFVQLKEGMDLGENEIRRHLRTVLANFKIPKQIHFKDGLPRNATGKVLKRVLKEQFDGNK

SEQ ID NO: 24320 - protein, 463 aa, Neisseria meningitidis; identical to SEQ ID NO: 2284

SEQ ID NO: 24321 - protein, 107 aa, Neisseria meningitidis; identical to SEQ ID NO: 1495

SEQ ID NO: 24322 - protein, 485 aa, Neisseria meningitidis; identical to SEQ ID NO: 2552

SEQ ID NO: 24323 - protein, 589 aa, Neisseria meningitidis
MTVQTKTKGLAWQEKPLSDNERLKTESNFLRGTILDDLKDPLTGGFKGDNFQLIRFHGMYEQDDRDIRAERAEAKLEPLKFMLLRCRLPGGIIKPSQWIELDKFARENSHYRSIRLTNRQTFQFHGVPKAKLQTMHRLLHKLGLDSIATAADMNRNVLCTSNPIESELHRQAYEYAKKISEHLLPRTRGYLDVWVDGKKVQSSDDFLQEDEPILGKTYLPRKFKTAVVIPPLNDVDCYGNDLDFVAISDGGGQLAGFNVLAGGGLSMEHGNTKTYPNISLELGFVPPEHALKAAEAVVTTQRDFGNRSDRKNARTRYTIQNMGLDNFRAEVERRMGMPFEPIRPFKFTGRGDRIGWVKGIDGNWHLTLFIESGRLVDEGGKQLLTGVLEIAKIHKGDFRITANQNLIVANVAEADKAKIEELARTYGLIRNDVSKLRENAMSCVSFPTCPLAMAEAERVLPDFIDELDKIMAKHGTSDDYIVTRITGCPNGCGRAMLAEIGLVGKAVERYNLHIGGDREGVRIPRLYKENITLPEILAELDDLIGKWAAERNIGEGFGDFAIRTGIVKPVLNAPVDFWDASKAVAIARA

SEQ ID NO: 24324 - protein, 320 aa, Neisseria meningitidis; identical to SEQ ID NO: 18996

SEQ ID NO: 24325 - protein, 449 aa, Neisseria meningitidis
MKLPVMSPEHSAQLQAFEAKILSNHAKIEAWFRTQWSVHCPPFYGSVDIRNAGYKISSIDMNLFPGGFNNLNPNFIPLAAVAAQDAVQRACETAKSVLIIPENHTRNTFYLQNVYALGEILRSAGYEVRLGSLNPEVTEPTEFETALGDKILLEPLLRTRDRVHLADGFSPCVVLLNNDLSAGIPDILKGISQTVLPPLHGGWTTRRKTNHFGAYNQVTAEFAKLIGIDEWQINPYFEKIGGLDFQGREGEDALAEAVERVLAKIQAKYDESGITDKPFVIVKADAGTYGMGVMSVKSADEVRGLNRKNRNKMAKVKEGLEVSEVIVQEGIYTYETLNGAVCEPVVYMMDRFVIGGFFRVHEGRGADENLNAGGMVFVPLSNSIPTGNGDNSQEAPEACKRVFEQWDSLGMPRSEKDCDVDNEHNRLYVYGVMARLSLLAASIELEETA

SEQ ID NO: 24326 - protein, 69 aa, Neisseria meningitidis; identical to SEQ ID NO: 5143

SEQ ID NO: 24327 - protein, 40 aa, Neisseria meningitidis; identical to SEQ ID NO: 1884

SEQ ID NO: 24328 - protein, 57 aa, Neisseria meningitidis; identical to SEQ ID NO: 14761

SEQ ID NO: 24329 - protein, 336 aa, Neisseria meningitidis; identical to SEQ ID NO: 19047

SEQ ID NO: 24330 - protein, 154 aa, Neisseria meningitidis; identical to SEQ ID NO: 1226

SEQ ID NO: 24331 - protein, 691 aa, Neisseria meningitidis
MLCVLAGAAYGVFRTEAALSSQWWAEAVSGVPLTVEVADMPRSDGRRVQFAAKAVDSGGRTFDLLLSDYKRREWAVGSRWRITARVHPVVGELNLRGLNREAWALSNGIGGVGTVGADRVLLHGGSGWGIAVWRSRISRNWQQADADGGLSDGIGLMRALSVGEQSALRPELWQAFRPLGLTHLVSISGLHVTMVAVMFAWLAKRLLACSPRLPARPRAWVLAAGCAGALFYALLAGFSVPTQRSVLMLAAFAWAWRRGRLSAWATWWQALAAVLLFDPSAVLGVGTWLSFGLVAALIWACSGRLHEGKRQTALRGQWAASVLSLVLLGYLFASLPLVSPLVNAVAIPWFSWVLTPLALLGSVVPFAPLQQLGAFLAEYTLRFLVWLADVSPEFAVASAPLPLLVLAVCAALLLLLPRGLGLRPWAVLLLAGFVFYRSPGVPENEVAVTVWDAGQGLSVSVQTANHHLLFDTGTAAAAQMGIVPSLNASGIRYLDYLVLSHHDSDHDGGFQAVGKIPNGGIYAGQPEFYEGARHCAEQRWQWDGVDFEFLMPSERKNIDDNGKSCVLRVVAGGAALLVTGDLDTKGEESLVGKYGGNLYSQVLVLGHHGSNTSSSGVFLNAVSPEYAVASSGYANAYKHPTEAVQNRVRAHGIKLLRTDLSGALQFGLGRGGVKAQRLRGYKFYWQKKPFE

SEQ ID NO: 24332 - protein, 492 aa, Neisseria meningitidis; identical to SEQ ID NO: 19231

SEQ ID NO: 24333 - protein, 239 aa, Neisseria meningitidis
MATLSNKTILVTGASQGLGEQVAKAYAAAGATVILVARHQKKLEKVYDAIVEAGHPEPFAIRFDLMSAEEKEFNQFAATIAEATQGKLDGIVHCAGYFYALSPLDFQTVAEWVNQYRINTVAPMGLTRALFPLLKQSPDASVIFVGESHGETPKAYWGGFGASKAALNYLCKVAADEWERFGNLRANVLVPGPINSPQRIKSHPGEAKSERKSYGDVLPAFVWWASTESKGRSGEIVYL

SEQ ID NO: 24334 - protein, 282 aa, Neisseria meningitidis; identical to SEQ ID NO: 1323

SEQ ID NO: 24335 - protein, 146 aa, Neisseria meningitidis; identical to SEQ ID NO: 18170

SEQ ID NO: 24336 - protein, 424 aa, Neisseria meningitidis
MPSETSSPRKENETEVHIPAAPFIVKQSGSNALAVCALVLAALGLGTSGFLFVQGQNVLKNQELAFNQKIDKAALGESENAALLKDNLNRQAAIQSELDRLDGNVKANGEQILEMQKSYRELTKGRADWLVDETETILNLAAQQLVLTGNIQTAVGVLEHIDSRLSRFNQAELLPIKQAVSSDLAELKNRPYVDISGTALRLDRLEIAVSGLPLILDGVLKPSVQARNEAVSASWWQNVWEKSLGTLKGLVEIRRLENNDAMLISPEQAYFVRENLRLRLLDARTALMQRNSEVYQGDLNNAETAVRQYFDAKSPATQSWLKELAELKALDVRMTADDGLKNSLNAVRAYRDGTRMTTAENQEAEQATSEPANENTASEPAAASDVKTIEAPSLPSERKPEQPAKKQPVPEKAGRSPSAKGERA

SEQ ID NO: 24337 - protein, 321 aa, Neisseria meningitidis
MSYTQLTQGERYHIQYLSRHCTVTEIAKQLNRHKSTISREIRRHRTQGQQYSAEKAQRQSQTIKQRKRQPYKLDSQLIQHIDTLIRRKLSPEQVCAYLCKHHQITLHHSTIYRYLRQDKSNGSTLWQHLRICSKPYRKRYGSTWTRGKVPNRVVIENRPAIVDQKSRIGDWEADTIVGKGQKSALLTLVERVTRYTIICKLDSLKAEDTARAAVRTLKAHKDRVHTITMDNGKEFYQHTKITKALKAETYFCRPYHSWEKGLNENTNGLIRQYFPKQTDFRNISDREIRRVQDELNHRPRKTLGYETPSVLFLNLFQPLIH

SEQ ID NO: 24338 - protein, 421 aa, Neisseria meningitidis
MSKNQPAQPTRRTLFKTAIAAGAVGAIGGYLGGKKQGETAERTAESQHSPQAYPCYGEHQAGIVTPQQAFSIMCAFDVTAQSAKQLENLFRTLTARIEFLTQGGEYQDGDDKLPPAGSGILGKAFNPDGLTVTVGVGSSLFDGRFGLKDKKPIHLQEMRDFSNDKLQKSWCDGDLSLQICAFTPETCQAALRDIIKHTVQTAVIRWSIDGWQPKSEPGAMAARNLLGFRDGTGNPKVSDPKTADEVLWTGVAANSLDEPEWAKNGSYQAVRLIRHFVEFWDRTPLQEQTDIFGRRKYSGAPMDGKKEADQPDFAKDPEGNTTPKDSHIRLANPRDPEFLKKHRLFRRAYSYSRGLASSGQLDVGLVFVCYQANLADGFIFVQNLLNGEPLEEYISPFGGGYFFVLPGVEKGGFLGQGLLGV

SEQ ID NO: 24339 - protein, 292 aa, Neisseria meningitidis; identical to SEQ ID NO: 18187

SEQ ID NO: 24340 - protein, 234 aa, Neisseria meningitidis
LWQNPKSIVELYVQEGKNDVRTREVLEKAANENIRVYFADADRLNAISKGARHQGVVGFIDASKNHVHLEDVLENLSEPPLLLILDGITDPHNLGACLRTADAMGVHAVIAPKDKSAGLNATVSKVASGAAETVPYITVTNLARTLRELKEYGIWIIGTDMGGNADLYHCDLPDSAAWVMGNEGDGMRRLTREHCDMLVSIPMFGTVESMNVSVSAGMVLSETRRQRVLKNEKA

SEQ ID NO: 24341 - protein, 236 aa, Neisseria meningitidis
MTSCEPVNEQTSFNNPEPMTGFEHTVTFDFQGTKMVIPYGYLARYTQDNATKWLSDTPGQDAYSINLIEISVYYKKTDQGWVLEPYNQQNKAHFIQFLRDGLDSVDDIVIRKDACSLSTTMGERLLTYGVKKMPSAYPEYEAYEDKRHIPENPYFHEFYYIKKGENPAIITHRNNRINQTEEDNYSTGVGSCINGFPVRYYPFIREKQQLTQQELVGYHQQVEQLVQSFVNNSSKK

SEQ ID NO: 24342 - protein, 284 aa, Neisseria meningitidis; identical to SEQ ID NO: 15385

SEQ ID NO: 24343 - protein, 437 aa, Neisseria meningitidis; identical to SEQ ID NO: 1149

SEQ ID NO: 24344 - protein, 321 aa, Neisseria meningitidis
MLRLTALAVCTALALGACSPQNSDSAPQAKEQAVSAAQTEGASVTVKTARGDVQIPQNPERIAVYDLGMLDTLSKLGVKTGLSVDKNRLPYLEEYFKTTKPAGTLFEPDYETLNAYKPQLIIIGSRAAKAFDKLNEIAPTIEMTADTANLKESSKERIDALAQIFGKQAEADKLKAEIDASFEAAKTAAQGKGKGLVILVNGGKMSAFGSSSRLGGWLHKDIGVPAVDEAIKEGSHGQPISFEYLKEKNPDWLFVLDRSAAIGEEGQAAKDVLDNPLVAETTAWKKEQVVYLVPETYLAAGGAQELLNASKQVADAFNAAK

SEQ ID NO: 24345 - protein, 220 aa, Neisseria meningitidis; identical to SEQ ID NO: 2583

SEQ ID NO: 24346 - protein, 227 aa, Neisseria meningitidis; identical to SEQ ID NO: 5897

SEQ ID NO: 24347 - protein, 379 aa, Neisseria meningitidis
MKKTLMAAAILSLALTACGGGSDTAAHPPSAKPEAGQSGKLNIYNWSDYVDPETVAAFEKETGIKTRSDYYDSNETLEAKVLTGKSGYDLTAPSIANVGRQIKAGAYQKIDKAQIPHYGNIDKDLLKMMEAVDPGNEYAVPYFWGINTLAINTRQVQKALGTDKLPENEWDLVFNPEYTAKLKSCGISYFDSAIEQIPLALHYLGKDPNSENPEDIKAAVDMMKAVRGDVKRFSSSGYIDDMAAGNLCAAIGYGGDLNIAKTRAEEAANGVEIKVLTPKTGVGVWVDSFMIPRDAQNVANAHRYIDYTLLPEVAAKNGSFVTYAPASRPARELMDEKYTSDASIFPNKELMEKSFIVSPKSAESAKLGVKLWQGLKAGK

SEQ ID NO: 24348 - protein, 522 aa, Neisseria meningitidis; identical to SEQ ID NO: 8560

SEQ ID NO: 24349 - protein, 161 aa, Neisseria meningitidis; identical to SEQ ID NO: 1189

SEQ ID NO: 24350 - protein, 513 aa, Neisseria meningitidis; identical to SEQ ID NO: 18785

SEQ ID NO: 24351 - protein, 270 aa, Neisseria meningitidis
VTESTGGLEIPAAKAIRRAGIAVIIANPRQTHQFAQSQPLTKTDAKDAKMLAFFAQMMTQKEDWQTMPYQPPTEAEEVLEALVNRRNQSADMRTAEKNRLHQVHETQVGSVKQLIAHFDRLIDELDKQIDDHTHTHFDGKAQVAEQIKGIGSITTATLMAMLPELGRLSHKRIASLAGIAPHPRESEETKFKSRCFGGRSAVRKALYMATVVATRFKPLIRDFYQRLPSEGKPYKVAVTAYMRKLLTISNARMRDYFAENDTAENGIRTA

SEQ ID NO: 24352 - protein, 475 aa, Neisseria meningitidis; identical to SEQ ID NO: 18392

SEQ ID NO: 24353 - protein, 283 aa, Neisseria meningitidis
MTLLGIKLKQTQQLNQRLQQSLRVLQMSGIELEREVENWLSDNPLLERKDTDEFSDARFSHYTAPARQIGGDEGEDMLSNIAGEQDFKQYLHAQVCEHPLSDQEAACVHILIDFLDEQGYLTDSIEDILDHTPLEWMLDEAMLKQALTALQKFDPAGVAAADLNESLILQIERLGECAAKPAALHIVRNALDSIDGNRSQTLARIKKHLPQTDSGTLEAALDLIASLNPFPAAGFASSTPTPYSDEALANLLAFRGMEVSRRTIAKYRESLEIPAAHKRKTAE

SEQ ID NO: 24354 - protein, 173 aa, Neisseria meningitidis; identical to SEQ ID NO: 19372

SEQ ID NO: 24355 - protein, 265 aa, Neisseria meningitidis
MDTAQKQRWAITLSYDGSRFYGWQKQAGGVPTVQTALETALAQIAGEFVATTVAGRTDTGVHATAQVVHFDTTAVRPQQAWVRGVNAHLPEGIAVLHARQVAPEFHARFDAYGRHYRYLLESAPVRSPLLKNRAGWTHLKLDIEPMRRAAAYLIGEQDFSSFRAAECQAKSPVKTIYRADLTQSAGLVRLDLHGNAFLHHMVRNIMGALVYVGSGRLSVEGFAALIQERSRLKAPPTFMPDGLYLTGVDYPEAYGIIRPKIPEWL

SEQ ID NO: 24356 - protein, 154 aa, Neisseria meningitidis; identical to SEQ ID NO: 18643

SEQ ID NO: 24357 - protein, 79 aa, Neisseria meningitidis; identical to SEQ ID NO: 3404

SEQ ID NO: 24358 - protein, 205 aa, Neisseria meningitidis; identical to SEQ ID NO: 3317

SEQ ID NO: 24359 - protein, 331 aa, Neisseria meningitidis; identical to SEQ ID NO: 8492

SEQ ID NO: 24360 - protein, 489 aa, Neisseria meningitidis
LTLYAVEELNYDKLDSQKRRRFLGISYSKAHDTTTQVMKTALPSRVVAESANLQSGWDTKLQGTQFETTLGGATIRAGVGEQARADAKIILEGIKTTIHNETVSSSKSALWQKQAGRGSNIETLQLPSFTGPVAPVLSAPGGYIADIPKGNLKTEIEKLSKQPEYAYLKQLQVAKNVNWNQVQLAYDKWDYKQEGLTRAGAAIIALAVTVVTAGAGVGAALGLNGAAAAAADAAFASLASQASVSLINNKGDVGKTLKELGRSRTVKNLVVAAATAGVSNKLGASSLATWSETPWVNNLNVNLANAGSAALINTAVNGGSLKDNLEANILAALVNTAHGEAASKIKQLDQHYIAHKVAHAVAGCAAAAANKGKCQDGAIGAAVGEILGEALLDGRDPGSLNVKDRAKIIAKAKLAAGTVAALSKGDVNAAANAAAVAVESNALSKERMDKLTKCLSGKTCSTTMEKVNAIKKDEQFSKVIDTEIQKSLF

SEQ ID NO: 24361 - protein, 136 aa, Neisseria meningitidis
VKLLANNWQPIAIIALVGTGLAVSHHQGYKAAFAKQQAVIDKMEHDKAQALLLSAQNYARELELARAEAKKYEVKAHAVGMALAKKQAEVSRLKTENKKEIENVLTQDRKNAGGGCIDGFGHHGLQLYKRALGYGN

SEQ ID NO: 24362 - protein, 351 aa, Neisseria meningitidis
MPSETRLPNFIRALIFALGFIFLNACSEQTAQTVTLQGETMGTTYTVKYLSNNRGKLPSPAEIQKRIDDALKEVNRQMSTYQPDSEISRFNQHTAGKPLRISSDFAYVTAEAVRLNRLTHGALDVTVGPLVNLWGFGPDKSVTREPSPEQIKQAASYTGIDKIILKQGKDYASLSKTHPKAYLDLSSIAKGFGVDKVAGELEKYGIQNYLVEIGGELHGKGKNARGEPWRIGIEQPNIVQGGNTQIIVPLNNRSLATSGDYRIFHVDKNGKRLSHIINPNNKRPISHNLASISVVADSAMTADGLSTGLFVLGETEALKLAEREKLAVFLIVRDKGGYRTAMSSEFEKLLR

SEQ ID NO: 24363 - protein, 255 aa, Neisseria meningitidis
MALAKRIIPCLDVKDGRVVKGVNFIGLRDAGDPVEAAKRYNGEGADELTFLDITASSDNRDTILHIIEEVAGQVFIPLTVGGGVRTVADIRRLLNAGADKVSINTAAVTRPDLIDEAAGFFGSQAIVAAVDAKAVNPGNTRWEIFTHGGRNPTGLDAVEWAIEMQKRGAGEILLTGMDRDGTKQGFNLPLTRAVAEAVDIPVIASGGVGNVRHLIEGITEGKADAVLAAGVFHFGEIAIREAKRAMREAGIEVRL

SEQ ID NO: 24364 - protein, 280 aa, Neisseria meningitidis
MDKERILTPAVVFSVALLHLAMVALLWQAHKLPVIESGNVIEFVDLGDFGGGDGAPEGAGAPAAPEPQPEPEPPKPVEPPKPVLKPVVTKKADADIQQPKEEPKPEEKPKPEEKPKPEPKPEAKPVPKPAEKPVERPSEKPAEHPSNASAKADSEQGNGEDKGTGIKGDGTGRGEGSGKGSGGVKGEHGEGAGSSKGNPLRANGSIPRPAYPTLSMENDEQGTVVLSVLVSPGGHVESVKIVKSSGFSRLDNAARKAAQNGHFQANAWTEFKVPVKFELN

SEQ ID NO: 24365 - protein, 181 aa, Neisseria meningitidis; identical to SEQ ID NO: 7039

SEQ ID NO: 24366 - protein, 103 aa, Neisseria meningitidis; identical to SEQ ID NO: 1278

SEQ ID NO: 24367 - protein, 99 aa, Neisseria meningitidis; identical to SEQ ID NO: 19348

SEQ ID NO: 24368 - protein, 206 aa, Neisseria meningitidis; identical to SEQ ID NO: 8522

SEQ ID NO: 24369 - protein, 335 aa, Neisseria meningitidis; identical to SEQ ID NO: 7988

SEQ ID NO: 24370 - protein, 245 aa, Neisseria meningitidis; identical to SEQ ID NO: 18740

SEQ ID NO: 24371 - protein, 295 aa, Neisseria meningitidis
MPYQQITVNVNDAVAERLADALMEHGALSAAIEDAYAGTQNEQAIFGEPGMPAEQIWQQSKVIALFGEHDEAAAIIQTAAQECGLKDLAYTGETLEDQDWVRLTQAQFDPIQISERLWITPSWHEAPEGTAVNLRLDPGLAFGTGSHPTTRLCLKWLDTQLKNGESVLDYGCGSGILTIAALKLGAGSAVGVDIDEQAVRAGRDNAAQNNVDAQFFLPDGLPQGQFDVVVANILANPLRMLGEMLAARTKQGGRIVLSGLLDEQAEELGGIYSQWFDLDPAETEEGWARLSGVKR

SEQ ID NO: 24372 - protein, 685 aa, Neisseria meningitidis; identical to SEQ ID NO: 19874

SEQ ID NO: 24373 - protein, 199 aa, Neisseria meningitidis; identical to SEQ ID NO: 1276

SEQ ID NO: 24374 - protein, 354 aa, Neisseria meningitidis; identical to SEQ ID NO: 18199

SEQ ID NO: 24375 - protein, 418 aa, Neisseria meningitidis; identical to SEQ ID NO: 18114

SEQ ID NO: 24376 - protein, 258 aa, Neisseria meningitidis
MRAVPPPHISITGLGYLGLPLAQKFYQHGSRVAAIKRSLTSDDINLPIHLDTFDLGSTDAFQTALWRHHADKPVWFFLLPPSSLTHYADTVKQWAELARACNVQHLIFTSSTSVYGDTARECDETATPDPQTESARQILAAEQHLLDSGISNIDILRLGGLYCAERHPVSRLVQKQNIPGGNRPINIVHRNIAVESLFQTAFNPGGRRLKNIIEPRHPTRREFYTEEAAKLGLPALDFAPDDSVGKIIRTVCDNGLSL

SEQ ID NO: 24377 - protein, 94 aa, Neisseria meningitidis
LKLALKRSGKYNVYDPLALDLDGDGIETVAAKGFAGALFDHRSQGIRTATGWIAAYDGFPVRKLNSNGGIISTTDTIFQSLHTWLDHQPNDTCH

SEQ ID NO: 24378 - protein, 253 aa, Neisseria meningitidis
MMGDSVIYYVEQADKPVNRAGERARKTFEYFWRELFWERRRIIPALDFAMVKAPFFQDGEDGEICEHMWIDDIYFDGLYIYGVLNNEPGELTNVEQGESVCVPVDDISDWMFVCNGIPYGGFTIQAMRGQMTEEERTEHDAAWGIDFGDPGQVLLVYEEKEHPENLEEHPMCRNCIDDFRQQLSQNPDFLHEQDEDGYTPLHHEAIAGNALMVQAMLEYGANPASKTSEGYTALDFARLAGWQNVADLLEPRH

SEQ ID NO: 24379 - protein, 360 aa, Neisseria meningitidis; identical to SEQ ID NO: 18389

SEQ ID NO: 24380 - protein, 251 aa, Neisseria meningitidis
MGRLLLGSIRMSIIVENLTVSYRRRPAVHHVDITFEEHSMWAVFGPNGAGKSTFLKSLMGLQPIDTGSIRLDGLTRQNIAYLPQQSDIDRSQPMTVFDLAAMGLWYEIGFFKGINTAQKQRVHEALERVGMRQFAGRQIAHLSNGQFQRVLFARMLVQNAKFLLLDEPFNAVDVRTTYELLDVLQKCHCGGHAIIAVLHDYEQVRAYFPNTLLLAREKIAAGATETILTEPYLAQANAKMQQQESPEWCAS

SEQ ID NO: 24381 - protein, 208 aa, Neisseria meningitidis
MTQERFPSFFNQAPTITVRDALAEFLGAAENGILTYRYADAVRLCGHSCPTVAGAYLMVIKGLKALYGEELPERGGIEAAMQGARDEGTVGVTASVVQLLTGAAPETGFGGIGMQGRFARRNLLSFGAGEINGTLTLRRKDNGKTVAVSLNAALQPFAPEMRELMPKAVGGSASAEELERFGQLWQARVKAFLTESADDPQFVIVREV

SEQ ID NO: 24382 - protein, 419 aa, Neisseria meningitidis; identical to SEQ ID NO: 6995

SEQ ID NO: 24383 - protein, 332 aa, Neisseria meningitidis; identical to SEQ ID NO: 18743

SEQ ID NO: 24384 - protein, 110 aa, Neisseria meningitidis; identical to SEQ ID NO: 149

SEQ ID NO: 24385 - protein, 2799 aa, Neisseria meningitidis
MNRTLYKVVFNKHRNCMIVVAENAKREGKNTADTQAVGILPNDIAGFAGFIHSISVISFSLSLLLGSALILTSSSANAQGIVADKSAPAQQQPTILQTGNGIPQVNIQTPTSAGVSVNQYAQFDVGNRGAILNNSRSNTQTQLGGWIQGNPWLARGEARVVVNQINSSHSSQMNGYIEVGGRRAEVVIANPAGIAVNGGGFINASRATLTTGQPQYQAGDLSGFKIRQGNVVIAGHGLDARDTDFTQILSHAVKIDGPVWGKDVRVSAGKNDVSADGSIQSSHSPATNINSDNSLYAIDTGALGGMYAGKITLISTDRDASVRNQGQWFASAGNVAVNAEGKLVNTGMIAATGENHAVSLHARNVHNSGTVASQDDANIHSQTLDNSGTVLSSGQLTVRNLGRLKNHNNGTIQAARLDMSTGGLDNTGNITQTGSQALDLVSAGKFDNSGKIGVSDVPQTGLNPNPSVIPQIPSTATGSGSSTVLASKPGSNNPVSPTAPAKNYAGGRIQTTGAFDNAGSINAGGQIDIAAQNGLENSGSLNAAKLRVSGDSFNNTVKGKLQAHDLAVNTQTAKNSGHLLTLTGKIDNRELHNAGEIAANNLTLIHSGRLSNDKKGNIRAAHLQLDTAGLHNAGNILADSGTVTTKNNLRNTGKVSVARLNTEGQTLDNTHGHIEAETVNIQSQQLTNQSGHITATEQLTINSRNVDNQNGKLLSANQAQLAVSDGLYNQHGEIATNRQLSIHDKNQNTLALNNADGTIQSAGNVSLQAKSLANNGTLTAGNKLDIALTDDFVVERDLTAGKQLNLSIKGRLKNTHTLQASHTLKLNAGNIDNQVTGKIIGGEQTDITSEQHVDNRGLINSDGLTHIGAGQTLTNTGTGKIYGNHIALDAQILLNREETTEGSTKAGAIAARKRLDIGAKEIHNQEGALLSSEGIFAVGNRLDEQHHAAGMADTFVNGSAGLEVQGDALMSVRNMQNINNHFKTETYLAKAEKQVRDYTVLGQNTYYQAGKDGLFDNSQGQKDQTTATFHLKNGSRIEANQWHVRDYHIETYKERIIENRPAHITVGGDLTASGQNWLNKDSRIVVGGRIITDDLNQKEITNQSTTGKGRTDAVGTQWDSVTKKGWYSGRKRQRRTERNHTPYHDTQLFTHDFDTPVSVIQQNAASPSFQPAASAIKLIDGVSTAAVNGQRIHTGNVVSLNNATVTLPNSSLYTTHPDNKGWLVETDPQFADYRRWLGSDYMLQQLQLDTNHLHKRLGDGYYEQKLVNEQIHQLTGYRRLDGYRSDEEQFKALMDNGLTAAKTFGLTPGIALSAEQVARLTSDIVWMENQTVTLSDGSTQTVLVPKVYALARKGDLNTSGGLISAEQVLLKLQNGNLTNSGTIAGRQAVLIQARNINSNGNIQADQIGLKAEKSINIDGGQVQAGRLLTAQAQNINLNGTTQTSGNERNGNTAIDRMAGINVVGSHTEQVDNRTSDGILSLHAGNDINLNAATVSNQVKGGTTQITAGNNLNLGTIHTEHREAYGTLDDENHRHVRQSTEVGSSIRTQNGALLRAGNDLKIRQGELEAEEGKTVLAAGRDVTISEGRQITELDTSVSGKSKGILSSTKTQDRYRFSHDEAVGSNIGGGKMIVAAGQDINVRGSNLISDKGIVLKAGHDIDISTAHNRYTGNEYHESKKSGVMGTGGLGFTIGNRKTTDDTDRTNIVHTGSIIGSLNGDTVTVAGNRYRQTGSTVSSPEGRNTVTAKSIDVEFANNRYATDYAHTQEQKGLTVALNVPVVQAAQNFIQAAQNVGKSKNKRVNAMAAANAAWQSYQAAQQMQQFAPSSSAGQGQNNNQSPSISVSITYGEQKSRNEQKRHYTEAAASQIIGKGQTTLAATGSGEQSNINITGSDVIGHAGTALIADNHIRLQSAKQDGSEQSKNKSSGWNAGVAVKIGNGIRFGITAGGNIGKGKEQGGNTTHRHTHVGSTAGQTTIRSGGDTTLKGAQLIGKGIQADTRNLHIESVQDTETYQSKQQNGNVQVTVGYGFSASGSYRQSKVKADHASVTEQSGIYTGEDGYQIKVRDNTDLKGGIITSTRSAESKGKNRFQTATLTHRDIQNHSRYEGRSFGIGGSFDLNGGWDGTVTDKQGRPTDRISPAAGYGSDGDSKNSTTRSGINTRNIHITDEAGQLARTGRTAKETEARIYTGIDTETADQHSGRLKNSFDKDAVAKEINLQREVTKEFGRNAAQAVAAVADKLGNTQSYERYQEARTLLEAELQNTDSEAEKAAIRASLGQVNAYLAENQSRYDTWKEGGIGRSILHGAAGGLTTGSLGGILAGSGTSLAAPYLDKAAENLGPAGKAAVNALGGAAIGYATGGSGGAVVGANVDWHNRQLHPSERDWIRKNAQAFAKQEVGGREPTIDEIALAEKRLAQQAAKETDLFWMLTLEKVTDLSAQKFLRQAKGTFTNENGTQQQFFTTQGKQFMRPELFANEVYDLSFYKNHLQSPKNSSISKGTGELARRVTSSTWDKAKQDPILTGLQIAASPVHLVRDVGKASWQCVSGFGQCLQQGKENFVETGSAIGTGTASFQLNDLKPIYGQDVRGAQAGLVALQTADGITTALGAAKALNVAGKGSRYFINEWASSPPSGSRAAQRGAVGNLTHSQQVLTDGSHIQRGGKLLPNIRYKAGEFDYLYETDTLGRIKSFETDNLQLTQRDRLKHNSKTPDKVKGQDHAGHLIGDRFGGSPNLDNLVSQHKDVNLSAYKVLENKWAEAIKSGKNVKIQMQIEYAAGTRHPTRFVGYYWIDGKPTRININNL

SEQ ID NO: 24386 - protein, 54 aa, Neisseria meningitidis; identical to SEQ ID NO: 18285

SEQ ID NO: 24387 - protein, 262 aa, Neisseria meningitidis
MLTLYSETFPSRLLLGTAAYPTPEILKQSVRTARPAMITVSLRRAGCGGEAHGQGFWSLLQETGVPVLPNTAGCQSVQEAVTTAQMAREVFETDWIKLELIGDDDTLQPDVFQLVEAAEILIKDGFKVLPYCTEDLIACRRLLDAGCQALMPWAAPIGTGLGAVHAYALNVLRERLPYTPLIIDAGLGLPSQAAQVMEWGFDGVLLNTAVSRSGDPVNMARAFALAVESGRLAFEAGPVEARDKAQASTPTVGQPFWHSAEY

SEQ ID NO: 24388 - protein, 132 aa, Neisseria meningitidis; identical to SEQ ID NO: 18357

SEQ ID NO: 24389 - protein, 160 aa, Neisseria meningitidis; identical to SEQ ID NO: 4185

SEQ ID NO: 24390 - protein, 563 aa, Neisseria meningitidis; identical to SEQ ID NO: 4061

SEQ ID NO: 24391 - protein, 706 aa, Neisseria meningitidis
MAYQVLARKWRPKTFSDLVGQEHVVKALQNALDEGRLHHAYLLTGTRGVGKTTIARILAKSLNCENAQHGEPCGVCESCTQIDAGRYVDLLEIDAASNTGIDNIREVLENAQYAPTAGKYKVYIIDEVHMLSKSAFNAMLKTLEEPPEHVKFILATTDPHKVPVTVLSRCLQFVLRNMTAQQVADHLAHVLDSEKIAYAPPALQLLGRAAAGSMRDALSLLDQAIAMGSGSVAEQDVRQMIGAVDKQYLYELLTGIVNQDGEALLAKAQEMAACAVGFDNALGELAILLQHLALIQAVPNALAHDDPDSDILHRLAQTISGEQIQLYYQIAVHGKRDLSLAPDEYAGFMMTLLRMLAFAPLAATSCDANAVIENTELQSPSAQTAEKETAAKKPQPRPETETAQTSVQTASAAAMPSESKTAEPVSNQENNDVPPWEDAPDEAQTAAGTAQTSAKSIQTASEAETPPENQVSKNKAADNETNAPLSETPSENPIQATPNNEAVETETFAHEAPAEPFYGYGFPDNDCPVEDNAEIPPPDWEHAAPADAEEENNADEGSNDENNTPSAPPPEFSTENWAAIVRHFARKLGAAQMPAQHSAWTEYHPDTGLMVLAMTAEARATADKKRLDKIRDTLAQAYGLQLTLQTQDWRDEAGRETPAMQDKRVQAEDRQKAQALLEADPAAQKILQAFGAQWQPESLELAANRP

SEQ ID NO: 24392 - protein, 146 aa, Neisseria meningitidis; identical to SEQ ID NO: 19156

SEQ ID NO: 24393 - protein, 259 aa, Neisseria meningitidis; identical to SEQ ID NO: 588

SEQ ID NO: 24394 - protein, 286 aa, Neisseria meningitidis; identical to SEQ ID NO: 10859

SEQ ID NO: 24395 - protein, 504 aa, Neisseria meningitidis; identical to SEQ ID NO: 13431

SEQ ID NO: 24396 - protein, 465 aa, Neisseria meningitidis; identical to SEQ ID NO: 5967

SEQ ID NO: 24397 - protein, 72 aa, Neisseria meningitidis; identical to SEQ ID NO: 292

SEQ ID NO: 24398 - protein, 183 aa, Neisseria meningitidis; identical to SEQ ID NO: 19567

SEQ ID NO: 24399 - protein, 157 aa, Neisseria meningitidis; identical to SEQ ID NO: 18255

SEQ ID NO: 24400 - protein, 603 aa, Neisseria meningitidis; identical to SEQ ID NO: 6451

SEQ ID NO: 24401 - protein, 512 aa, Neisseria meningitidis
MVSKLDKYWQHPALYWPLLILFAAATPFTFAPYYHFWLMPLIFGAFVRLIELRPRFAVSSAYLFGLTAYTTQFYWIHTALHDVSGLPDLYAVPLTFLLPAYLALYPALCFWLWKKFTLPRGIKIGLVLPILWTLTEFARERFLTGFGWGAIGYSQITPDSPLAGFAPLGGIHMVTLATAFLGVWLVLASDNTARSGKRLLPIILIAALLAAGYTARQTDFTRPDGSRSTVALLQGNIDQTLKWREDQVIPTIQKYYEQVGKTTADIVILPETAIPVMRQNLPENILAKFAEQAQNNGSALAVGISQYTSDGNGYENAVINLTGYQENNQDGIPYYAKNHLVPFGEYKPLPFLTTPLYKMMNMPLSDFRKGGGKQSALLMKNQKIAFNICYEDGFGDELIAAAKDATLLANASNMAWYGKSNAMYQHLQQSQARAMELGRYMVRATNTGATAIISPKGNIIAQAQPDTETVLEGHIKGYVGETPYMKTGSSWWLMGILTLAALILFIFRNKEH

SEQ ID NO: 24402 - protein, 59 aa, Neisseria meningitidis
LVLGKIKIVDFLKSYNNFYCWLGFDELPQSEKIKFLSYLNILSIHKEIQDETVNRVYTD

SEQ ID NO: 24403 - protein, 99 aa, Neisseria meningitidis; identical to SEQ ID NO: 19348

SEQ ID NO: 24404 - protein, 230 aa, Neisseria meningitidis; identical to SEQ ID NO: 18712

SEQ ID NO: 24405 - protein, 324 aa, Neisseria meningitidis; identical to SEQ ID NO: 23000

SEQ ID NO: 24406 - protein, 398 aa, Neisseria meningitidis
MAKIITPLSANQVKNAKPRDKLYKLSDGGGLALWVYPTGGRSWKLSFVQDGRQQTISLGRYPDFSLADAREWREEVRRKRAHGENVVNKKVRADFAFEKVARDWFVRWSKGRSEKYAGQVMRNFERWVFPAIGNLDIRQIRTADVVGCLRVMEARGIVDTLRKTKNSLKMVFAFAVGSGMMEINPVAQIGSGVFERAKTGNMAALSPSELPRLIDFLEQRNEFAVYAGRVRIHPVTRLCIYWLLLTMTRIQEAALMEWSELDGEVWRIPAERKKERRGHDVPLSRAMQWVLDQARALNVNGRFVFESVNFQGHINKESPRVAMQRAGLDTTAHGLRSLARTYLREVLKVDNDVAEKLLAHSLGTRTQTAYNRSELWEERKDALERWGNDVLRLAKNGK

SEQ ID NO: 24407 - protein, 322 aa, Neisseria meningitidis; identical to SEQ ID NO: 3333

SEQ ID NO: 24408 - protein, 127 aa, Neisseria meningitidis; identical to SEQ ID NO: 18437

SEQ ID NO: 24409 - protein, 197 aa, Neisseria meningitidis
MRKQNTLTGIPTSDGQRGFALFIVLMVMIVVAFLVVTAAQSYNTEQRISANESDRKLALSLAEAALREGELQVLDLEYDTDSKVTFSENCGKGLCTAVNVRTNNDNEEAFDNIVVQGKPTVEAVKRFCPANSTDLCIDKKGMEYKKGKGSVSKPPRYIIEYLGVKNGENVYRVTAKAWGKNANTVVVLQSYVSNNDE

SEQ ID NO: 24410 - protein, 446 aa, Neisseria meningitidis; identical to SEQ ID NO: 18727

SEQ ID NO: 24411 - protein, 718 aa, Neisseria meningitidis; identical to SEQ ID NO: 18271

SEQ ID NO: 24412 - protein, 167 aa, Neisseria meningitidis
MHALHFSASDKAALYREVLPQIESVVADETDWVANLANTAAVLKEAFGWFWVGFYLVDTRSDELVLAPFQGPLACTRIPFGRGVCGQAWAKGGTVVVGDVNAYPDHIACSSLSRSEIVVPLFSDGRCIGVLDADSEHLAQFDETDALYLGELAKILEKRFEASRQAV

SEQ ID NO: 24413 - protein, 161 aa, Neisseria meningitidis; identical to SEQ ID NO: 8432

SEQ ID NO: 24414 - protein, 259 aa, Neisseria meningitidis
MKEHKARKRFGQNFLQDTRIISDIVNAVRPQADDVVIEIGPGLAAITEPLAKKLNRLHVVEIDRDIVCRLKTLPFADKLVIHEGDVLQFDFNGIAGKKKIVGNLPYNISTPLLFKLAEVADDVVDMHFMLQKEVVERMVAAPKSNDYGRLGVMLQYFFDMEMLIDVPPESFDPAPKVDSAVVRMIPVKHRIGRADDFEYFAKLVKLAFHQRRKTIRNNLKELAGDDDLQAVDINPQDRAEHIAPEKYVALSNYLAGKAV

SEQ ID NO: 24415 - protein, 252 aa, Neisseria meningitidis; identical to SEQ ID NO: 19078

SEQ ID NO: 24416 - protein, 369 aa, Neisseria meningitidis
MFSETDISMMQNALKLAALGRFSTSPNPRVGCVIAQGSQIVGQGFHVKAGEPHAEVHALRQAGEMAQGATAFVTLEPCSHYGRTPPCAEALLRSGVTRVVAAMRDPNPLVAGKGLALLEAAGIKTECGLLEHQARELNRGFLSRIERRRPFVRLKCAVSLDGKTALSDGSSFWITGEDARADVQVLRAESCAVLTGIGTVLADNPRLNVRAFPTLRQPARIVLDSRLRLPLDSHLLTDGQSPTYIATLERDEDKLRPYREHAHIRILMPSETADGKIDLHRLMRLLADEGYGEVMVEAGAKLTSAFLAEDLADEIVLYRSPKILGSGKDLFSLPENRAALSAPPLWTPVSTEILGHDVKTVFRKNGNAF

SEQ ID NO: 24417 - protein, 258 aa, Neisseria meningitidis; identical to SEQ ID NO: 5438

SEQ ID NO: 24418 - protein, 711 aa, Neisseria meningitidis
LGASASISGKTLGQGAKNKPQNKHLTSVADKNGASSSVGYGSDQDSQSSITKSGINTRNIHITDEAGQLARTGRTAKETEARIYTGIDTETADQHSGRLKNSFDKDAVAKEINLQREVTKEFGRNAAQAVAAVADKLGNTQSYERYQEARTLLEAELQNTDSEAEKAAIRASLGQVNAYLAENQSRYDTWKEGGIGRSILHGAAGGLTTGSLGGILAGGGTSLAAPYLDKAAENLGTAGKAAVNALGGAAIGYAAGGNVGTAAVGANVDWNNRQLHNSEIRKIKNNAAKFAKLHPGISQRQAEERLVAQAMRQVDAAYYAKHADTDTAAEQFLRSIAGSFKADGETFLDFAPMKYYRDSGKFAEHTGYRDLRAKLGQNPVHTEAQRNRTIEEKTYGTIGRGVGKGIGNTLANNLQAGPPHYVLGITNYSNWGKELIPYENPVERAIGKQAEDMTEKAVAAVSLGRSLPSKVVNVPSKLAKSIKTAETHKPLVQKRTETYFRVEGGGSGNNQAAKAAKNTEKMKAAIDQTHSGVDLPYDSRQIRAKLEKRYGAENIVSTTIPKKPVQSINNQTKPDYSSIVYTNKSGKVVNVKYKDPISGESKAVNIAYDNRGLPIFDNVSNFTTKIDNSLSYTGQMRAATKDLWKAIESGQVPKNQFTNEQLTKIKAGNEKIPGYTWHHNAQSSPNNMQLIPNSIHTAVRHTGQKSLKKGQ

SEQ ID NO: 24419 - protein, 416 aa, Neisseria meningitidis; identical to SEQ ID NO: 18197

SEQ ID NO: 24420 - protein, 351 aa, Neisseria meningitidis; identical to SEQ ID NO: 18634

SEQ ID NO: 24421 - protein, 375 aa, Neisseria meningitidis; identical to SEQ ID NO: 3405

SEQ ID NO: 24422 - protein, 178 aa, Neisseria meningitidis; identical to SEQ ID NO: 1831

SEQ ID NO: 24423 - protein, 407 aa, Neisseria meningitidis; identical to SEQ ID NO: 19083

SEQ ID NO: 24424 - protein, 587 aa, Neisseria meningitidis
MGFPVRKFDAVIVGGGGAGLRAALQLSKSGLNCAVLSKVFPTRSHTVAAQGGISASLGNVQEDRWDWHMYDTVKGSDWLGDQDAIEFMCRAAPEAVIELEHMGMPFDRVESGKIYQRPFGGHTAEHGKRAVERACAVADRTGHAMLHTLYQQNVRANTQFFVEWTAQDLIRDENGDVVGVTAMEMETGEVYIFHAKAVMFATGGGGRIYASSTNAYMNTGDGLGICARAGIPLEDMEFWQFHPTGVAGAGVLITEGVRGEGGILLNADGERFMERYAPTVKDLASRDVVSRAMAMEIYEGRGCGKNKDHVLLKIDHIGAEKIMEKLPGIREISIQFAGIDPIKDPIPVVPTTHYMMGGIPTNYHGEVVVPQGEDYEVPVKGLYAAGECACASVHGANRLGTNSLLDLVVFGKAAGDSMIKFIKEQSDWKPLPANAGELTRQRIERLDNQTDGENVDALRRELQRSVQLHAGVFRTDEILSKGVREVMAIAERVKRTEIKDKSKVWNTARIEALELDNLIEVAKATLVSAEARKESRGAHASDDHPERDDENWMKHTLYHSDTNTLSYKPVHTKPLSVEYIKPAKRVY

SEQ ID NO: 24425 - protein, 944 aa, Neisseria meningitidis
MNKKHGFQLTLTALAVAAAFPSYAANPETAAPDAAQTQSLKEVTVRAAKVGRRSKEATGLGKIVKTSETLNKEQVLGIRDLTRYDPGVAVVEQGNGASGGYSIRGVDKNRVAVSVDGVAQIQAFTVQGSLSGYGGRGGSGAINEIEYENISTVEIDKGAGSSDHGSGALGGAVAFRTKEAADLISDGKSWGIQAKTAYGSKNRQFMKSLGAGFSKDGWEGLLIRTERQGRETRPHGDIADGVAYGINRLDAFRQTHDIQSQDKTGQFFLVEGENTLKPVAKLAGYGIYLNRQLNRWVKERIEKNQPLSAEEEAMVREAQARHENLSAQAYTGGGRILPDPMDYRSGSWLAKLGYRFGGRHYVGGVFEDTKQRYDIRDMTEKQYYGTDEADKFRDKSGVYDGDDFRDGLYFVPNIEEWKGDKKLVRGIGLKYSRTKFIDEHHRRRRMGLLYRYENEAYSDNWADKAVLSFDKQGVATDNNTLKLNCAVYPAVDKSCRASADKPYSYDSSDRFHYREQHNVLNASFEKSLKNKWTKHHLTLGFGYDASNAISRPEQLSHNAARISESTGFDEKNQDKYRLGKPEVVEGSVCGYIETLRSRKCVPRKINGSNIHISLNDRFSIGKYFDFSLGGRYDRKNFTTSEELVRSGRYVDRSWNSGIVFKPNRHFSLSYRASSGFRTPSFQELFGIDIYHDYPKGWQRPALKSEKAANREIGLQWKGDFGFLEISSFRNRYTDMIAVADHKTKLPNQAGQLTEIDIRDYYNAQNMSLQGVNILGKIDWNGVYGKLPEGLYTTLAYNRIKPKSVSNRPDLSLRSYALDAVQPSRYVLGFGYDQPEGKWGANIMLTYSKGKNPDELAYLAGDQKRYSTKRASSSWSTADVSAYLNLKKRLTLRAAIYNIGNYRYVTWESLRQTAESTANRHGGDSNYGRYAAPGRNFSLALEMKF

SEQ ID NO: 24426 - protein, 37 aa, Neisseria meningitidis; identical to SEQ ID NO: 7611

SEQ ID NO: 24427 - protein, 497 aa, Neisseria meningitidis; identical to SEQ ID NO: 1619

SEQ ID NO: 24428 - protein, 436 aa, Neisseria meningitidis; identical to SEQ ID NO: 7990

SEQ ID NO: 24429 - protein, 114 aa, Neisseria meningitidis; identical to SEQ ID NO: 53

SEQ ID NO: 24430 - protein, 135 aa, Neisseria meningitidis; identical to SEQ ID NO: 18873

SEQ ID NO: 24431 - protein, 205 aa, Neisseria meningitidis
MPYTEDMRPGDTANPYGASKAMVERMLTDIQKADPRWSVILLRYFNPIGAHESGLIGEQPNGIPNNLLPYICQVASGRLPQLSVFGGDYPTPDGTGMRDYIHVMDLAEGHIAAMKAKGGVAGVHLFNLGSGRAYSVLEIIRAFEAASGLNIPYQIQPRRAGDLACSFADPSHTKQQTGWETKRGLKQMMEDSWRWVSRNPNGYGD

SEQ ID NO: 24432 - protein, 431 aa, Neisseria meningitidis
MIRPDFQEYLPSYYFSSVNPHTVYPKLQCRLKTDTCIIGGGLSGLCTALPLAEQGHETVVLEAARIGFGASGRSGGQVISDYACGMGEIEKQVGLEQAQWFWQQSLQAVELVDERVRKHAIDCDWQRGYATVAVRPQHWEELQQWHEHAQRHYGASHYQLWDKAELKQQLDSDMYQGAQFDPLSGHLHPLNYTLGIARAAAEAGAQIFEQSPMTCIEPHQNGWLVYTPEGSVECKNVVYAVNTYAGLNPIFKPLERKAIAVSTFIIATEPLGARAKGLIRNNMAVCDNRHILDYYRLSADGRLLFGGKDNEFIDNPARMTELVRQDMLKVFPQLADVKIEYSWGGECDITANLVPHFGRLAPNVFYTQGYSGHGMAITGIAGLAVAEAILGDECRLKPFEQLRQPNIILQPFLRKLGSFLGSKYYQWKDSR

SEQ ID NO: 24433 - protein, 298 aa, Neisseria meningitidis; identical to SEQ ID NO: 5738

SEQ ID NO: 24434 - protein, 95 aa, Neisseria meningitidis; identical to SEQ ID NO: 589

SEQ ID NO: 24435 - protein, 265 aa, Neisseria meningitidis
MNRLYPHPIIAREGWPIIGGGLALSLLVSMCCGWWSLPFWVFTVFALQFFRDPAREIPQNPEAVLSPVDGRIVVVERARDPYRDVDALKISIFMNVFNVHSQKSPADCTVTEVVYNKGKFVNADLDKASTENERNAVLATTASGREITFVQVAGLVARRILCYTQAGAKLSRGERYGFIRFGSRVDMYLPVDAQAQVAIGDKVTGVSTVLARLPLAAPQIESEPESEPALQTAPVETAATPSAEQRQIEAAAAKIQAAVQDVLKD

SEQ ID NO: 24436 - protein, 157 aa, Neisseria meningitidis
MEQKGFTLIEMMIVVAILGIISVIAIPSYQSYIERGYQSQLYTEMVGINNISKQFILKSPLDDNQTIKSKLEIFVSGYKMNPKIAEKYNVSVHFVNKEKPRAYSLVGVPKTGTGYTLSVWMNSVGDGYKCRDAASARAHLETLSSDVGCEAFSNRKK

SEQ ID NO: 24437 - protein, 84 aa, Neisseria meningitidis; identical to SEQ ID NO: 19256

SEQ ID NO: 24438 - protein, 313 aa, Neisseria meningitidis
MKTLLLLIPLVLTACGTLTGIPAHGGGKRFAVEQELVAASSRAAVKEMDLSALKGRKAALYVSVMGDQGSGNISGGRYSIDALIRGGYHNNPESATQYSYPAYDTTATTKSDALSSVTTSTSLLNAPAAALTKNSGRKGERSAGLSVNGTGDYRNETLLANPRDVSFLTNLIQTVFYLRGIEVVPPEYADTDVFVTVDVFGTVRSRTELHLYNAETLKAQTKLEYFAVDRDSRKLLIAPKTAAYESQYQEQYALWMGPYSVGKTVKASDRLMVDFSDITPYGDTTAQNRPDFKQNNGKNPDVGNEVIRRRKGG

SEQ ID NO: 24439 - protein, 169 aa, Neisseria meningitidis
MKKKLLSGIKFAVQTALVFLLVSLFLDWIRKPDEPAGAAGRPLTLLSGQRLTLGQFSRDKAVLVYFWGSWCGVCRYQSPIIDDLAADGVPVVGVAVRSGSASEVAAYMAKRGLGFPTVNDEDGGLARSWRIVATPAVVLVKNGKMVHYTTGISSYWGLRARIFQADVFG

SEQ ID NO: 24440 - protein, 355 aa, Neisseria meningitidis; identical to SEQ ID NO: 19325

SEQ ID NO: 24441 - protein, 196 aa, Neisseria meningitidis
MGLELPLILGTSSVFRREQMERLGIAFQAASPDFDETPMLGESAPQTALRLAEGKARSLTGRFPKALIVGADQVAWCDGRQWGKPMNLANAQKMLMHLSGREIEFYSAVVLLNTVTGRMQRHIDKTVVVMRQLDELHILRYLEREPDAVYCSCALKSEDLGALLIERIESTDPNALIGLPVFRLVDFLKNEGVDVL

SEQ ID NO: 24442 - protein, 950 aa, Neisseria meningitidis; identical to SEQ ID NO: 9050

SEQ ID NO: 24443 - protein, 66 aa, Neisseria meningitidis; identical to SEQ ID NO: 1185

SEQ ID NO: 24444 - protein, 86 aa, Neisseria meningitidis
LTKAVRRKNVQTPKICYAFRTPSAYGQYLADAGFDYLSFANNHSNDFGAQGITATAAGGSSFTYSIALKPLPITRPKLRKIPPSPR

SEQ ID NO: 24445 - protein, 459 aa, Neisseria meningitidis; identical to SEQ ID NO: 19449

SEQ ID NO: 24446 - protein, 89 aa, Neisseria meningitidis; identical to SEQ ID NO: 1905

SEQ ID NO: 24447 - protein, 141 aa, Neisseria meningitidis; identical to SEQ ID NO: 16379

SEQ ID NO: 24448 - protein, 301 aa, Neisseria meningitidis
MDILDKLVDFAQLTGSVDVQCLLGGQWSVRHETLQREGLVHIVTSGNGYLCIDGETSPRPVSTGDIVFFPRGLGHVLSHDGKCGESLQPDMRQHGAFTVKQCGNGQDMSLFCARFRYDTHADLMNGLPETVFLNIAHPSLQYVVSMLQLESKKPLTGTVSMVNALSSVLLVLILRAYLEQDKDVELSGVLKGWQDKRLGHLIQKVIDKPEDEWNVDKMVAAANMSRAQLMRRFKSRVGLSPHAFVNHIRLQKGALLLKKNPDSVLSVALSVGFQSETHFGKAFKRQYHVSPGQYRKEGGQK

SEQ ID NO: 24449 - protein, 290 aa, Neisseria meningitidis
VKGLDYCRQKAEESRSSFLSGFRFLTQEKRDAVTILYAFCRELDDVVDECSNPDVAQATLNWWRGDLDKVFGGAMPEHPVNQALRQVKETFKLPKYELEALIDGMQMDLVQARYGSFEELKLYCHRVAGVVGCLIARILGFSDSKTLEYADKMGLALQLTNIIRDVGEDARNGRIYLPMEEMRRFDVPASVILQCRPTENFTELMAFQIKRARETYREAVSLLPDADKKAQKVGLVMAAVYYALLNEIDRDGAQNVLKYKIALPSPRKKRIALKTWLFGFKPRPGTPERA

SEQ ID NO: 24450 - protein, 311 aa, Neisseria meningitidis
MGHNMMTTQKWYEHITNVIIGNTANFNSGCPEAIDYVDERKGVPLAAMRHILMYTEAAASHAYLFEHDLNKFKQYAYVAGKLGILRSVNSTDPEPFFFPCDMLNIQDPMFLMLMSDSPQLREFLVRNIDNIANDTEAFVNRYDLNRHMIYNTLLMVEGKQLDRLKQRSEKVLAHPTPSKWLQKRLYDYRFFLAFAEQDAEAMKAALEPLFDKKTARMAAKETLSYFDFYLQPQIVTYAKIASMHGFDLGIDHEIAPRDLTVYDPLPADEYQDIFDFMKQYDLSYPYEYLQDWIDYYTFKTDKLVFGNAKRE

SEQ ID NO: 24451 - protein, 544 aa, Neisseria meningitidis; identical to SEQ ID NO: 7248

SEQ ID NO: 24452 - protein, 157 aa, Neisseria meningitidis
MENNKAKSDDNSVSIEFIQDFITASTDVINLSYENFRKNFYTQMSTDSTNYAAKHESLGKSVQRELQKTQSQLRQVVRKMQSKYNINNKARVAEISLLRQMQSQFSRKDVNKNLGNGNTLAQQGSYTKKDGTTAQAGDSLLAADKPAQPPHGQNAIH

SEQ ID NO: 24453 - protein, 207 aa, Neisseria meningitidis
MERKERLRAGIAALGLDISAAAQDRLLAYVDLLKKWNKTYNLTALRDEEKMIVHHLLDSLTLLPHIEGVQTMLDVGSGGGQPGIPAAVCRPDVQITLLDANTKKTAFLQQAVIELGLDNVRVVSGRVEAVSDVRADVVTSRAFAELADFVSWTVHLLKDGGYWAAMKGVYPQEEIGRLPQDVCVEKVQRLDVPGLEAERHIVILSKR

SEQ ID NO: 24454 - protein, 589 aa, Neisseria meningitidis; identical to SEQ ID NO: 9527

SEQ ID NO: 24455 - protein, 355 aa, Neisseria meningitidis; identical to SEQ ID NO: 19392

SEQ ID NO: 24456 - protein, 89 aa, Neisseria meningitidis; identical to SEQ ID NO: 1473

SEQ ID NO: 24457 - protein, 127 aa, Neisseria meningitidis; identical to SEQ ID NO: 2622

SEQ ID NO: 24458 - protein, 71 aa, Neisseria meningitidis; identical to SEQ ID NO: 1238

SEQ ID NO: 24459 - protein, 1102 aa, Neisseria meningitidis
MNEGEVVLTPEQIQTLYGYASRGDTYGGWRYLANLGDRYADNAAAIVGKDANLNGLNLWMKKGVENLWDDTVGKKTRLEKFDRVALQHFSQYVDLINENNGRLPNTSEIERSYYKAVTYHGVSSSAAIDLVINRSLPDMADGYWALGLGIEAERIHNEQAVNNPNGSESDNRKQLISALDKGFDGSFKEKHFTFLQSVIMDVTKLGVEYTIDGWQKIGGWGNGIINDLYKSVAKREWTGIFEIVNNNIKQFRDLFPNPEGWIDDGHQCFAPWVKETKKRNGKYHVYDPLALDLDGDGIETVAAKGFSGSLFDHNGNGIRTATGWVSADDGLLVRDLNGNGIIDNGAELFGDNTKLADGSFAKHGYAALAELDSNGDNIINAADAAFQTLRVWQDLNQDGISQTNELRTLEELGIQSLDLAYKDVNKNLGNGNTLAQQGSYTKTNGTTAKMGDLLLAADNLHSRFKDKVELTAEQAKAANLAGIGRLRDLREAAALSGDLANMLKAYSAAETKEAQLALLDNLIHKWAETDSNWGKKSPMRLSTDWTQTANEGIALTPSQVAQLKKNALVSLSDKAKATIDAARDRIAVLDAYTGQDSNTLYYMSEEDALNIVKVTNDTYDHLAKNIYQNLLFQTRLQPYLNQISFKMENDTFTLDFSGLVQAFNHVKETNPQKAFVDLAEMLAYGELRSWYEGRRLMADYVEEAKKAGKFEDYQKVLGQETVALLAKTSGTQADDILQNVGFGHNKNVSLYGNDGNDTLIGGAGNDYLEGGSGSDTYVFGEGFSQDTVYNYDYATGRKDIIRFTDGITADMLTFTREGNHLLIKAKDGSGQVTVQSYFQNDGSGAYRIDEIHFDNGKVLDVATVKELVQQSTDGSDRLYAYQSGSTLNGGLGDDYLYGADGDDLLNGDAGNDSIYSGNGNDTLDGGEGNDALYGYNGNDALNGGEGNDHLNGEDGNDTLIGGAGNDYLEGGSGSDTYIFGKGFGQDTVYNYHVDKNSDTMHFKGFKAADVHFIRSGSDLVLSASEQDNVRISGFFYGENHRVDTFVFDDAAISNPDFAKYINAGNNLVQSMSVFGSNTAATGGNVDANIQSVQQPLLVTPSA

SEQ ID NO: 24460 - protein, 469 aa, Neisseria meningitidis; identical to SEQ ID NO: 9639

SEQ ID NO: 24461 - protein, 278 aa, Neisseria meningitidis
MLPLKTPGVLPGFKLSLGLTVLCLSLLVVLPFAMMAAKAAEIGWGGFWNTIAEPNVLAAVWLSLRMSFYAMLTNVVFGTLVAWVLVRYEFPGKGLANALVDLPFALPTAVTGIALATLYAPNGWIGRFFEPLGIKIAFTPVGIWIALVVVSLPFIVRAVQPVLEELSGEYEEAAATLGANRFTTFRRVLLPEITPALLTGAGMMFARATGEYGSVIFIAGNIPMVSEILPLIITGKLEQFDVQGASAVALFMLLVSFVILFALNVMLWALGRRSGAKG

SEQ ID NO: 24462 - protein, 512 aa, Neisseria meningitidis
MFHSIEKYRTPAQVLLGLIALTFVGFGVSTVSHPGADYIVQVGDEKISDHSINNAIQNEQADGGGPSRDAVFQSLLQRAYLKQGAKLMGISVSSEQIKQIIVDDPNFHDANGKFDHALLNRYLSQRHMSEDQFVEEIRDQFALQNLVNLVQNGVLVGDAQAEQLIRLTQVNRTIRSHTFNPDEFIAQVKVSEADLQKFYNANKKDYLLPQAVKLEYVALNLKDFADKQTVSETEVKNAFEERVARLPANEAKLSFEQEKAAVENELKMKKAVADFNKAKEKLSDDAFNHPASLAEAAKNSSLKVETQETWLSRQDAQMSGLPENLINAIFSDDVLKKKHNSEVLSINNEIAWVVRAKEVREEKTLPFAEAKDAVRQAYIRAEAAKLAENKAKDVLTQLNGGKAVDVKWSEVSVLGAQQARQSMPPEAYAELLKAKPTNGKPAYVRLTGLPAPVIVEVQAITPPDDIAAQLPLAKQALAQQQSANTFDLLIRYFNGKIKQTKGAQSVDNGGGQ

SEQ ID NO: 24463 - protein, 332 aa, Neisseria meningitidis
VAAHIGRIDTDAPLKPLYVIHGEEELLRIEALDALRAAAKKQGYLNREVYTADNAFDWNELLQTAGSAGLFADLKLLELHIPNGKPGKTGGEALQDFAARLPEDTVTLVLLPKLEKTQLQSKWFAALAAKGEVWEAKPVGAAALPQWIRGRLDKIGLGIGADALALFAERVEGNLLAARQEINKLGLLYPKGHTVNIDEAQTAVANVARFDAFQLAGAWMKGDVPRVCRLLDGLREEGEEPVLLLWAVAEDVRTLIRLAAALKQGQSIQSVRNSLRLWGEKQTLAPLAVKRISVVRLLDALKTCAQIDRIIKGAEDGDAWTVFKRLVVSLAE

SEQ ID NO: 24464 - protein, 127 aa, Neisseria meningitidis; identical to SEQ ID NO: 4145

SEQ ID NO: 24465 - protein, 397 aa, Neisseria meningitidis; identical to SEQ ID NO: 103

SEQ ID NO: 24466 - protein, 155 aa, Neisseria meningitidis; identical to SEQ ID NO: 18444

SEQ ID NO: 24467 - protein, 210 aa, Neisseria meningitidis; identical to SEQ ID NO: 5238

SEQ ID NO: 24468 - protein, 85 aa, Neisseria meningitidis; identical to SEQ ID NO: 19168

SEQ ID NO: 24469 - protein, 269 aa, Neisseria meningitidis; identical to SEQ ID NO: 18208

SEQ ID NO: 24470 - protein, 303 aa, Neisseria meningitidis; identical to SEQ ID NO: 7711

SEQ ID NO: 24471 - protein, 147 aa, Neisseria meningitidis; identical to SEQ ID NO: 1095

SEQ ID NO: 24472 - protein, 284 aa, Neisseria meningitidis; identical to SEQ ID NO: 6145

SEQ ID NO: 24473 - protein, 472 aa, Neisseria meningitidis
MNIHALLSKQWTLPPFLPKRLLLSLLILLAPNAVFWVLALLTATARPIVNLDYLPAALLIALPWRFVKIAGVLAFWLAVLFDGLMMVIQLFPFMDLIGAINLVPFILTAPAPYQIMTGLLLLYMLAMPFVLQKAAAKTDFRHIAVCAAVVAAAGYFTGHLSYYDRGRMANIFGANNFYYAKSQAMLYTVSQNADFITAGLVDPVFLPLGNQQRAATHLNEPKSQKILFIVAESWGLPANPELQNATFAKLLAQKDRFSVWESGSFPFIGATVEGEMRELCAYGGLRGFALRRAPDEKFARCLPNRLKQEGYATFAMHGAGSSLYDRFSWYPRAGFQEIKTAENLIGKKTCAIFGGVCDSELFGEVSAFFKKHSKGLFYWMTLTSHADYPESDIFNHRLKCTEYGLPAETDLCRNFSLHTQFFDQLADLIQRPEMKGTEVIIVGDHPPPVGNLNETFRYLKQGHVAWLHFKIK

SEQ ID NO: 24474 - protein, 320 aa, Neisseria meningitidis
MPSISVRRLFDDNQYKLQLAWAAGNSGADNRIGVEADKPVLALVGHLNFIHPNQIQVVGLAESEYLNRLESGETGYQFGDLFDISMSLVIVANGLPVSPGLRDYCHKNDIPLLTSKLESPYLMDVLRIYLQRTLAASSVKHGVFLDVFEIGVLITGHSGLGKSELALELISRGHSLIADDAVELFRIGPETLEGRCSPMLRDFLEVRGLGILNIRHIFGETSIRPKKILQLIINLVEADDEYMKQLDRLSIRTETESILNVNVRSVTLPVAVGRNLAVLVEAAVRNYILQLRGKDSTREFLERHQRQLKENEQNHENRPD

SEQ ID NO: 24475 - protein, 273 aa, Neisseria meningitidis
MSLQNIIETAFENRADITPSTVAPEVKEAVLETIRQLDSGKLRVAECLGVGEWKVNEWAKKAVLLSFRIQDNEVLNDGVNKYFDKVPTKFADWSEDEFKNAGFRAVPGAVARRGSFVAKNVVLMPSYVNIGAYVDEGAMVDTWATVGSCAQIGKNVHLSGGVGIGGVLEPLQAAPTIIEDNCFIGARSEIVEGVIVEEGSVISMGVFIGQSTKIFDRTTGEIYQGRVPAGSVVVSGSMPSKDGSHSLYCAVIVKRVDAQTRAKTSVNELLRGI

SEQ ID NO: 24476 - protein, 107 aa, Neisseria meningitidis; identical to SEQ ID NO: 2467

SEQ ID NO: 24477 - protein, 304 aa, Neisseria meningitidis; identical to SEQ ID NO: 3139

SEQ ID NO: 24478 - protein, 481 aa, Neisseria meningitidis
MSTQTNFDLVLFGATGDLAMRKLLPCLYQAHVAGLLHPEGRILGVSRSELDTEGFLAKVETSSKIHVKENFSDEAWASFVERFAYLKVDVTQPDDFAALGDLVKARKETDNVVIYLSTAPKFFAQTCENLAKIGLNADNVRVVLEKPLGTDLASSQQINTDVARYFKEGQIYRIDHYLGKESLQNLLALRFANVMFEPLWNNKYIESVQLTIAEQLGVEERGEFYDITGALRDMVQNHLMQMLCMTAMEAPASLDADAVRDEKVKVIKSLKPLTVESVNENVVRGQYTAAKGMNGYLEEINVPQDSFTETYVAIKAEIENERWKGVPFYLRTGKRMAGKVAEIVLNFKDLNSHIFEGSRTAPNRLVIELQPYESVRLYTQMKTPGAGNKVETVPLATDLGKALESRRAEAYERLLLDVINGKLALFNRRDELEAAWEYVMPILENWTNNTTPPHGYGAHSWGPEAARELLARDGHKWHEEQ

SEQ ID NO: 24479 - protein, 929 aa, Neisseria meningitidis
MTDYSKTVNLLESPFPMRGNLAKREPAWLKSWYEQKRYQKLREIAKGRPKFILHDGPPYANGDIHIGHAVNKILKDIIIRSKTQAGFDAPYVPGWDCHGLPIEVMVEKLHGKDMPKARFRELCREYAAEQIARQKKDFIRLGVLGDWDHPYLTMDFKTEADTVRMLGEIYKSGYLYRGAKPVQFCLDCGSSLAEAEVEYKDKVSPAIDVAYPFKDTAALAAAFGLAGIEGKAFAVIWTTTPWTLPASQAVSAGADVVYQLIDTPTGKLVLAKDLAEDALKRYGFSDGIAILAETTGDKLENLHMNHPFLERDIPMLNGEHVTTDAGTGLVHTAPAHGLEDYAVCNKYGIELYNPVNAEGKYIGETPRVAGMRVWEANPVILQWLEETSNLLASSKIEHSYAHCWRHKTPLIYRATGQWFVGMDKAGADGKTLRDKAIKAVDDTEFFPSWGRARLEAMIEGRPDWVVSRQRYWGTPMTFFVHKETGELHPNSAELLEKVALKIEEKGIEAWFSLDKSELLSAEDCENYDKLSDTMDVWFDSGSTHYSVVKQREELEWPADLYLEGSDQHRGWFQSSMLTGCASSMGRAPYKQLLTHGFVVDGEGKKMSKSIGNVVAPQEVYNEFGADILRLWAASTDYSGELAISKEILKRVTESYRRIRNTLSFLFANLSDFNPIEDAVQQADMVEIDRYAVVLARQLQERLAGDYYPRYAFHFAVKDIVSFCSEDLGAFYLDILKDRLYTTKADSHARRSAQTALYHITRSLVLLIAPILCFTGEEAWDIIGGGEEDSVLFHTWHEFPTINEKTEAELVKKWTAIREAREAVTAAIEPLRADKTVGSSLQAEAEITAPEEMAGYLNALGEELRFALLVSKAEVKVGSELAVAAKASDGEKCERCWHYTRDVGAVAGYETVCKRCAENVGGEGETRHYA

SEQ ID NO: 24480 - protein, 394 aa, Neisseria meningitidis; identical to SEQ ID NO: 277

SEQ ID NO: 24481 - protein, 89 aa, Neisseria meningitidis; identical to SEQ ID NO: 494

SEQ ID NO: 24482 - protein, 283 aa, Neisseria meningitidis; identical to SEQ ID NO: 19031

SEQ ID NO: 24483 - protein, 259 aa, Neisseria meningitidis; identical to SEQ ID NO: 19786

SEQ ID NO: 24484 - protein, 392 aa, Neisseria meningitidis; identical to SEQ ID NO: 18830

SEQ ID NO: 24485 - protein, 202 aa, Neisseria meningitidis
LNTLYLGSNSPRRMEILTQLGYQVVKLPADINETVRQNEDPARYVQRMAEEKNRTALTLFCETNGTMPDFPLITADTCVVSDGIILGKPRSQAEAIEFLNRLSGKQHTVLTAVCIHYRGKTSSRVQTNRVVFKPLSSEEISAYVQSGEPMDKAGAYAVQGIGGIFIQSIEGSFSGIMGLPVYETVSMLQDLGYRSPLSALKP

SEQ ID NO: 24486 - protein, 43 aa, Neisseria meningitidis; identical to SEQ ID NO: 3165

SEQ ID NO: 24487 - protein, 83 aa, Neisseria meningitidis; identical to SEQ ID NO: 15092

SEQ ID NO: 24488 - protein, 140 aa, Neisseria meningitidis; identical to SEQ ID NO: 18288

SEQ ID NO: 24489 - protein, 100 aa, Neisseria meningitidis
MQRQSLTNADGEVRELAAEDFALARPIVEALPEDLAQVLFSHQKQLEEKGVMQKRNTGKTPKQLVTIRLSADVVEKFRAGGKGWQTRINEVLRQYVAQLK

SEQ ID NO: 24490 - protein, 427 aa, Neisseria meningitidis
MSKSIKLNVPGQAGLELPVLEASIGHDVVDIRGLTKNTGLFSFDPGFVSTASCESKITYIDGDQGLLYYRGYPIEQLAEKSDYLEVCYLLIYGELPTPEQKAEFDNTVRRHTMVHEQLTWFFRGFRRDAHPMAMMVGVVGALSAFYQDSLDISNPEHRKIAIYRLISKIPTIAAMCYRYSNGLPFNYPKNNLSYSENFLHMMFATPCEDYKPNPVLARALDRIFILHADHEQNASTSTVRLAGSSGANPFACIAAGIACLWGASHGGANEAVLKMLDEIGDVSNVAAYMEGVKQRKYRLMGFGHRVYRNMDPRASIMRETCYEVLKELGLEDSPKFKLAMELEQIALKDPFFIERKLYPNVDFYSGIVLSALGIPTEMFTVIFALSRSVGWISHWHEMISDPSLKIGRPRQLYTGSERRDYVPAGER

SEQ ID NO: 24491 - protein, 347 aa, Neisseria meningitidis
MQITDLLAFGAKNKASDLHLSSGISPMIRVHGDMRRINLPEMSAEEVGNMVTSVMNDHQRKIYQQNLEVDFSFELPNVARFRVNAFNIGRGPAAVFRTIPSTVLSLEELKAPSIFQKIAESPRGMVLVTGPTGSGKSTTLAAMINYINETQPAHILTIEDPIEFVHQSKKSLINQRELHQHTLSFANALRSALREDPDVILVGEMRDPETIGLALTAAETGHLVFGTLHTTGAAKTVDRIVDVFPAGEKEMVRSMLSESLTAVISQNLLKTHDGNGRVASHEILIANPAVRNLIRENKITQINSVLQTGQASGMQTMDQSLQSLVRQGLIAPEVARRRAQNSESLSF

SEQ ID NO: 24492 - protein, 86 aa, Neisseria meningitidis; identical to SEQ ID NO: 4508

SEQ ID NO: 24493 - protein, 176 aa, Neisseria meningitidis; identical to SEQ ID NO: 3131

SEQ ID NO: 24494 - protein, 213 aa, Neisseria meningitidis
MQKPETIHIPGPAGILETIHIPSEQVPARGVAVINHPNPLQGGTNTNKVIQTAAKALSKLGFHCYLPNLRGVGGSEGTHDYGHGETQDCIAVIDYARAQHPEAPEFALSGFSFGGYVATFAAQARIPDLLLLIGAAVCHYTGRPEPSAVPNVAKTLMIHGAEDEVVEIGKALKWAEPQDLPVITIAGSTHFFHGKLIVLRDTILRFAPVCLNG

SEQ ID NO: 24495 - protein, 140 aa, Neisseria meningitidis; identical to SEQ ID NO: 1135

SEQ ID NO: 24496 - protein, 99 aa, Neisseria meningitidis; identical to SEQ ID NO: 17519

SEQ ID NO: 24497 - protein, 141 aa, Neisseria meningitidis
MAIERTISIIKPDAVGKNVIGKIYSRFEENGLKIVAAKMKQLTLKEAQEFYAVHKDRPFYAGLVEFMTGGPVMIQVLEGENAVLKNRELMGATNPSEAAEGTIRADFATSVSINAVHGSDTPENAALEIAYFFSQTEICPR

SEQ ID NO: 24498 - protein, 120 aa, Neisseria meningitidis; identical to SEQ ID NO: 7043

SEQ ID NO: 24499 - protein, 262 aa, Neisseria meningitidis; identical to SEQ ID NO: 19290

SEQ ID NO: 24500 - protein, 258 aa, Neisseria meningitidis; identical to SEQ ID NO: 1434

SEQ ID NO: 24501 - protein, 162 aa, Neisseria meningitidis; identical to SEQ ID NO: 18748

SEQ ID NO: 24502 - protein, 402 aa, Neisseria meningitidis
MTGIIHSLLDTDLYKFTMLQVVLHQFPQTHSLYEFRCRNASTVYPLADIKEDLEVELDALCQLRFTHDELGYLRSLRFIKSDFVDYLELFQLQRRFVEIGTDDKDRLNIRIEGPMIQAMFFEIFILAIVNELYFRRLETPAVIEEGERRLQAKAARLKEIAAAQNPDEPPFLISDFGTRRRYKLAWQEHVIRTLLEAAPSIVRGTSNVFLAKKLGITPIGTMAHEFLQAFQALDVRLRNFQKAALESWVHEYRGDLGVALTDVVGMDAFLRDFDLYFAKLFDGLRHDSGDPYVWGDKAYAHYQKLKIDSRTKMLTFSDGLDIERSWALHQYFKDRFKTGFGIGTNLTNDMGHTPLNIVLKLVECNGQSVAKLSDSPGKTMTNNSTFLAYLRQVFDVPEPETP

SEQ ID NO: 24503 - protein, 558 aa, Neisseria meningitidis; identical to SEQ ID NO: 1615

SEQ ID NO: 24504 - protein, 107 aa, Neisseria meningitidis; identical to SEQ ID NO: 178

SEQ ID NO: 24505 - protein, 120 aa, Neisseria meningitidis; identical to SEQ ID NO: 19563

SEQ ID NO: 24506 - protein, 144 aa, Neisseria meningitidis; identical to SEQ ID NO: 19736

SEQ ID NO: 24507 - protein, 158 aa, Neisseria meningitidis; identical to SEQ ID NO: 5652

SEQ ID NO: 24508 - protein, 117 aa, Neisseria meningitidis; identical to SEQ ID NO: 3438

SEQ ID NO: 24509 - protein, 299 aa, Neisseria meningitidis; identical to SEQ ID NO: 19524

SEQ ID NO: 24510 - protein, 1862 aa, Neisseria meningitidis
MNKGLHRIIFSKKHSTMVAVAETANSQGKGKQAGSSVSVSLKTSGDLCGKLKTTLKTLVCSLVSLSMVLPAHAQITTDKSAPKNQQVVILKTNTGAPLVNIQTPNGRGLSHNRYTQFDVDNKGAVLNNDRNNNPFVVKGSAQLILNEVRGTASKLNGIVTVGGQKADVIIANPNGITVNGGGFKNVGRGILTTGAPQIGKDGALTGFDVRQGTLTVGAAGWNDKGEADYTGVLARAVALQGKLQGKNLAVSTGPQKVDYASGEISAGTAAGTKPTIALDTAALGGMYADSITLIANEKGVGVKNAGTLEAAKQLIVTSSGRIENSGRIATTADGTEASPTYLSIETTEKGAAGTFISNDGRIESKGLLVIDTGEDIGLRNGAVVQNNGNRPAATVLNAGRNLVIESKANVNNAKGSTNLSTGGRTVIKEASIQTGTTVYSSSKGNAELGNNTRITGADVTVLSNGTISSSAVIDAKDTAHIEAGKPLSLEASTVTSDIRLNGGSIKGGKQLALLADDNITAKTTNLNTPGNLYVHTGKDLNLNVDKDLSAASIHLKSDNAAHITGTSKTLTASKDMGVEAGSLNVTNTNLRTNSGNLHIQAAKGNIQLRNTKLNAAKALETTALQGNIVSDGLHAVSADGHVSLLANGNADFTGHNTLTAKADVNAGSVGKGRLKADNTNITSSSGDITLVAGNGIQLGDGKQRNSINGKHISIKNNGGNADLKNLNVHAKSGALNIHSDRALSIENTKLESTHNTHLNAQHERVTLNQVDAYAHRHLSITGSQIWQNDKLPSANKLVANGVLALNARYSQIADNTTLRAGAINLTAGTALVKRGNINWSTVSTKTLEDNAELKPLAGRLNIEAGSGTLTIEPANRISAHTDLSIKTGGKLLLSAKGGNAGAPSAQVSSLEAKGNIRLVTGETDLRGSKITAGKNLVVATTKGKLNIEAVNNSFSNYFPTQKAAELNQKSKELEQQIAQLKKSSPKSKLIPTLQEERDRLAFYIQAINKEVKGKKPKGKEYLQAKLSAQNIDLISAQGIEISGSDITASKKLNLHAAGVLPKAADSEAAAILIDGITDQYEIGKPTYKSHYDKAALNKPSRLTGRTGVSIHAAAALDDARIIIGASEIKAPSGSIDIKAHSDIVLEAGQNDAYTFLKTKGKSGKIIRKTKFTSTRDHLIMPAPVELTANGITLQAGGNIEANTTRFNAPAGKVTLVAGEELQLLAEEGIHKHELDVQKSRRFIGIKVGKSNYSKNELNETKLPVRVVAQTAATRSGWDTVLEGTEFKTTLAGADIQAGVGEKARVDAKIILKGIVNRIQSEEKLETNSTVWQKQAGRGSTIETLKLPSFESPTPPKLSAPGGYIVDIPKGNLKTEIEKLSKQPEYAYLKQLQVAKNINWNQVQLAYDRWDYKQEGLTEAGAAIIALAVTVVTSGAGTGAVLGLNGAAAAATDAAFASLASQASVSFINNKGDVGKTLKELGRSSTVKNLVVAAATAGVADKIGASALNNVSDKQWINNLTVNLANAGSAALINTAVNGGSLKDNLEANILAALVNTAHGEAASKIKQLDQHYIVHKIAHAIAGCAAAAANKGKCQDGAIGAVVGEIVGEALVKNTDFSGMTASEIEKAKANITAYAKLVAGATVGVTGGNVDVAANASETAVKNNALDIIWDIGNLVWDGGKWIYAKSIGDKQMAREAAIDFGVDAAAAAVPFVPAGATKISRGGAYVLKAGDEAVDTAKAIQEIQKQTGIKLTYDKVNKVWTTPAGLDYGLDAKHGNRIKHVLAHTIPNPNKPVHSVFNVSRKEVLPLVDEAWRMKGNPLPNDSSVYLVDMKKPIGTKGETKVRIVVQKGTNKIISAYPQK

SEQ ID NO: 24511 - protein, 156 aa, Neisseria meningitidis
MSTFFQQTAQAMIAKHIDRFPLLKLDQVIDWQPIEQYLNRQKTRYLRDHRGRPAYPLLSMFKAVLLGQWHSLSDPELEHSLITRIDFNLFCRFDELSIPDYSTLCRYRNWLAQDDTLSELLKLINRQLTEKNLKVEKASAAVVDATIIQTAGSKQR

SEQ ID NO: 24512 - protein, 272 aa, Neisseria meningitidis; identical to SEQ ID NO: 7451

SEQ ID NO: 24513 - protein, 185 aa, Neisseria meningitidis
MDALKLLTNRRSSKKLKPPAPDAAELEQIFQAATQVPDHGNMRPFRFTVIQGEVGLQRFRDVLKQTVAELNFGDDAMKKAEKVGNMAPMVIGVTFAPNRDVPKPKPEWEQMLTAGCAAYALQLAATAQGFDNVWITGMWVNSPLLREAFGCADKDKIIGLMMVGTPTEEVHKPKNTDLEAFVSHW

SEQ ID NO: 24514 - protein, 136 aa, Neisseria meningitidis; identical to SEQ ID NO: 8545

SEQ ID NO: 24515 - protein, 375 aa, Neisseria meningitidis; identical to SEQ ID NO: 17081

SEQ ID NO: 24516 - protein, 370 aa, Neisseria meningitidis
MSTFFQQTAQAMIAKHIDRFPLLKLDQVIDWQPIEQYLNRQKTRYLRDHRGRPAYPLLSMFKAVLLGQWHSLSDPELEHSLITRIDFNLFCRFDELSIPDYSTLCRYRNWLAQDNTLSELLELINRQLTEKGLKIEKASAAVVDATIIQTAGSKQRQAIEVDEEGQISGQTTPSKDSDARWIKKNGLYKLGYKQHTRTDVEGYIEKLHITPANAHECKHLPPLLEGIAEGTTVYADKGYDSAENRQHLEERQLLDGIMRKACRNRPLSETQTKRNRYLSKTRYSGLNLNQDKATKPQTVQIVRQGEATPYWFKFNPLYVVEQSFGTLHRKFRYARAAYFGLLKVSAQSHLKAMCLNLLKAANRLSAPAAA

SEQ ID NO: 24517 - protein, 193 aa, Neisseria meningitidis
MRNEEKRALRRELRGRRSQMGRDVRAAATVKINRLLKRYIKHGRKIGVYWPMGKELRLDGFVRAAQKRGAKLYLPYIEPRSRRMWFTPYPESGMERERIRGRARLNVPQFAGRKIRVHGLSVLLVPLVGIDREGYRLGQAGGYYDATLAAMKYRLQAKTVGVGFACQLVDRLSVEAHDLPLDGFVSEAGILCF

SEQ ID NO: 24518 - protein, 233 aa, Neisseria meningitidis; identical to SEQ ID NO: 3223

SEQ ID NO: 24519 - protein, 51 aa, Neisseria meningitidis; identical to SEQ ID NO: 1536

SEQ ID NO: 24520 - protein, 753 aa, Neisseria meningitidis
MLQIEIDGKQVSVEQGATVIEAAHKLGTYIPHFCYHKKLSIAANCRMCLVNVEKAPKPLPACATPVTDGMIVRTHSAKAREAQEGVMEFLLINHPLDCPTCDQGGECQLQDLAVGYGKTTSRYTEEKRSVVGKDMGPLVSAEEMSRCIHCTRCVRFTEEIAGLQEIAMVNRGEHSEIMPFIGKTVETELSGNVIDLCPVGALTSKPFRFNARTWELNRRKSVSAHDALGSNLIVQTKDHTVRRVLPLENEAINECWLSDRDRFAYEGLYHESRLKNPKIKQGGEWMDVDWKTALEYVRSAIECIAKDGNQNQVGIWANPMNTVEELYLAKKLADGLGVKNFATRLRQQDKRLSDGIKGAQWLGQSIESLADNDAVLVVGANLRKEQPLLTARLRRAAKDRMALSVLAGSKEELFMPLLFQEAAHPDEWAGRLKNLSANAEHAVTASLKNAEKAAVILGAEVQNHPDYAAIYAAAQELADATGAVLGILPQVANSVGADVLGVNSGESVAEMANAPKQAVLLLNVEPEIDMVDGAKAVAALKQAKSVMAFTPFVSETLLDVCDVLLPIAPFTETSGSFINMEGRLQSFHGVVQGFGDSRPMWKVLRVLGNLFDLQGFEYHDTAAILKDALDAESLPSKLDNRSTWTGEGVQTASDRLVRVGGVGIYHTDSIVRRSAPLQATVHAAVPAARVNPNTLGRLGLQDGQTAVAKQNGASVSVAVKADAGLPENVVHLPLHTENAALGALMDTIELAGA

SEQ ID NO: 24521 - protein, 76 aa, Neisseria meningitidis; identical to SEQ ID NO: 3053

SEQ ID NO: 24522 - protein, 526 aa, Neisseria meningitidis
MSVIKRALISLSDKAGAVEFAQTLHKLGVEILSTGGTAKLLADAGVPVIEVADYTGFPEMLDGRVKTLHPKIHGGILGRRDLDEHVAKMEEHGIGNIDLVCVNLYPFAATIAKPGCTLEDAIENIDIGGPTMVRSAAKNWKHVAIVTDTADFPAIAAEMEANNGALSDKTRFNLSRKAFSHTAQYDGMISNYLTSLSDDVLSGQPQIGEFPSRFNQSWIKVQDMRYGENPHQRAAFYRDIYPAAGSLAAYKQLQGKELSYNNIADADAAWEAVKSFDAPACVIVKHANPCGVAVAADTLTAYKLAYVTDTTSAFGGIIAFNREVDGETVKQITDNQFMEVLMAPKFTAEALEIAAAKKNVRVLEVPLEAGANRFELKRIGGGLLVQTPDIHRISRADLKVVSKRQPTEQEWNDLLFVWNVAKYVKSNAIVFGKGGQTYGIGAGQMSRVDSTRIAARKAQDANLDLNGACAASDAFFPFRDGVDVIAEQGIKAIIHPAGSMRDQEVFDAADEHGIAMVVTDVRHFRH

SEQ ID NO: 24523 - protein, 347 aa, Neisseria meningitidis; identical to SEQ ID NO: 18084

SEQ ID NO: 24524 - protein, 107 aa, Neisseria meningitidis
VNILASDRNYELNIEIFIDNIIHFQITDESYKVKFSEYLFENKEKNDWDRNPAINYFFEIIDDSYMDWLKEESFDFFEKKYYKAYIFFFSDSVIDVISSTEPVFYSK

SEQ ID NO: 24525 - protein, 338 aa, Neisseria meningitidis; identical to SEQ ID NO: 18219

SEQ ID NO: 24526 - protein, 511 aa, Neisseria meningitidis; identical to SEQ ID NO: 3843

SEQ ID NO: 24527 - protein, 121 aa, Neisseria meningitidis; identical to SEQ ID NO: 1865

SEQ ID NO: 24528 - protein, 248 aa, Neisseria meningitidis; identical to SEQ ID NO: 4029

SEQ ID NO: 24529 - protein, 244 aa, Neisseria meningitidis
MASHNTTHQMKTLCSSCSLRELCLPVGLLPNELSQLDAVIRQSRRLKKGAYLFCVGEAFTSLFAIRSGFFKTTVASQDGRDQVTGFFMSGELIGMDGICSHVHSCDAVALEDSEVCELPFTHIEELGQNIPSLRTHFFRMMSREIVRDQGVMLLLGNMRAEERIAAFLLNLSQRLYSRGFAANDFILRMSREEIGSYLGLKLETVSRTLSKFHQEGLISVEHKHIKILNLQVLKKMVSGCSHAI

SEQ ID NO: 24530 - protein, 92 aa, Neisseria meningitidis; identical to SEQ ID NO: 1287

SEQ ID NO: 24531 - protein, 288 aa, Neisseria meningitidis; identical to SEQ ID NO: 464

SEQ ID NO: 24532 - protein, 896 aa, Neisseria meningitidis; identical to SEQ ID NO: 19788

SEQ ID NO: 24533 - protein, 222 aa, Neisseria meningitidis; identical to SEQ ID NO: 3618

SEQ ID NO: 24534 - protein, 74 aa, Neisseria meningitidis
LKLPEEFFDVLQEEDFEMLPIGLFHAKQAGSLPEIHKDPFDRMLIAQTQAEGFELMTVDEYIPQYGIRVVNASS

SEQ ID NO: 24535 - protein, 169 aa, Neisseria meningitidis; identical to SEQ ID NO: 111

SEQ ID NO: 24536 - protein, 336 aa, Neisseria meningitidis
MLPFLPEPSLSYTQQNRTAVLLLNLGTPDAPTAQAVRPYLKSFLTDRRVVELPKWLWYPILHGLVLTLRPKKSAHAYEKIWFKEGSPLEVYTARQAAALAERMPDLIVRHAMTYGNPSVADVLSELKAQGAGRLLVIPMYPQYAASSSGAAVDKVCEQLLLQRNQMSVRTVSRFYDDTGYIDAMKNHILRYWAEHGRGKKLMLSFHGVPQKHYDLGDPYPDECRHTAKLLAEALELTEDQYVVSFQSQFGRAKWVTPSTQDLFGKLPKQGVTELDVFCPGFLADCLETMEEIALMGREQFYEAGGKSYRYIPCLNDNPDWIDALVALAEENLGGWR

SEQ ID NO: 24537 - protein, 187 aa, Neisseria meningitidis; identical to SEQ ID NO: 18399

SEQ ID NO: 24538 - protein, 176 aa, Neisseria meningitidis; identical to SEQ ID NO: 18023

SEQ ID NO: 24539 - protein, 123 aa, Neisseria meningitidis; identical to SEQ ID NO: 4020

SEQ ID NO: 24540 - protein, 74 aa, Neisseria meningitidis; identical to SEQ ID NO: 2464

SEQ ID NO: 24541 - protein, 214 aa, Neisseria meningitidis
VTRPAKINTYTRIIDASLALFNEEGERNISTNHIAAHLGISPGNLYYHFRNKDEIIVQLFKRYSEALLEYLNEAVLPSDVEDSINYMAGIYDVMWEYRFLFSDVNTLLARSAELLGEHNTFTQAKVSPLLVNLLTQLNGLNIIQADQTAMNDLAVNMWMITKYWFDFDSSLRGRTKLTEDSKARGVRRTLSLLRPYLLPEHREKYDRKIGNGNP

SEQ ID NO: 24542 - protein, 276 aa, Neisseria meningitidis; identical to SEQ ID NO: 15375

SEQ ID NO: 24543 - protein, 66 aa, Neisseria meningitidis
VAQPRTRCWVCRLRLAAAETPEEKAKDAAEEAKEEAKDAAEEAKEEAKDAAEDAKEAAEDAKEEAK

SEQ ID NO: 24544 - protein, 117 aa, Neisseria meningitidis; identical to SEQ ID NO: 4861

SEQ ID NO: 24545 - protein, 163 aa, Neisseria meningitidis
MKYRRFYRNGGTYFFTVVANKRQKILTDDAVRLALRQAVMAVRERYPFEILAWVLMPDHLHTIWRLPDNDSAYSERWRQIKRHSQYLIGGKLRLWQKRFWEHTIRDEADFACHFDYLHFNPVKHGYVGQISDWRFSTFHRYVKQGIYPHNWGGGNADFSIEYD

SEQ ID NO: 24546 - protein, 108 aa, Neisseria meningitidis
LTGAHYGLRDWVMQRATAVIMLIYTVALLVVLFSLPKEYSAWQAFFSQTWVKVFTQVSFIAVFLHAWVGIRDLWMDYIKPFGVRLFLQVATIVWLVGCLVYSVKVIWG

SEQ ID NO: 24547 - protein, 808 aa, Neisseria meningitidis
MSAQTDPGYFFMPNHIILIGASERPYSLGERVLSNLLSTPFQGKITPVNPRHHTIAGLPAYTSLNKIPGNADLIIAVTLPDSYDTLFKTCRKKQLRHIILIQDWDSLSAAELHTAETAIRKHHGNGLNITACTTAGIQLPSLGLNISTQDGYAAGHTAILTGNAAVSRQIDNILNKLRQGTSRHISLHPGISPITSADWLNRFGHSLHTKTAVLHHNPEEDQRKLFSAIRQFTRHTPLILHITCRTTETDRAVLHCLARHCNFLISFNADDLEAALRAQLSDIPPLSRLDILSDTPAEWLNAHAPKTLALHFPNLPHHIRNGHLTGTPTPSICHDIASRQLARPDTQAVLTILSPSGHEDYKKTARALIRLSEQTAKPLLVSSPFSDGITHFDTPTQAIRTLSYRNTAAALKQAQLDIAPPQPCRLKTPQPQNIKKALAAANPSLLAEALHLPPYRHTTHNAVQFQFDSHPLYGDILTARCNGQTTAVLPPFTTLDSRHLARFAELDGTQTLDQFLHTLTVIPEYRQHILGITLNLNGGQYSSDFLLKTPETHDTPKRKNTGKAAQTLEHAAAKMQSAAAYLKHKNPTAAEFLRHTSEAAAELLGSKTETGAAVPNVLAPYPAAYPKTLSLRNNTTVTITPILPEDAEAKQQFVRSLGPEARYTRFMTHTNELPAATLARLCNPDYHCEAAWTAKDADSNIVAVVRHSRLNRNECEFGITLAEHMRGSGLAQKMMELIIQTAAQQGYRTMSADILKTNTPMIKLAEKSGFTLKESDTEKNLYRAYLNLAADKTTEKTNKNLHTDHKIT

SEQ ID NO: 24548 - protein, 261 aa, Neisseria meningitidis; identical to SEQ ID NO: 8388

SEQ ID NO: 24549 - protein, 244 aa, Neisseria meningitidis; identical to SEQ ID NO: 19407

SEQ ID NO: 24550 - protein, 102 aa, Neisseria meningitidis; identical to SEQ ID NO: 18763

SEQ ID NO: 24551 - protein, 263 aa, Neisseria meningitidis
MITVNTLQKMKAAGEKIAMLTAYESSFAALMDDAGVEMLLVGDSLGMAVQGRKSTLPVSLRDMCYHTECVARGAKNAMIVSDLPFGAYQQSKEQAFAAAAELMAAGAHMVKLEGGVWMAETTEFLQMRGIPVCAHIGLTPQSVFAFGGYKVQGRGGKAQALLNDAKAHDDAGAAVVLMECVLAELAKKVTETVSCPTIGIGAGVDCDGQVLVMHDMLGIFPGKTAKFVKNFMQGHDSVQAAVRAYVAEVKAKTFPAAEHIFAD

SEQ ID NO: 24552 - protein, 268 aa, Neisseria meningitidis
MPTVFIFLTAVYAGLGAFAWHCQQQGRGRDYPWKTELPVLGAALTVHGAALLMPVIQDKIIIMGFGYSGSLIVWMMLFIYFAGSFFYPLRGVQLLLYPCAALMLLSGLVFPGKFSGYEITDLPFMLHIGTSLLAYGLFGIATLLSVLTLLLNRSLHRRSFSKLAGFLPSLLSLEKLMFQAMWAGFILLTYSVVSGTFFAEAVFGKPMTFTHKTVFGILSWLIYGGLLLKHSMTAWRGKKAAVWTIIGFVSLMIAYMGSKFVLEIILNR

SEQ ID NO: 24553 - protein, 542 aa, Neisseria meningitidis
VFIEAENLEALKILQKSYAGSVKMIYIDPPYNTGNDSFVYPDKFSESREEYARRVGDTDDAGYLKRDGVFQGAWRKNGKDSGHYHSNWLSMMLPRLHLAKTLLREDGVIFISIDDNEQAQLKLLCDEVFGAENFVGQFPWRKRTAKSDVPFGVSADYEYLLAYARSNAFIASIDAEERRYFETDDFPNRPWRTHDLTTQRNASERPNSFFTMVNPKTGKEYPANPNATWRVTKDTFQEYYNAGKIVFPDDYDFLKIKNPVMRYFKDDDMKKDGERFGRKAVSTRLPENVGMSLNGTKEITELFKSKLFDFPKPSSLIKYLLQILHVSDGLILDFFSGSGTTAHAVMQLNAEDGGNRRFICVQLPEETDEKSEARKAGFDTIAEIAKERIRRAGRQISDGLQDGSETDTGFKVFKLAESGFKQWRQPEQSDTEALQRELSLNIDSVLSETSSENLLYELMLRMGLKLTCKVSFLDDVYFVEDEDTGGLYAFLLKRVDQGLIDAVLAKHPAKVAALDRLFEGDDALKSNTVLQMKDAGVMFECV

SEQ ID NO: 24554 - protein, 409 aa, Neisseria meningitidis; identical to SEQ ID NO: 2282

SEQ ID NO: 24555 - protein, 72 aa, Neisseria meningitidis; identical to SEQ ID NO: 9949

SEQ ID NO: 24556 - protein, 330 aa, Neisseria meningitidis
MKQKIFVLYTGGTIGMTQSSEGLRPDTALVGQALAPFSNGMDFDWHVCGTLIDSSAVQLQNWCAWLDIIAAALPQYDGVLVLHGTDTLAYTANLFALALQGLDKPIVLTGSQWPYNAVGSDAPRNLATAVAAFPLGLKQTLIAFDGKLYPAVGSSKVSTETAAGFDNPHFGALAEWDETQGWHNVRIPNQDAADVSDGLKIRYPDPQAKIAVRTLIPGFAVQELADGLGQLPAHALILQSYGHGNTPADEGFIRAVQDFTQQGKLLLNISQVRQGRTAAVYAQGNAFRNSGIINGGKCNLETATALMTLAVSEGWGADEVKHELQRLGLV

SEQ ID NO: 24557 - protein, 157 aa, Neisseria meningitidis; identical to SEQ ID NO: 3094

SEQ ID NO: 24558 - protein, 436 aa, Neisseria meningitidis; identical to SEQ ID NO: 6841

SEQ ID NO: 24559 - protein, 461 aa, Neisseria meningitidis
MMARDNRIQMFPHEWRASTTLSGVYALRMLGMFLVLPVLAVYAASLPGAEGNKTLVGLAMGIYGLTQALLQLPLGIASDKFGRKKTIYVGLIVFAAGSFLAAAADTLPMLVAARAIQGAGAVSAAVTALLADLTRDGVRTRAMAMIGLSIGLTFSVSLVVAPVIADAVGVRGLFLLTGILTVASIGVVAWMTPDPEVSKLHEDTQAQPSRIGEVLKNRRLLTLDFGIFALHAAQMALFTALPFAMTQLGLEKIQHWKVYLPSIITGLVVMVPLIIVGETRNKLKQVFVLGIVCIAAAQLGLLSGMRSVGLITAYLVVYFIGFNVLEASLPSMVSKIAPSDLKGTAMGVYNTMQSLGLFAGGAAGGLLFQKYGFSGVFAFCSILMLLWLVIAVLSPAPKPVKNLSYPVGGVWQGNRDGLQRALSELEGVEDIGFSFDGQTVYLKVLQKGFDQAAAEKIITGV

SEQ ID NO: 24560 - protein, 160 aa, Neisseria meningitidis; identical to SEQ ID NO: 18607

SEQ ID NO: 24561 - protein, 67 aa, Neisseria meningitidis; identical to SEQ ID NO: 18946

SEQ ID NO: 24562 - protein, 539 aa, Neisseria meningitidis
MDNLVWDGVPDIRTLDQTIRKHAHPLNLIVCLPDNQIPDFQTAQDASDAECRLKHRLDQATQCLQFDSINLIEHILPDVRFWLVPPSRTRRLHEHFHHISWQTEAIPQTESKPDKPWFALPQTSERQKPEHILVIGAGISGAATAHALASHGISVTVLEARKAAQAASGNRQGLLYAKISPHDTEQTELLLAGYGYTKRLLGHILPESETWGGNGIIHLNYSRTEQQRNHELGLQKHHNHLYRSITQAEAEKIAGIPLNTPYAEPLCGLFWQHGVWLNLPAFVRALLRHPLIGLHEDTPLTGISHDGEKWIASTPNGIFSATHIVYCTGAHSPCLPEINLAALPLRQIRGQTGLTPSTPFSEQLRCAVSGESYISPSWHGLHCYGASFIPNSSHTGWNEAEEASNRQALAHLNPALAESLFAANPNPQKYQGHAAIRCDSPDHLPLVGALGDIAAMRQTYTKLALDKNYRIDTPCPYLPNAYVNTAHGTRGLATAPICAAAVAAEILGLPHPLSKRLRHALHPNRTIIRAIVRRKDLTP

SEQ ID NO: 24563 - protein, 308 aa, Neisseria meningitidis
MSEVKKTKVHLISGFLGTGKTTALKSLMAQKDPNEKWVIIVNEFGEIGIDGAVLSDNGIPVAEIAGGCLCCTAGPQMGVTVQKMLRDAKPDRLMIEASGLAHAASVIDELKAKPLDSLLEIGAVFTVVNPRQFINPDYAQQALYKDQIGICDVLVASKTDLCTTEQLAEFHDKAAKLFPPKAKVVEVQNAQLDIRWLDIPVIEKSRYRLKALPDNTMGFQSQGFTFPAGRDFDGEKLTNFFNDLPKMTEGLVRAKGVFQVLGTWVWLNWVDGQWGANQVSWRRDSRFELIAKSFDADLIEQKLKDALE

SEQ ID NO: 24564 - protein, 221 aa, Neisseria meningitidis; identical to SEQ ID NO: 1539

SEQ ID NO: 24565 - protein, 203 aa, Neisseria meningitidis; identical to SEQ ID NO: 352

SEQ ID NO: 24566 - protein, 507 aa, Neisseria meningitidis; identical to SEQ ID NO: 2566

SEQ ID NO: 24567 - protein, 232 aa, Neisseria meningitidis; identical to SEQ ID NO: 18412

SEQ ID NO: 24568 - protein, 179 aa, Neisseria meningitidis; identical to SEQ ID NO: 11525

SEQ ID NO: 24569 - protein, 431 aa, Neisseria meningitidis; identical to SEQ ID NO: 19050

SEQ ID NO: 24570 - protein, 316 aa, Neisseria meningitidis
MKLQQLKYALEVYQHNLNVSEAAEALFTSQPGISKQIKLLEEEIGIQIFIRSGKRVVSVSQPGKVVLDIAERILRDVQNIKNIGSEFTGQDSGSLTVATTHTQARYALPLIVADFVKRYPKVNLTIKQGSPAAIARMVTSGEADLAIVTERIDDHPELGKLPCYDWTHAVIVPNDHPLLECRNPLRIEDLARFPLITYEFAFNTGSSIARAFAKARLEQPDVALAAADTDVLKTYVRLGLGVGLMAKMAYNPDTDGDLQLVDAAHLFEPSPTWIALRSDTYLRGYAYDFIQAFAPHLTREKVDRILYTPISEDFSI

SEQ ID NO: 24571 - protein, 362 aa, Neisseria meningitidis; identical to SEQ ID NO: 22390

SEQ ID NO: 24572 - protein, 171 aa, Neisseria meningitidis
MKRAKQYPFLSLQRQRFHLNFENASSTANLPSERDFYRWAWSALKNEYRRADISLILLDEEEARAYNRDYRGKDYATNVLSFALNEGEILPCQVSEKLYGDLIICPQVVLKEAAEQGKTPERHFAHLTIHGVLHLMGYDHIEDDEAEIMEAEEIRLMLAAGFPNPYQEDEY

SEQ ID NO: 24573 - protein, 63 aa, Neisseria meningitidis; identical to SEQ ID NO: 5865

SEQ ID NO: 24574 - protein, 290 aa, Neisseria meningitidis; identical to SEQ ID NO: 18034

SEQ ID NO: 24575 - protein, 163 aa, Neisseria meningitidis; identical to SEQ ID NO: 18549

SEQ ID NO: 24576 - protein, 453 aa, Neisseria meningitidis
MLKKVLIANRGEIALRVLRACREMGIATVAVHSEADKDSLHVKLADESVCIGPAASAQSYLNVPAIIAAAEVSCADAVHPGYGFLAENADFAEQVEQSGFTFIGPKPDTIRLMGDKVSAKHAMIAAGVPCVPGSDGALPDDGEEILKIADKVGYPVIIKASGGGGGRGMRVVEKKEDLLQSVEMTKAEAGAAFGNPMVYMERYLQRPRHVEIQVIADEHGNAVYLAERDCSLQRRHQKVIEEAPAPFITEEERAKIGNACADACKRIGYRGAGTFEFLYEDGEFFFIEMNTRIQVEHPVTELITGVDIVQEQLRIASGLPLQYKQKDIQVEGHAFECRINAEDPYNFIPSPGPIESCHLPGGFGIRVDSHIYQGYRIPPYYDSLIGKICVHGKTREQAMAKMRVALAELAITGIKTNTPLHRDLFADAGFQKGGVSIHYLEHWLEDRKAKQDK

SEQ ID NO: 24577 - protein, 948 aa, Neisseria meningitidis
MCNHHPRHSHDNDTIRIRGARTHNLKNIDLDIPRHKLVVITGLSGSGKSSLAFDTLYAEGQRRYVESLSAYARQFLQMMDKPDVDLIEGLSPAISIEQKSTSHNPRSTVGTVTEIHDYLRLLYARVGTPYCPEHNLPLSSQTVSQMVDAVLKLPEDTRVMILAPAVRERKGEFVDFFADLQAQGFARVRVDGEVYQLDEVPKLEKNIKHNIDVVIDRVKVKADIKQRLAESFETALRHGNERALAIEMDSGEEHWFSARFACPVCSYSLPELEPRLFSFNNPMGSCPTCDGLGNTNFFDSEKVVAHPELSLASGAIDGWDKRNQFYFQMIQSLARHYGFDVQAAWETLPAKIKKVVLHGSGKEVIDFTYLSERGTTFNRSHAFEGIIPNLERRYRETDSETVREKLREYQNHRACPSCGGARLRKEARYVYVGGEPLHEVSAWPLTKTHRFFETLDLDGNKKQIAEKILKEITERLGFLINVGLDYLNLSRSAETLSGGEAQRIRLASQIGSGLTGVMYVLDEPSIGLHQRDNDRLLATLKRLRDLGNSVIVVEHDEDAIREADFVVDMGPGAGEHGGNVLIADTPENVAKCENSVTGQYLSGKKSIAVPSERTPVNPDRMLVLKGARGNNLKNVTLELPLGLITCITGVSGSGKSTLINDTLAKITARELNRAQEEPAPYDDIRGLEHLDKVINVDQSPIGRTPRSNPATYTGLFTPIRELFAGVPLSRERGYNVGRFSFNVKGGRCEACQGDGVIKVEMHFLPDVYVPCEVCHGKRYNRETLEIQYKGKNISQVLDMTVEEAREFFDAVPTVSRKLQTLMDVGLGYIRLGQSATTLSGGEAQRVKLALELSKRDTGRTLYILDEPTTGLHFADIALLLEVIDRLKGKGNSIVIIEHNLDVIKTADWIVDLGPEGGDGGGRIIASGSPEEVAKVKGSYTGKYLKNIL

SEQ ID NO: 24578 - protein, 200 aa, Neisseria meningitidis; identical to SEQ ID NO: 18122

SEQ ID NO: 24579 - protein, 116 aa, Neisseria meningitidis; identical to SEQ ID NO: 4624

SEQ ID NO: 24580 - protein, 791 aa, Neisseria meningitidis
MNKNIKSLNLREKDPFLSREKQRYEHPLPSREWIIELLERKGVPSKIEALVRELSIKEEEYEFFERRLKAMARDGQVLINRRGAVCAADKLDLVKCRVEAHKDGFGFAVPLTPAKDGDFVLYERQMRGIMHGDIVTVRPAGMDRRGRREGTVLDIVERAQSKVVGRFYMDRGVAILEPEDKRLNQSIVLEPDGVARFKPESGQVIVGEIEVYPEQNRPAVAKIIEVLGDYADSGMEIEIAVRKHHLPHQFSEACAKAAKKIPDHVRKSDLKGRVDLRDLPLVTIDGETARDFDDAVFAEKIGRNYRLVVAIADVSHYVRPDDAIDTDAQERSTSVYFPRRVIPMLPENLSNGICSLNPNVERLCMVCDMVITYAGNIKEYRFYPAVMRSHARLTYNQVWKWLSDGIGHPFKAQIDTLYKLFKILQKKRFERGAVEFDSIETQMLFDDNGKIEKIVPVVRNDAHKLIEECMLAANVCAADFLLKNKHTALFRNHLGPTPEKLAALREQLGLLGLQLGGGDNPSPKDYAALAGQFKGRPDAELLQVMMLRSMQQAVYEPHCDGHFGLAYEAYAHFTSPIRRYPDLTVHRAIKAVLNQQTYTPKKSWQALGVHTSFCERRADDASRDVENWLKTYYMRDKVGEVFEGKISGMTSFGIFVTLDGIHIDGLVHISDLGEDYFNFRPEIMAIEGERSGIRFNMGDRVAVRVARADLDDGKIDFVLIAEGSGRGRKVKSSASAKPAGTAGKGKPKTAAEKKTARGGKVRGRGASAAAESGKKAKKPVPIKVKKRKGKS

SEQ ID NO: 24581 - protein, 612 aa, Neisseria meningitidis; identical to SEQ ID NO: 19368

SEQ ID NO: 24582 - protein, 218 aa, Neisseria meningitidis
MTIKIILIDDHTLFRSGIKALLSRQHGFEVIGEAADGLSGIKMISRLQPDVVLLDLNMPGMNGREALSQIISINPQQAVIMLTVSEDSDDLTECIRIGARGYLLKNINADFLLESIRKAAEGDNVFSPEMTAKLVKSLISPQPAQGTQALSSLTPRELEILGYLAAGHSNKIIARHLDLAESTVKVHVQNLLRKLNLSSRVQAAVYAIRHNVPQPVPE

SEQ ID NO: 24583 - protein, 273 aa, Neisseria meningitidis; identical to SEQ ID NO: 6354

SEQ ID NO: 24584 - protein, 742 aa, Neisseria meningitidis
MCSAVLFIYFFLLNIFLFQPAVIHIQSNYILFMSIVSAPLPALSALIILAHYHGIAANPADIQHEFCTSAQSDLNETQWLLAAKSLGLKAKVVRQPVKRLAMATLPALVWCDDGNHFILAKTDGGGEHAQYLIQDLTTNKSAVLSFAEFSNRYSGKLILVASRASVLGSLAKFDFTWFIPAVIKYRRLFFEVLVVSVVLQLFALITPLFFQVVMDKVLVHRGFSTLDVVSVALLVVSLFEIVLGGLRTYLFAHTTSRIDVELGARLFRHLLSLPLSYFEHRRVGDTVARVRELEQIRNFLTGQALTSVLDLAFSFIFLAVMWYYSSTLTWVVLASLPAYAFWSAFISPILRTRLNDKFARNADNQSFLVESITAVGTVKAMAVEPQMTQRWDNQLAAYVASGFRVTKLAVVGQQGVQLIQKLVTVATLWIGARLVIEGKLTVGQLIAFNMLSGQVAAPVIRLAQLWQDFQQVGISVARLGDILNAPTENASSHLALPDIRGEITFEHVDFRYKADGRLILQDLNLRIRAGEVLGIVGRSGSGKSTLTKLVQRLYVPEQGRVLVDGNDLALAAPAWLRRQVGVVLQENVLLNRSIRDNIALTDTGMPLERIIEAAKLAGAHEFIMELPEGYGTVVGEQGAGLSGGQRQRIAIARALITNPRILIFDEATSALDYESERAIMQNMQAICANRTVLIIAHRLSTVKTAHRIIAMDKGRIVEAGTQQELLAKPNGYYRYLYDLQNG

SEQ ID NO: 24585 - protein, 394 aa, Neisseria meningitidis; identical to SEQ ID NO: 1253

SEQ ID NO: 24586 - protein, 313 aa, Neisseria meningitidis; identical to SEQ ID NO: 24438

SEQ ID NO: 24587 - protein, 43 aa, Neisseria meningitidis; identical to SEQ ID NO: 2340

SEQ ID NO: 24588 - protein, 394 aa, Neisseria meningitidis
MGKHILLGVTGSIAAYKSCELVRLLKKQGHSVTVVMSRSATEFVSPLTFQALSGNPVLTDTHGGNGSNGMEHINLTRNADVFLIAPASMNTVAKICNGVADNLLTSLAAARKCPLAIAPAMNVEMWLNPANQRNIAQLVSDGITVYMPGLGEQACGENGMGRMPEPAELLDLLPDLWTPKILRGKKILITAGATFEAIDPVRGITNTSSGKMGVALARACRAAGAEVSLIHGQLQTALPFGISDTVQAVSAEDMHRAVHRLIDKQDAFISVAAVSDYKVKNRSTQKFKKDKNAKPLSIELDENPDILASIASLPNPPFCIGFAAETENVMAYAREKRIKKKIPVIVANDVSIAMGKPTNRITIIGDDEELSFPETSKDEAAMQIVERLAVYLNK

SEQ ID NO: 24589 - protein, 287 aa, Neisseria meningitidis; identical to SEQ ID NO: 13388

SEQ ID NO: 24590 - protein, 627 aa, Neisseria meningitidis
LAISENGQTKVIENAEGARTTPSVIAYLDGGEILVGAPAKRQAVTNAKNTIYAAKRLIGHKFEDKEVQRDIESMPFEIIKANNGDAWVKAQGKELSPPQISAEVLRKMKEAAEAYLGEKVTEAVITVPAYFNDSQRQATKDAGRIAGLDVKRIINEPTAAALAFGMDKGDNKDRKVAVYDLGGGTFDISIIEIANLDGDKQFEVLATNGDTFLGGEDFDQRLIDHIIAEFKKEQGIDLKQDVMALQRLKEAAEKAKIELSSGQQTEINLPYITMDATGPKHLAMKITRAKFESLVEDLITRSIEPCKIALKDAGLSTGDIDDVILVGGQSRMPKVQEAVRDFFGKEPRKDVNPDEAVAVGAAIQGEVLSGGRSDVLLLDVTPLSLGIETMGGVMTKLIQKNTTIPTKASQVFSTAEDNQSAVTIHVLQGERERASANKSLGQFNLGDIAPAPRGMPQIEVTFDIDANGILHVSAKDKGTGKAANITIQGSSGLSEEEIERMVKDAEANAEEDKKLTELVASRNQAEALIHSVKKSLADYGDKLDAAEKEKIEAALKEAEEAVKGDDKAAIDAKTEALGTASQKLGEMVYAQAQAEAQAGESEQANASAKKDDDVVDADFEEVKDDKK

SEQ ID NO: 24591 - protein, 436 aa, Neisseria meningitidis
MPSESKPVSRIVTDSRDIRAGDVFFALAGGRFDAHDFVEDVLAAGAAAVVVSREDCVAMDGALKVDDTLAALQTLAKVWRENVNPFVFGITGSVGKTTVKEMLAAVLRRRFGDNAVLATAGNFNNHIGLPLTLLKLNEKHRYAVIEMGMNHFGELAVLTQIAKPDAALVNNAMRAHVGCGFDGVGDIAKAKSEIYQGLCSDGMALIPQEDANMAVFKTATLNLNTRTFGIDSGDVHAENIVLKPLSCEFDLVCGDERAAVVLPVPGRHNVHNAAAAAALSLAAGLSLNDVAEGLKGFSNIKGRLNVKSGIKGATLIDDTYNANPDSMKAAIDVLARMPAPRIFVMGDMGELGEDEAAAMHAEVGAYARDQGIEAAYFVGDNSVEAAEKFGADGLWFAAKDPLIQVLRHDLPERATVLVKGSRFMQMEEVVEALEDK

SEQ ID NO: 24592 - protein, 462 aa, Neisseria meningitidis; identical to SEQ ID NO: 6381

SEQ ID NO: 24593 - protein, 231 aa, Neisseria meningitidis; identical to SEQ ID NO: 1993

SEQ ID NO: 24594 - protein, 97 aa, Neisseria meningitidis; identical to SEQ ID NO: 910

SEQ ID NO: 24595 - protein, 303 aa, Neisseria meningitidis
MDTLFSLKVFRQVVQSGGFTRAADALGISTAMASKHVSHLENTVQAKLLHRNSRNLSLTEAGEEYYRQCSYALDTLDDAAQKAAGGTEKPQGLLRVTMPLWFAGSQICNWLAEYRERYPEVTLELILDNRHVDLIAEGVDLALRVSQTLSPSLIARPLAEIEFALLASPDFLIRNGVPKTPEEVTRLPAVLPTYTNQQKLDITHKSDGKKYRLELTPVIRTDNTLMMREMIKAGACIGYQPLWAVEHDLRCGTLVRLLPGYAVPTDRLNAVYADRAFLSAKVRSFIDFLNEKIASRKGCRNAV

SEQ ID NO: 24596 - protein, 373 aa, Neisseria meningitidis; identical to SEQ ID NO: 18063

SEQ ID NO: 24597 - protein, 100 aa, Neisseria meningitidis; identical to SEQ ID NO: 3450

SEQ ID NO: 24598 - protein, 202 aa, Neisseria meningitidis; identical to SEQ ID NO: 597

SEQ ID NO: 24599 - protein, 313 aa, Neisseria meningitidis
MAIQWFPGHMNKAKKAIAERAKSVDMVIEMLDARMPASSENPLLAQLSKGKPKLKILNKQDLADPERTKVWLDHYNSRPDTRAIALDSSETGAHGKITQACRAMIPHRQGIDKPLRVLICGIPNVGKSTLINGMIGKKSAKTGNEPGITKAEQRLFLADDFWLYDTPGMLWPKIIVEESGYNLAAGGSVGRNALDEEEVALELLDYLRRHYLPMLQERYQADKDPSSHWDENVWLEWIAKKRGAVLSGGRINYQKAAENILTDFREGKIGRITLETPNQWETWLKKARQKEAELKAIREARKAERKGQKPADE

SEQ ID NO: 24600 - protein, 48 aa, Neisseria meningitidis; identical to SEQ ID NO: 9348

SEQ ID NO: 24601 - protein, 544 aa, Neisseria meningitidis; identical to SEQ ID NO: 3460

SEQ ID NO: 24602 - protein, 188 aa, Neisseria meningitidis
MLLKNILPFAHCLLRQALPEGGNALDGTAGNGHDTLFLAQTAGIRGKVWAFDIQPQALNNTRCRLQEAGYSNVRFILDGHENLKQYIPKPLDAAIFNFGWLPGGDKSLTTRTETSIAALSATLSLLKENGMLIAVLYPGHENGKQEAEAVGQWAKNLPQEQFAVLRYGFTNRKNSPPYLLAFEKLRQK

SEQ ID NO: 24603 - protein, 427 aa, Neisseria meningitidis
MNRNEILFDRAKAIIPGGVNSPVRAFGSVGGVPRFIKKAEGAYVWDENGTRYTDYVGSWGPAIVGHAHPEVVEAVREAALGGLSFGAPTEGEIAIAEQIAKIMPSVERLRLVSSGTEATMTAIRLARGFTGRDKIIKFEGCYHGHSDSLLVKAGSGLLTFGNPSSAGVPADFTKHTLVLEYNNIAQLEEAFAQSGNDIACVILEPFVGNMNLVRPTEAFVKALRELTEKHGAVLIYDEVMTGFRVALGGAQSLHGIMPDLTTMGKVIGGGMPLAAFGGRKDIMECISPLGGVYQAGTLSGNPIAVAAGLKTLEIIRREGFYENLTARTEQLVQGFQTAADAAGIEFAADSVGGMFGLYFAAHAPRNYADMARSNIDAFKRFFHGMLDRGIAFGPSAYEAGFVSAAHTPELIDETVAVAVEVFKAMAA

SEQ ID NO: 24604 - protein, 706 aa, Neisseria meningitidis; identical to SEQ ID NO: 19807

SEQ ID NO: 24605 - protein, 139 aa, Neisseria meningitidis; identical to SEQ ID NO: 921

SEQ ID NO: 24606 - protein, 201 aa, Neisseria meningitidis; identical to SEQ ID NO: 291

SEQ ID NO: 24607 - protein, 286 aa, Neisseria meningitidis
MKPYSANPNLTEPRRLRVLLIAAALGFLLLMLVVPLVAVFYEALKGGWDLYLKSLNDPEAWSAIKLTLITALIVVPVNAVLGVAMAWLLTRFDFRGKQLLTTLLDLPFSVSPVVAGLMFVLLFGAHTALGGRLEAQGIQIIFAIPGIVLATLFVTFPFVAREIIPLMQAQGDSEEQAALILGASGWQMFWRVTLPNIKWALLYGIILTNARAMGEFGAVSVVSGHIRGETNTVPLLVEIFYNEYNFTGAFALSGVLALLALATLAVQNIITKLQDKKLAAAERNAV

SEQ ID NO: 24608 - protein, 126 aa, Neisseria meningitidis; identical to SEQ ID NO: 19014

SEQ ID NO: 24609 - protein, 859 aa, Neisseria meningitidis; identical to SEQ ID NO: 19097

SEQ ID NO: 24610 - protein, 166 aa, Neisseria meningitidis; identical to SEQ ID NO: 987

SEQ ID NO: 24611 - protein, 253 aa, Neisseria meningitidis; identical to SEQ ID NO: 18480

SEQ ID NO: 24612 - protein, 172 aa, Neisseria meningitidis; identical to SEQ ID NO: 601

SEQ ID NO: 24613 - protein, 334 aa, Neisseria meningitidis
MQRQTELKNWLQTVYPERDFDLTFAAADADFRRYFRATFSDGSSVVCMDAPPDKMSVAPYLKVQKLFDMVNVPQVLHADTDLGFVVLNDFGNTTFLTAMLQEQGETAHKALLLEAIGELVELQKASREGVLPEYDRETMLREINLFPEWFVAKELGRELTFKQRQLWQQTVDTLLPPLLAQPKVYVHRDFIVRNLMLTRGRPGVLDFQDALYGPISYDLVSLLRDAFIEWEEEFVLDLVIRYWEKARAAGLPVPEAFDEFYRWFEWMGVQRHLKVAGIFARLYYRDGKDKYRPEIPRFLNYLRRVSRRYAELAPLYALLVELVGDEELETGFTF

SEQ ID NO: 24614 - protein, 278 aa, Neisseria meningitidis
MQIIHTIRELRAWRKNAGKVAFVPTMGNLHEGHLALVREAKKRADSVVVSIFVNRLQFGQGEDFDKYPRTLQQDADKLEAEGVAVVFAPDEKELYPNVEQRYNVEPPNLQNELCGKFRPGHFRGVATVVSKLFNIVAPDVACFGKKDYQQLAVIKGLTEDLNFDVEIVPVDTGRAEDGLALSSRNQYLSAAERDEAPRLYCELKAVAESLAQGSLDYAGLERQAADHLTAAGWVVDYVEIRRADTLEVARAGDKKLVVLAAARLGTTRLIDNLEIKLP

SEQ ID NO: 24615 - protein, 163 aa, Neisseria meningitidis
MSIETKNYITPAGWQALKDELYQLVNKERPEIVQIVNWAAGNGDRSENGDYLYGKRRMREIDRRIRFLTKRLEAAVVVDPELREATDQVFFGATVGLLRGDGREQTVKIVGIDEIDTAQNKISWISPLARCLIKAREGDEVVLNTPEGREEIEILSVEYIKID

SEQ ID NO: 24616 - protein, 582 aa, Neisseria meningitidis; identical to SEQ ID NO: 18200

SEQ ID NO: 24617 - protein, 390 aa, Neisseria meningitidis; identical to SEQ ID NO: 19414

SEQ ID NO: 24618 - protein, 797 aa, Neisseria meningitidis; identical to SEQ ID NO: 18537

SEQ ID NO: 24619 - protein, 359 aa, Neisseria meningitidis; identical to SEQ ID NO: 18893

SEQ ID NO: 24620 - protein, 62 aa, Neisseria meningitidis; identical to SEQ ID NO: 7678

SEQ ID NO: 24621 - protein, 232 aa, Neisseria meningitidis
VQADLAYAAERITHDYPKATGANNTSTVSDYFRNIRAHSIHPRVSVGYDFGDWRIAADYASYRKWNNNKYSVNTKEVGRNNNNNIDIWKELKTENQENGSFHAASSLGLSAIYDFKLNDKFDKFKPYIGARVAYGHVKHQVHSVRKETTTVFSKPSGSVTKPGEIVETPTSKPAYHESHSISSLGLGVIAGVGFDITPKLTLDTGYRYHNWGRLENTRFKTHEVSLGMRYRF

SEQ ID NO: 24622 - protein, 343 aa, Neisseria meningitidis; identical to SEQ ID NO: 12509

SEQ ID NO: 24623 - protein, 230 aa, Neisseria meningitidis; identical to SEQ ID NO: 1269

SEQ ID NO: 24624 - protein, 283 aa, Neisseria meningitidis
MARHGWQAGRFEIGLDKPKIMGIVNLTPDSFSDGGAYSQNAKTALAHAERLLKEGADILDIGGESTRPGADYVSSEEEWARVEPVLVEVAGWGVPVSLDTRRTVVMEKALALGGIDIINDVAALTDEGAVELLARQTDTGICLMHMQGLPETMQINPKYQDVVGEVARYLKARAAECIAAGIAPQRITLDPGFGFGKTLQHNIALMRHLPELMAETGFPLLIGVSRKRMIGELTGEADAAARVHGSVAAAVAAVARGAQIVRVHDVKATADALKVWEALGINL

SEQ ID NO: 24625 - protein, 192 aa, Neisseria meningitidis; identical to SEQ ID NO: 14624

SEQ ID NO: 24626 - protein, 421 aa, Neisseria meningitidis; identical to SEQ ID NO: 3036

SEQ ID NO: 24627 - protein, 217 aa, Neisseria meningitidis; identical to SEQ ID NO: 18682

SEQ ID NO: 24628 - protein, 321 aa, Neisseria meningitidis
MSYTQLTQGERYHIQYLSRHCTVTEIAKQLNRHKSTISREIRRHRTQGQQYSAEKAQRQSQTIKQRKRQPYKLDSQLIQHIDTLIRRKLSPEQVCAYLCKHHQITLHHSTIYRYLRQDKSNGSTLWQHLRICSKPYRKRYGSTWTRGKVPNRVVIENRPAIVDQKSRIGDWEADTIVGKGQKSALLTLVERVTRYTIICKLDSLKAEDTARAAVRALKAHKDRVHTITMDNGKEFYQHTKITKALKAETYFCRPYHSWEKGLNENTNGLIRQYFPKQTDFRNISDREIRRVQDELNHRPRKTLGYETPSVLFLNLFQPLIH

SEQ ID NO: 24629 - protein, 269 aa, Neisseria meningitidis
MIQDTRPLIRVVAGILLDSDGNYLLSSRPEGKPYAGYWEFAGGKVEAGETDFQALQREFEEELGIRILAATPWLTKIHSYEHARVCLKFLWVNPDQWTGEPQSREGQEWSWQKAGDFTVAPMLPANGALLRSLSVPRRLYGSLKTGLHGENSMGAYRVLPLGSAEGSGANVLMEAAQWQDRPEYAGSVWMMVQTREQWRQAQEKGADVVVWRVGNAAQAAAVDEVLKHGVSVPLVLAANGQTVARYGKLWLGLGAHVVVRDETIGKNHE

SEQ ID NO: 24630 - protein, 558 aa, Neisseria meningitidis
MSQQYVYSMLRVSKVVPPQKTIIKDISLSFFPGAKIGLLGLNGAGKSTVLRIMAGVDKEFEGEAVPMGGIKIGYLPQEPELDPEKTVREEVESGLGEVAAAQKRLEEVYAEYANPDADFDALAEEQGRLEAIIAAGSSTGGGAEHELEIAADALRLPEWDAKIDNLSGGEKRRVALCKLLLSKPDMLLLDEPTNHLDAESVEWLEQFLVRFPGTVVAVTHDRYFLDNAAEWILELDRGHGIPWKGNYSSWLEQKEKRLENEAKSEAARVKAMKQELEWVRQNAKGRQAKSKARLARFEEMSNYEYQKRNETQEIFIPVAERLGNELIEFVNVSKSFGDKVLIDDLSFKVPAGAIVGIIGPNGAGKSTLFKMIAGKEQPDSGEVKIGQTVKMSLIDQSREGLQNDKTVFDNIAEGRDILQVGQFEIPARQYLGRFNFKGSDQSKITGQLSGGERGRLHLAKTLLGGGNVLLLDEPSNDLDVETLRALEDALLEFAGSVMVISHDRWFLDRIATHILACEGDSKWVFFGGNYQEYEADKKRRLGEEGAKPKRIKYKPVTR

SEQ ID NO: 24631 - protein, 581 aa, Neisseria meningitidis; identical to SEQ ID NO: 2972

SEQ ID NO: 24632 - protein, 247 aa, Neisseria meningitidis; identical to SEQ ID NO: 18834

SEQ ID NO: 24633 - protein, 97 aa, Neisseria meningitidis; identical to SEQ ID NO: 177

SEQ ID NO: 24634 - protein, 558 aa, Neisseria meningitidis
MLTYTPPDARPPAKTHEKPWLLLLMAFAWLWPGVFSHDLWNPAEPAVYTAVEALAGSPTPLVAHLFGQTDFGIPPVYLWVAAAFKHLLSPWAADSYDAARFAGVFFAVVGLTSCGFAGFNFLGRHHGRSVVLILIGCIGLIPTVHFLNPAAAAFAAAGLVLHGYSLACRRVIAASFLLGTGWTLMSLAAAYPAAFALMLPLPVLMFFRPWQSRRLMLTAVASLAFALPLMTVYPLLLAKTQPALFAQWLDDHVFGTFGGVRHVQTAFSLFYYLKNLLWFALPALPLAVWTVCRTRLFSTDWGILGVVWMLAVLVLLAANPQRFQDNLVWLLPPLALFGAAQLDSLRRGAAAFVNWFGIMAFGLFAVFLWTGFFAMNYGWPAKLAERAAYFSPYYVPDIDPIPMAVAVLFTPLWLWAITRKNIRGRQAVTNWAAGVTLTWALLMTLFLPWLDAAKSHAPVVRSMEASLSPELKRELSDGIECIDIGGGDLHTRIVWTQYGTLPHRVGDVQCRYRIVRLPQNADASQGWQTVWQGARPRNKDSKFALIRKIGENILKTTD

SEQ ID NO: 24635 - protein, 140 aa, Neisseria meningitidis; identical to SEQ ID NO: 662

SEQ ID NO: 24636 - protein, 676 aa, Neisseria meningitidis
LTIFSVLLPKKGMKRHFMPKILQQTTLHRFFRANTHHPISPSVLQQAGDLIRWLCFSDGISDFRPCRLKPQNPIGGIIMNTVSNYLSALREAMKAQGLDALVIPSADPHLSEYLPEHWQARRELSGFTGSVGTFVVTADEAGVWVDSRYWEQAAKQLAGSGIELQKSGQVPPYNEWLAANLPENAAVGILSDMVSLTGKRTLAQSLAAKNIRIEHPDGLLDQVWTSRPAIPAETVFVHDPAYVSETAAEKLARVRAVMAEKGADYHLVSSLDDIAWLTNLRGSDVPFNPVFVSFLLIGKDNAVLFTDRCRLNAEAAAALQTAGITVEPYAQVADKLAQIGGALLIEPNKTAVSTLVRLPESVRLIEGINPSTLFKSCKSEADIARIREAMEHDGAALCGFFAEFEDIIGNGGSLTEIDVDTMLYRHRSVRPGFISLSFDTIAGFNANGALPHYSATPESHSTISGNGLLLIDSGAQYKGGTTDITRVVPVGTPSAEQKSDNTLVLKAHIALAEAVFPENIPSPLIDAICRKPLWQAQCDYGHGTGHGVGYFLNVHEGPQRIAFAAPATPETAMKKGMVTSIEPGLYRPGKWGIRIENLAANQAVAAPQETEFGSFLCFETLTLCPIDTRLMDTALMTDGEIDWVNRYHAEVRRRLEPLTEGAAKAWLIKRTEPLAR

SEQ ID NO: 24637 - protein, 68 aa, Neisseria meningitidis; identical to SEQ ID NO: 3910

SEQ ID NO: 24638 - protein, 435 aa, Neisseria meningitidis; identical to SEQ ID NO: 19564

SEQ ID NO: 24639 - protein, 263 aa, Neisseria meningitidis
MARHPYRRLRPAKSSFPEVGISEEGNIRSLHLGSDTIQSSMNLDHPSELVLSYSRAMMGWLLFTDALPQHITQIGLGGGSFARWIDTYLPDTRQTAVDINPQVIAIARSLFELPFEGEKFEIIEADGAEYIKVFRHNTDVILVDGFDGEQIIDALVEEPFFRDCRNALSSDGIFVTNWWSGDKRYQRFIERLLSVFEGRVLELPAESHGNVAVMAFQSSPKEQNIDKLKKRADKLSNAYGLDFHRMLADLKASNPNNGKHFHL

SEQ ID NO: 24640 - protein, 158 aa, Neisseria meningitidis; identical to SEQ ID NO: 2471

SEQ ID NO: 24641 - protein, 217 aa, Neisseria meningitidis; identical to SEQ ID NO: 24211

SEQ ID NO: 24642 - protein, 376 aa, Neisseria meningitidis
MKIVFITTVASSIYGFRAPVIKKLIGKNHQVYAFVSEFSDNELDTIREMGVTPVTYRSNRSGLNPFSDIKSTFLIFKELKKISPDLVFPYFAKPVIFGTFAAKLAGVPRIVGMLEGLGFAFTPQPEGIPLKTKIIKGILIALYRIALPMLESLIVLNPDDKDELTDKYGIKIKNIHILGGIGLDLRQYPYSEADIPDEKEPVKFLFIGRLLKEKGIDEFIRAAEQVKDKYPDTVFTALGAIDKSRGGGGDLERLAARDIIRFPGFVNNVSEVIKEHHIFVLPSYYREGVPRSTQEAMAVGRAVITTDVPGCRETVADKVNGFLIEPWNPRILAEKMIYFIENREAVRLMGNASYAIAKDKFDAEKVDLKLLDILKA

SEQ ID NO: 24643 - protein, 272 aa, Neisseria meningitidis; identical to SEQ ID NO: 1395

SEQ ID NO: 24644 - protein, 462 aa, Neisseria meningitidis
MNTRTEHDTMGNVEVPSEAYWGAQTQRSRNNFKIGGETLPQPLIYALALVKKAAAATNVSLGRIKPEQADLITQAADDVLNGRLDGQFPLVVWQTGSGTQSNMNMNEVLANRANEIAGTGLAAYQPVHPNDHVNHAQSTNDAFPTAIHVAAAIEINRHLIPAVKALRDTLDKKAQAFAPIVKIGRTHLQDATPLTLGQEFSGYVSQLDHGLGRLNDALKDLYELALGGTAVGTGLNSHPEYAEKAAAKLAELSGLPFVSAPNKFEALGGRDAAVAASGALKTLAASLNKIANDIRWLASGPRCGLGEIKIPENEPGSSIMPGKVNPTQCEAMTMVCCQVFGNDVTIGMAGASGNFELNVYMPVIAYNLLQSIRLLGDACNSFNEHCAVGIEPVPEKIDYFLHHSLMLVTALNRKIGYENAAKVAKTAYKNDKSLRETAVELGLLTGEEFDELVVPADMVHPR

SEQ ID NO: 24645 - protein, 491 aa, Neisseria meningitidis
MISKQEYQAQAAQGYNRIPLVQELLADLDTPLSLYLKLANRPYTYLLESVVGGERFGRYSFIGLPCSHYLKASGKHVDVYQNGEIVEQHDGNPLPFIEAFHNRFKTPEIPSLPRFTGGLVGYFGYETIYNFEHFAHRLKNTTKADPLGTPDILLMLSQELAVIDNLSGKIHLVVYADPSQPDGYERARERLEDIRTQLRQSCAIPLSLGSKHTEAVSEFGEEPFKACVNKIKDYIFAGDCMQVVPSQRMSMEFTDSPLALYRALRTLNPSPYLFYYDFGDFHIVGSSPEILVRRERNDVIVRPIAGTRLRGKTPAEDLANEQDLLSDAKEIAEHVMLIDLGRNDVGRISKTGEVKVTDKMVIEKYSHVMHIVSNVEGRLKDGMTNMDILAATFPAGTLSGAPKVRAMEIIEEVEPSKRGIYGGAVGVWGFNNDMDLAIAIRTAVVKNNTLYVQSGAGVVADSDPASEWQETQNKARAVIHAAQMVQEGLDK

SEQ ID NO: 24646 - protein, 548 aa, Neisseria meningitidis; identical to SEQ ID NO: 5670

SEQ ID NO: 24647 - protein, 127 aa, Neisseria meningitidis; identical to SEQ ID NO: 1080

SEQ ID NO: 24648 - protein, 378 aa, Neisseria meningitidis
MKNISLSPPATLGILGGGQLGRMFTVAAKTMGYKVTVLDPDPNAPAAEFADRHLCAPFNDQTALDELAKCAAVTTEFENVNADAMRFLAKHTNVSPSGDCVAIAQNRIQEKAWIRKAGLQTAPYQAVCKAEDITEASAQFLPGILKTATLGYDGKGQIRVKTVDELKAAFAEHGGVDCVLEKMVDLRGEISVIVCRLNNDNVQTFDPAENIHENGILAYSIVPARLSADIQQQARQMAQRLADELNYVGVLAVEMFVVGDTHELVVNEIAPRPHNSGHHTVDACAADQFQQQVRLMCNLPPADTKLLSSCCMANILGDVWQEDGGEPDWFPLQSRPDAHLHLYGKKTAHKGRKMGHFTVLTTDSDTAFQEAKKLHQSL

SEQ ID NO: 24649 - protein, 154 aa, Neisseria meningitidis; identical to SEQ ID NO: 741

SEQ ID NO: 24650 - protein, 90 aa, Neisseria meningitidis; identical to SEQ ID NO: 11161

SEQ ID NO: 24651 - protein, 929 aa, Neisseria meningitidis; identical to SEQ ID NO: 19459

SEQ ID NO: 24652 - protein, 291 aa, Neisseria meningitidis; identical to SEQ ID NO: 18636

SEQ ID NO: 24653 - protein, 307 aa, Neisseria meningitidis; identical to SEQ ID NO: 983

SEQ ID NO: 24654 - protein, 468 aa, Neisseria meningitidis; identical to SEQ ID NO: 2141

SEQ ID NO: 24655 - protein, 312 aa, Neisseria meningitidis; identical to SEQ ID NO: 8892

SEQ ID NO: 24656 - protein, 63 aa, Neisseria meningitidis; identical to SEQ ID NO: 980

SEQ ID NO: 24657 - protein, 532 aa, Neisseria meningitidis; identical to SEQ ID NO: 19451

SEQ ID NO: 24658 - protein, 244 aa, Neisseria meningitidis
MSANVSRLVVQNLQKSFKKRQVVKSFSLEIESGEVIGLLGPNGAGKTTSFYMIVGLIAADAGSVMLDGQELRHLPIHERARLGVGYLPQEASIFRKMTVEQNIRAILEIRTKDKNQIDREIEKLLADLNIGHLRRSPAPSLSGGERRRVEIARVLAMKPHFILLDEPFAGVDPIAVIDIQKIIGFLKSRGIGVLITDHNVRETLSICDRAYIISDGAVLASGKPDDLVGNEQVRSVYLGKNFKY

SEQ ID NO: 24659 - protein, 410 aa, Neisseria meningitidis
MPSAHYPEMSEKLMAVLMAMLVTLMPFSIDAYLPAIPEMAQSLNADVHRIEQSLSLFMFGTAFGQVVGGSVSDIKGRKPVALTGLAVYCLAVAAIVFASSAEQLLNLRVVQAFGAGMTVVIVGAMVRDYYSGRKAAQMFALIGIILMVVPLVAPMVGALLQGLGGWQAIFVFLAAYSLVLLGLVQYFLPKPAVGGKIGRDVFGLVAGRFKRVLKTRAAMGYLFFQAFSFGSMFAFLTESSFVYQQLYRVTPHQYAWAFALNIITMMFFNRVTAWRLKTGVHPQSILLWGIVVQFAANLSQLAAVLFFGLPPFWLLVACVMFSVGTQGLVGANTQACFMSYFKEEGGSANAVLGVFQSLIGAGVGMAATFLHDGSATVMAATMTASTSCGIALLWLCSHRAWKENEQSEYL

SEQ ID NO: 24660 - protein, 259 aa, Neisseria meningitidis
MKTITETLNLAPKGKNFLTADWPAPANVKTLITTRNGGVSQGAYQSLNLGTHVGDNPEAVRRNREIVQQQVGLPVAYLNQIHSTVVVNAAESLGGTPNADASVDDTGKAVCAVMTADCLPVLFCDRAGTAVAAAHAGWRGLAGGVLQNTIAAMKVPPVEMMAYLGPAISADAFEVGQDVFDAFCTPMPEAAAAFEGIGGGKFLADLYALARLILKREGVGGVYGGTHCTVLERDTFFSYRRDGATGRMASLIWLDGNAV

SEQ ID NO: 24661 - protein, 208 aa, Neisseria meningitidis
MKNIVILISGRGSNMQAIVNAAIPNVRIAAVLSNSETAAGLQWAAGQGIPTDSLNHKNFESRLAFDTAMMEKIDAYQPDLVVLAGFMRILTPEFCAHYEGRLMNIHPSVLPSFTGLHTHERALEAGCRVAGCTIHFVTAELDCGPIVSQGIVPILDGDTADDVAARVLAVEHKLYPKAVADFAAGRLIIEGNRVRNSENADAARFLTA

SEQ ID NO: 24662 - protein, 383 aa, Neisseria meningitidis
MQTWQLPEHIADVLPTNARQLESAREQLLALFRVHGYELVQPPLMEYAHSLLTHIDAGLSLKTILVTDRLSGRQLGIRADITPQVARIDAHLLSANQGINRLCYAGPVLHAQSDGLLNMREPLQAGAEMYGFADIRGDIELIDLMLKSMKIADMGKVLLSLGHIGIFRALSDAAHLDAGQSATLLALMQDKDTETVEAQVKAWKLDGMWAKAFSLLPRLYGGREVLSDARGRLPDLSAVGGALGELQAVCDAFPDCEIHIDLSELRVDNYHTGLLYAAYAADFHDAVARGGRYDGLGGYFGRARPATGFSFDLRSFIGRLPTSERQPAVLVDAEDAEAAREAVEALREQGQCVVIDYGIGHNVSEELAGRLKKTDGVWQVVKR

SEQ ID NO: 24663 - protein, 138 aa, Neisseria meningitidis; identical to SEQ ID NO: 671

SEQ ID NO: 24664 - protein, 270 aa, Neisseria meningitidis
MDKIRVAAVQMVSGVSPETNVAAMKRLVARAAEQGVDWVLLPEYWVLMGANDTDKLALAEPLGGGRFQTALSETAKECGVVLFGGTVPLQSPEAGKVMNTLLVYGRDGKRTGLYHKMHLFGFSGLGERYAEADTIRAGGEVPHLSAEGVPVAAGICYDVRFPEFFRRQLPFDVLMLPAAFTHTTGKAHWELLLRARAVENQCYVVAAAQGGLHENGRRTFGHSMIVDPWGDVLDVLPEGEGVVTADIDANRLNSVRNRLPALKHWVLDAV

SEQ ID NO: 24665 - protein, 471 aa, Neisseria meningitidis; identical to SEQ ID NO: 7428

SEQ ID NO: 24666 - protein, 318 aa, Neisseria meningitidis; identical to SEQ ID NO: 3091

SEQ ID NO: 24667 - protein, 309 aa, Neisseria meningitidis
MDSIIELRHLKTLLALEETGSVSLAAKRVFLTQSALSHQIRMLENHYGAPLFERKSTPLRFTPVGERLLRLAHDLLPQVTDAERDLARIIEGEAGELRIAVECHTCFDWLMPAMGEFRPMWPQVELDIVSGFQADPVGLLLQHRADLAIVSEAEKQNDISFQPLFAYEMVGICAPDHPLAAKNVWTAEDFIGETLITYPVPDEMLDLPKKILIPKNINPPRRHSELTIAIIQLVASRRGIAALPYWTVMPYLEKGYVVHRQITADGLQSKLYAAIRTEDTDKSYLNNFCQIIRERGFADLPGLSELEPV

SEQ ID NO: 24668 - protein, 148 aa, Neisseria meningitidis
LLTKLKILLFLFLFVFVLAINLLFFFFSSDIESFGNYQFEYVYDKGWPANYILVMKDGNEGNFDKIISGLVLEYYKEDDNIYFSYIDGQGFASDSCYYKPEILYGKIILNKNHIININSMEKNNFLSEDKIMKGTRNWLADPKNKCNI

SEQ ID NO: 24669 - protein, 371 aa, Neisseria meningitidis
MKIVIAPDSFKESLTAQQVAEAIKRGFQQSIADVECLLCPVGDGGEGTVDAIRHSLDLEEKCLQVTGPFGQKEVMRYFQKEQLALFEVADLVGLGKIPLEKRNPLQIQTRGIGELIRHLISQEIKEIYIGVGGTASNDGGIGIAAGLGYQFYDEDGNTLPVCGQSLLNLASVSTENRYEIPEDVHIRILADVVSPLCGHQGATYTFGKQKGLDSTMFEAVDQAIQDFYEKVSPATLKLKGAGAGGGIAGGLCAFAQASIVSGIDTCLDLIDFDKKVSDVDLVIIGEGRLDRQSLAGKAPIGVAKRTPVGVPVVAICGSLVEDLPSLPFENIQAAFSILEKSEPLEDSLKNASLYLEHTASNIGHLLNMPKI

SEQ ID NO: 24670 - protein, 477 aa, Neisseria meningitidis
MNEYYQLIKHPDISLSPISDGIGVGNPATGEILAYVRNTGSDKLKNLIQKAAAAQKLWAAKTALERADILWRWYFLVKENKEALARLMTMEQGKSLTESRGEIDYAASFVRWFAEEARRIDGDVLTSVKASQKLVVLKQPVGVTAAITPWNFPSAMIARKAAPALAVGCAMIIKPASLTPLSAYALASLAYEAGIPQDLLPVVSGRASEIGREFATNPIIRKISFTGSTEVGAKIFADSAADIKKLSLELGGNAPFIVFDDADLDKAVEGALASKFRNSGQTCVCTNRVYAQSGIYDEFCRKLSEKVAELKLGNGLEDGVNQGPLIEEKAVEKVEQHIADALAKGASCLTGGKRSALGGTFFEPTVLSGVTAQMAVAREETFGPLCPVFRFETEAEVIEAANNTEYGLAAYLFTADTARQWRVGEALEYGMVGINTGLISNEAAPFGGVKRSGLGREGSKYGADEYLELKYLCMDVG

SEQ ID NO: 24671 - protein, 141 aa, Neisseria meningitidis; identical to SEQ ID NO: 26

SEQ ID NO: 24672 - protein, 51 aa, Neisseria meningitidis; identical to SEQ ID NO: 7347

SEQ ID NO: 24673 - protein, 628 aa, Neisseria meningitidis; identical to SEQ ID NO: 19779

SEQ ID NO: 24674 - protein, 196 aa, Neisseria meningitidis
MLLFIDNYDSFTYNIVQYFAELGQEVAVRRNDDITLEEIEALNPQYLVIGPGPCSPKEAGISVAAMRHFAGRLPIMGVCLGHQTIGEAFGGRIVRAKTLMHGKVSPVSHSGKGMFKGLPNPVTCTRYHSLVIDRDNLPDCLEITAWTDDGEIMGVRHKEYAVEGVQFHPEALLTEHGHDMLNNFLIEFQNFKPQKI

SEQ ID NO: 24675 - protein, 237 aa, Neisseria meningitidis; identical to SEQ ID NO: 19351

SEQ ID NO: 24676 - protein, 317 aa, Neisseria meningitidis; identical to SEQ ID NO: 18507

SEQ ID NO: 24677 - protein, 368 aa, Neisseria meningitidis; identical to SEQ ID NO: 12897

SEQ ID NO: 24678 - protein, 540 aa, Neisseria meningitidis
MKTKEFLKSLAELAASLRQVIEAEVDGFDASPKAVSARRAKVFDPIGGYEYFVNTYFPHYIRSPEKSELHAFLFSRLPEIIRSPKGENEAVGAPRGEGKSTQVTQLFTLWCIVTGQKHYAVIVMDSIDQAYPMLEAIKAELEFNPRLKTDFPEVCGQGRVWQAGTIVTANDVKVQVAGSGKKLRGLRHGPYRPDLTVLDDIENDEQVRNPEQRDKLNAWLTKTVLPLGGVGQKYDVIYIGTILHYDSVLNRTLNNPFWRGVKFKAMKRWPDRMDLWDRWEELFRNDGETVAEAFYQANKDEMERGAVTSWAARGVLALMKIRARDGHATFDSEYQNDPVSGEDAPFAKSMKFWNDLPSDLVYFGALDPSLGKAGASRDPSAIVIGGYQRSMGRLYVVEAQIKKRLPDLIIEDVICLHRQYRCKLWFVETVQFQEFLKDELVKRSAARGIPVPARAVKPVSDKLLRIETLQPHMANGLILLNESQQTLIQQFRHFPKADHDDGPDAVHMLWSGAVANCVPIEWQSPTDNDFGNEIKSKWSR

SEQ ID NO: 24679 - protein, 124 aa, Neisseria meningitidis; identical to SEQ ID NO: 10071

SEQ ID NO: 24680 - protein, 228 aa, Neisseria meningitidis; identical to SEQ ID NO: 2979

SEQ ID NO: 24681 - protein, 60 aa, Neisseria meningitidis; identical to SEQ ID NO: 2288

SEQ ID NO: 24682 - protein, 513 aa, Neisseria meningitidis
MTEMQQRAQLHRQIWKIADEVRGAVDGWDFKQYVLGTLFYRFISENFTDYMQAGDSSIDYAAMPDSIITPEIKDDAVKVKGYFIYPSQLFCNIAAEAHQNEELNTKLKEIFTAIESSASGYPSEQDIKGLFDDFDTTSSRLGSTVADKNKRLAAVLKGVAELDFGSFEDHHIDLFGDAYEYLISNYAANAGKSGGEFFTPQSVSKLIARLAVHGQEKVNKIYDPACGSGSLLLQAKKQFDEHIIEEGFFGQEINHTTYNLARMNMFLHNVNYNKFHIELGDTLTNPKLKDSKPFDAIVSNPPYSINWIGSDDPTLINDDRFAPAGVLAPKSKADFAFILHALNYLSGRGRAAIVSFPGIFYRGGAEQKIRQYLVEGNYVETVIALAPNLFYGTGIAVNILVLSKHKDNTDIQFIDASGFFKKETNNNVLTEEHIADIVKLFADKADVPHIAQNAAQQTVKDNGYNLAVSSYVEPEDTREIIDIKQLNAEIGETVAKIERLRREIDEVIAEIEA

SEQ ID NO: 24683 - protein, 268 aa, Neisseria meningitidis; identical to SEQ ID NO: 9528

SEQ ID NO: 24684 - protein, 92 aa, Neisseria meningitidis; identical to SEQ ID NO: 600

SEQ ID NO: 24685 - protein, 170 aa, Neisseria meningitidis; identical to SEQ ID NO: 1267

SEQ ID NO: 24686 - protein, 713 aa, Neisseria meningitidis
MNNPLVNQAAMVLPVFLLSACLGGGGSFDLDSVDTEAPRPAPKYQDVSSETPKAQKDQGGYGFAMRFKRLNRHPKAMPQENEVKLKNDDWEVTGLPTEPKKLPLKQESVILQVQASNGDNNIYTSPYLTQSSHNSHNGSVNGGANQPKNEATGYKNFEYVYSGWFYKHAVNETDFSKNKFKSGDDGYIFYHGKKPSRQLPASGKVTYKGVWHFVTDTKKGQKFHDILEASKGQGDRYSGFSGDEGETISNRTDSELKTDQEGYGFTSNLEVDFDNKKLTGKLIRNDKVTNATTGDKHTTQYYSLEAQVTGNRFSGKAEATDKPEQDGTKQHPFVSDSSSLSGGFFGPQGEELGFRFLSNDQKVAVVGSAKTKDKAESGKTVAASGGTGAAASGGAADMPSENGKLTTVLDAVELTLNDKKIKNLDNFSNAAQLVVDGIMIPLLPKDSESGKTQADKGKNGETAFIYKTTYTPKNDDKDTKAQTGAGGTQTASGTAGVTGGQAGTKTYEVEVCCSNLNYLKYGLLTRKTAGNTVGSGNGSQAAAQTDAQSMFLQGERTDEKEIPSEQNVVYRGSWYGYIANDTSWSGNASDKEGGNRAEFTVNFADKKLDGTLTARERTSPTFTITATIQDNGFSGTAKTADLGFDLDQSNTTGTPKAYITDAKVQGGFYGPKAEELGGWFAYPGDKQTKNATNASGNSSATVVFGAKRQQPVR

SEQ ID NO: 24687 - protein, 119 aa, Neisseria meningitidis; identical to SEQ ID NO: 121

SEQ ID NO: 24688 - protein, 175 aa, Neisseria meningitidis; identical to SEQ ID NO: 5

SEQ ID NO: 24689 - protein, 321 aa, Neisseria meningitidis
MSYTQLTQGERYHIQYLSRHCTVTEIAKQLNRHKSTISREIRRHRTQGQQYSAEKAQRQSRTIKQRKRQPYKLDSQLIQHIDPLIRRKLSPEQVCAYLRKHHRITLHHSTIYRYLRQDKSNGSTLWQHLRICSKPYRKRYGSTWTRGKVPNRVVIENRPAIVDQKSRIGDWEADTIVGKGQKSALLTLVERVTRYTIICKLDSLKAEDTARAAVRALKAHKDRVHTITMDNGKEFYQHTKITKALKAETYFCRPYHSWEKGLNENTNGLIRQYFPKQTDFRNISDREIRRVQDELNHRPRKTLGYETPSVLFLNLFQPLIH

SEQ ID NO: 24690 - protein, 468 aa, Neisseria meningitidis; identical to SEQ ID NO: 1695

SEQ ID NO: 24691 - protein, 213 aa, Neisseria meningitidis; identical to SEQ ID NO: 6185

SEQ ID NO: 24692 - protein, 92 aa, Neisseria meningitidis; identical to SEQ ID NO: 419

SEQ ID NO: 24693 - protein, 765 aa, Neisseria meningitidis
MQPHAPHTDSNTLMLGRYAERAYLEYAMSVVKGRALPEVSDGQKPVQRRILFAMRDMGLTAGAKPVKSARVVGEILGKYHPHGDSSAYEAMVRMAQDFTLRYPLIDGIGNFGSRDGDGAAAMRYTEARLTPIAELLLSEINQGTVDFVPNYDGAFDEPLHLPARLPMVLLNGASGIAVGMATEIPSHNLNEVTQAAIALLKKPTLETADLMQYIPAPDFAGGGQIITPADELRRIYETGKGSVRVRARYEIEKLARGQWRVIVTELPPNANSAKILAEIEEQTNPKPKAGKKQLNQDQLNTKKLMLDLIDRVRDESDGEHPVRLVFEPKSSRIDTDTFINTLMAQTSLEGNVSMNLVMMGLDNRPAQKNLKTILQEWLDFRTVTVTRRLKFRLNQVEKRLHILEGRLKVFLHIDEVIKVIRESDDPKADLMAAFGLTEIQAEDILEIRLRQLARLEGFKLEKELNELREEQGRLNILLGDENEKRKLIIKEMQADMKQYGDARRTLVEEAGRAVLTQTTADEPITLILSEKGWIRSRAGHNLDLSQTAFKEGDRLKQTLEGRTVLPVVILDSLGRTYTLDAAEIPGGRGDGVPVSSLIELQNSAKPVAMLTGLPEQHYLLSSSGGYGFIAKLADMVGRVKAGKVVMTTDSGETVLPPIAVYASSFINPDCKIIAATSQNRALAFPIGELKIMAKGKGLQIIGLNAGESLTHTAVSSEPEILIESEGRRGAAHKDRIPVSLLEAKRGKKGKLLPISGSLKQLSSPK

SEQ ID NO: 24694 - protein, 134 aa, Neisseria meningitidis
LAEGQKSAVTEYYLNHGIWPGNNSSAGVATSASDIKGKYVQSVEVAKGVITATMLSTGVNKEIQGKKLSLWAKRQNGSVKWFCGQPVTRDATNADDVTADGNDKIDTKHLPSTCRDDSSVVCIETPPTAFYKNT

SEQ ID NO: 24695 - protein, 725 aa, Neisseria meningitidis
MCKPNYGGIVLLPLLLASCIGGNFGVQPVVESTPTAYPVTFKSKDVPTSPPAKPSIETTPVNQPAVGAAMRLPRRNIAAFDKNGNEIPDSKQAEEYLPLKEEDILFLDGTPKEQADKLKKEINGRYPNVTIYTSDLKDAVYKYEHVRAGYVYTRFGTDEIEQNSGGKQVTHRLGYDGFVYYSGERPSQSLPSAGTVKYSGNWQYMTDVKRHRAGKAVGIDNLGYITFYGNDVGATSYAAKDVDEREKHPAKYTVDFDKKTLTGQLIKNQYVQKKTDEKKPLTIYNITAKLDGNRFTGSAKVNPDLAKNPAGNERLFFHADADQRLEGGFFGDNGEELAGRFISNDNSVFGVFAGKKTETANAADTKPALPSGKHTKILDSLKISVDEATDGHARKFAISSMPDFGHPDKLLVEGREIPLVNKEQIIKLADGRKMTVSACCDFLTYVKLGRIKTDRPAAKPKAQDEDSEDEIGESEENEDEISDEEGTEDEVVEDEGSEEDEVSEGDNGENEEEIAEEETEEEVDEAEEEKVEEPEEELPAEEGNGGSGSILPTPEAPKGRDIDLFLKGIRTAEADIPKTGKAHYTGTWEARIGVPDKKDDQPGTTFIQKDSYANQGAKAEFDVDFGAKSLSGKLTEKNDTHPAVYIENGVIDGNGFHATARTRDNGIDLSGQGSTSPQSFKANNLLVTGGFYGPQAAELGGNIIDSDRKFGAVFGAKKDNKEVEK

SEQ ID NO: 24696 - protein, 142 aa, Neisseria meningitidis
MDILSRQEVSRIGLKRKLAPHAESEEELENVLNEFAERNWQSDLRYAEAYIRSKSRKHGSLRLKQALAQQGIDEETSRNLLPDRSSEKQTAIDVLRKKFKHPAADLKEKQKQARFLAYRGFDADTVQTALKHAWDENWEDGC

SEQ ID NO: 24697 - protein, 126 aa, Neisseria meningitidis; identical to SEQ ID NO: 6216

SEQ ID NO: 24698 - protein, 119 aa, Neisseria meningitidis; identical to SEQ ID NO: 9294

SEQ ID NO: 24699 - protein, 615 aa, Neisseria meningitidis
MHDTRTMMIKPTALLLPALFFFPHAYAPAADLSENKAAGFALFKNKSPDTESVKLKPKFPVRIDTQDSEIKDMVEEHLPLITQQQEEVLDKEQTGFLAEEAPDNVKTMLRSKGYFSSKVSLTEKDGAYTVHITPGPRTKIANVGVAILGDILSDGNLAEYYRNALENWQQPVGSDFDQDSWENSKTSVLGAVTRKGYPLAKLGNTRAAVNPDTATVDLNVVVDSGRPIAFGDFEITGTQRYPEQIVSGLARFQPGTPYDLDLLLDFQQALEQNGHYSGASVQADFDRLQGDRVPVKVSVTEVKRHKLETGIRLDSEYGLGGKIAYDYYNLFNKGYIGSVVWDMDKYETTLAAGISQPRNYRGNYWTSNVSYNRSTTQNLEKRAFSGGIWYVRDRAGIDARLGAEFLAEGRKIPGSDIDLGNSHATMLTASWKRQLLNNVLHPENGHYLDGKIGTTLGTFLSSTALIRTSARAGYFFTPENKKLGTFIIRGQAGYTLARDNADVPSGLMFRSGGASSVRGYELDSIGLAGPNGSVLPERALLVGSLEYQLPFTRTLSGAVFHDMGDAAANFKRMKLKHGSGLGVRWFSPLAPFSFDIAYGHSDKKIRWHISLGTRF

SEQ ID NO: 24700 - protein, 170 aa, Neisseria meningitidis; identical to SEQ ID NO: 1571

SEQ ID NO: 24701 - protein, 411 aa, Neisseria meningitidis; identical to SEQ ID NO: 3347

SEQ ID NO: 24702 - protein, 207 aa, Neisseria meningitidis
MMKPHNLFQFLAVCSLTVAVASAQAGAVDALKQFNNDADGISGSFTQTVQSKKKTQTAHGTFKILRPDLFKWEYTSPYKQTIVGDGQTVWLYDVDLAQVTKSSQDQAIGGSPAAILSNKTALESSYTLKEDGSSNGIDYVLATPKRNNAGYQYIRIGFKGGNLAAMQLKDSFGNQTSISFGGLNTNPQLSRGVFKFTPPKGVDVLSN

SEQ ID NO: 24703 - protein, 244 aa, Neisseria meningitidis; identical to SEQ ID NO: 11593

SEQ ID NO: 24704 - protein, 876 aa, Neisseria meningitidis
MQEQYQPAAIEPAAQKKWDDARIFNVSEDASKPKYYCLSMFPYPSGKLHMGHVRNYTIGDVLSRFKLLNGFNVMQPMGWDAFGMPAENAAMKNNVAPAAWTYDNIEYMKTQLKSLGFAIDWARETATCKPEYYRWEQWLFTKLFEKGIVYRKNGTVNWDPVDQTVLANEQVIDGRGWRSGALIEKREIPMYYFKITDYAEELLNDLDKLEHWPEQVKTMQRNWIGKSRGMTVRFAVSDDSKQGLEGDYAKFLQVYTTRPDTLMGATYVAVAAEHPLATAAAADKPELQEFIAECKAGSVAEADMATMEKKGVPTGRYVVNPLNGDKLEVWIANYVLWGYGDGAVMAVPAHDERDFEFATKYNLPKKQVIAVGDNAFDENQWQEWYGDKENGVLVNSGDLDGLDFQTAFDAVAAKLQSQGAGEPKTQYRLRDWGISRQRYWGCPIPIVHCEQCGDVPVPADQLPVVLPENVVPDGMGSPLAKMPEFYETACPCCGGAAKRETDTMDTFMESSWYFFRYMSPKFSDGMVDPAAAKYWGAVDQYIGGIEHAILHLLYARFFTKLMRDEGLVNVDEPFERLLTQGMVVCETYYRENDKGGKDWINPADVELTFDDKGRPISAVLKADGLPVVISGTEKMSKSKNNGVDPQELINAYGADTARLFMMFAAPPEQSLEWSDSGVEGAHRFLRRLWRTVYEYLKQGEAVKAFAGSQDGLSKELKDLRHKLHATTAKVSDDYGRRQQFNTAIAAVMELLNQYDKTDTGGEQGRAVAQEVLETAVRLLWPIVPHICETLWSELNGAKLWEAGWPTVDEAALVKSEIEVMVQVNGKLRGKITVAADASKADLEAAALATEGAVKFMEGKPAKKIIVVPGRLVNIVV

SEQ ID NO: 24705 - protein, 269 aa, Neisseria meningitidis; identical to SEQ ID NO: 18121

SEQ ID NO: 24706 - protein, 137 aa, Neisseria meningitidis
MQVEVVSSEQNIYSGEASFVVVPTVQGELGIYPRHEPIMSLVRPGALRLTVPGEDKEVLVAVSGGVLEVQPDKVTILADVAVRSAEMDQARAEEAKKAAEAGISQAKDDKALAEAHKALAAAIAQLKTLDYIRSHKK

SEQ ID NO: 24707 - protein, 87 aa, Neisseria meningitidis; identical to SEQ ID NO: 1364

SEQ ID NO: 24708 - protein, 468 aa, Neisseria meningitidis
MEKNTLSARAPSPWLPLLLAIAIFMQMLDATILNTALPEIAADMNESPLDMQLAVVAYTLTVALLIPLSGYLADRFGTKKVFFGSIAVFMLGSALCAASGSLFELTLSRVVQGIGGSMLVPIPRLTILRVYDKSKLLNAINYAVMPALIGPVLGPLAGGYLVEYASWHWIFLLNLPIGLLGFILGRNIMPDIKGSNISLDFKGYLIFSAAACLLLLSAESLSHALPPYFALLPLCGGLLFARRYFRHMKTASKPIYSADLFLIRTFRLGLAGNLFSRLGISSIPFLMPLMFQVAFGFGASLSGWLVAPVALSSLLVKPLIAPLMKRFGYRTVLLWNTKLLAAFIMLLALPDGNSSLWIWIFLSLAIGACNSLQFSAMNTLTLAGLRPQQTGSGNSLMAVNQQLAISMGIVVGALILKNWTFLIPASSGLHSAFRMTLLSIGGITLASSLVFKRLHVSDGANLTRNTPS

SEQ ID NO: 24709 - protein, 215 aa, Neisseria meningitidis; identical to SEQ ID NO: 4487

SEQ ID NO: 24710 - protein, 163 aa, Neisseria meningitidis; identical to SEQ ID NO: 684

SEQ ID NO: 24711 - protein, 258 aa, Neisseria meningitidis; identical to SEQ ID NO: 2774

SEQ ID NO: 24712 - protein, 289 aa, Neisseria meningitidis; identical to SEQ ID NO: 2976

SEQ ID NO: 24713 - protein, 316 aa, Neisseria meningitidis; identical to SEQ ID NO: 5301

SEQ ID NO: 24714 - protein, 284 aa, Neisseria meningitidis; identical to SEQ ID NO: 506

SEQ ID NO: 24715 - protein, 2509 aa, Neisseria meningitidis
MNKTLYRVIFNRKRGAVVAVAETTKREGKSCADSDSGSAHVKSVPFGTTHAPVCRSNIFSFSLLGFSLCLAVGTANIAFADGIIADKAAPKTQQATILQTGNGIPQVNIQTPTSAGVSVNQYTQFDVGNRGAILNNSRSNTQTQLGGWIQGNLWLARGEARVVVNQINSSHSSQMNGYIEVGGRRAEVVIANPAGIAVNGGGFINASRATLTTGQPQYQAGALTGFQVRSGHIAITGQGLDARDTDFTQILSHAVKIDGPVWGKDVRVSAGKNDVSADGSIQSSHSPATNINSDNSLYAIDTGALGGMYAGKITLISTDRDASVRNQGQWFASAGNVAIDANGRLVNSGTMAAANAKDTDNTAEHKVNIRSQGVENSGTAVSQQGTQIHSQSIQNTGTLLSSGEILIHNSGSLKNETSGTIEAARLAIDTDTLNNQGKLSQTGSQKLHIDAQGKMDNRGRMGLQDTAPTASNGSSNQTGNSYNASFHSSTTTPTTATGTGTATVSISNITAPTFADGTIRTHGALDNSGSIIANGQTDVSAQQGLNNAGQIDIHQLNAKGSAFDNHNGTIISDAVHIQAGSLNNQNGNITTRQQLEIETDQLDNAHGKLLSAEIADLAVSGSLNNQNGEIATNQQLIIHDGQQSTAVIDNTNGTIQSGRDVAIQAKSLSNNGTLAADNKLDIALQDDFYVERNIVAGNELSLSTRGSLKNSHTLQAGKRIRIKANNLDNAAQGNIQSGGATDIGTQHNLTNRGLIDGQQTKIQAGQMNNIGTGRIYGDNIAIAATRLDNQDENGTGAAIAARENLNLGIGQLNNRENSLIYSGNDMAVGGALDTNGQATGKAQRIHNAGATIEAAGKMRLGVEKLHNTNEHLKTQLVETGREHIVDYEAFGRHELLREGTQHELGWSVYNDESDHLRTPDGAAHENWHKYDYEKVTQKTQVTQTAPAKIISGNDLTIDGKEVFNTDSQIIAGGNLLVQTEKDGLHNEQTFGEKKVFSENGKLHSYWREKHKGRDSTGHSEQNYTLPEEITRNISLGSFAYESHRKALSHHAPSQGTELPQSNGISLPYTSNSFTPLPSSSLYIINPVNKGYLVETDPRFANYRQWLGSDYMLDSLKLDPNNLHKRLGDGYYEQRLINEQIAELTGHRRLDGYQNDEEQFKALMDNGATAARSMNLSVGIALSAEQVAQLTSDIVWLVQKEVKLPDGGTQTVLVPQVYVRVKNGDIDGKGALLSGSNTQINVSGSLKNSGTIAGRNALIINTDTLDNIGGRIHAQKSAVTATQDINNIGGILSVEQTLLLNAGNNINSQSTAASSQNTQGSSTYLDRMAGIYITGKEKGVLAAQAGKDINIIAGQISNQSEQGQTRLQAGRDINLDTVQTGKHQATHFDADNHVIRGSTNEVGSSIQTKGDVTLLSGNNLNAKAAEVSSANGTLAVSAKNDINISAGINTTHVDDASKHTGRSGGGNKLIITDKAQSHNETAQSSTFDGRQVVLQAGNDANILGSNVISDNGTRIQAGNHVRIGTTQTQSQSETYHQTQKSGLMSAGIGFTIGSKTNTQENQSQSNEHTGSTVGSLKGDTTIVAGKHYEQIGSTVSSPEGNNIIHAQSIDIQAAHNKLNSNTTQTYEQKGLTVAFSSPVTDLAQQAIAVAQSSKQVGQSKNGRVNAMAAANAGWQAYQTGKSAQNLANGTTNAKQVSISITYGEQQNRQTTQVQASQAQASQIQAGGKTTLIATGAAEQSNINIAGSDIAGKAGTILIADNDITLQSAEQSNTERSQNKSTGWNAGAAVSFGQGGWSLGVTAGGNVGKGYGNGDSVTHRHSHIGDKGSQTLIQSGGDTTIKGAQVRGKGVQVNAKNLSIQSVQDRETYQSKQQNASAQVTVGYGFSASGDYSQSKIRADHASVTEQSGIYAGEDGYQIKVGNHTDLKGGIITSSQSAEDKGKNRFQTATLTTSDIQNYSQYQGKSFGLGASVAVSGKTLGQGAQNKPQNKHLTSVADKNGASSSVGYGSDSDSQSSITKSGINTRNIHITDEAGQIRLTGKTAAQTKADIDTNVTTDTAERHSGSLKNTFNKEAVQSELDLQREVTQEFDKTRQGVKQELYAVVDSKREQATKERLKNGGYDNDKSRALNKEANELDEKIRWLDAGLGLVWGAGSSDMAWSMFATTQADRAVRSATAPKEMWFHKKIIDEKTGKVSFDTRQIWSLNDLSKEELASIQDTNGKVITVSNPGIFNNREDSLSNAAKQNRNSTNGSGVIAVMNPPTGKYKSDSNNKIKDSLWLSSSLVSELMYVGYDQLNNKVFQGYLPKTNSEKLNQDIYREVQKMDNGWSVDTSNHSRGGITASVSLKDWVNNKEQNGIAPIRKARFYGTATNVKNDYADVLQKNGYTYTGADGKTYNSGAYSIVHDKDFVGNKWIPFLLGTNNTTQGACKGLCYSHSSYFAEVPEQYQRDENGNIKMENGKPVETENWEDYTKKWGIPKTGADGKYINHAIPKLVNPNNPNGEKYETNPF

SEQ ID NO: 24716 - protein, 513 aa, Neisseria meningitidis
MKIGIPRESLSGETRVACTPATVALLGKLGFETVVESGAGLAASLDDAAYQTAGATVADKAAVWACPLIYKVNAPSEQELPLLNEGQTIVSFLWPRQNEALVEALRAKKVNALAMDMVPRISRAQALDALSSMANISGYRAVIEAANAFGRFFTGQITAAGKVPPAQVLVIGAGVAGLAAIGTANSLGAVVRAFDTRLEVAEQIESMGGKFLKLDFPQESGGSGDGYAKVMSDEFIAAEMKLFAEQAKEVDIIITTAAIPGKPAPKLITKEMVESMKSGSVIVDLAAATGGNCELTRPGELSVTGNGVKIIGYTDMANRLAGQSSQLYATNLVNLTKLLSPNKDGEITLDFEDVIIRNMTVTRDGEITFPPPPIQVSAQPQQTSSEKAAPAAKPEPKPVPLWKKLAPAVIAAVLVLWVGAVAPAAFLNHFIVFVLACVIGYYVVWNVSHSLHTPLMSVTNAISGIIVVGALLQISQGNGFVTLLAFIAILIASINIFGGFAVTRRMLNMFKKG

SEQ ID NO: 24717 - protein, 148 aa, Neisseria meningitidis
MRLTTKGRFAVTAMLDLAMNAQTGAVKLSAISERQNISLSYLEQLFGKLRRAGLVESLRGPGGGYILAAPAARINIAQIIAAAEDRLDATQCGSKANCHHGAPCLTHDLWENLNKTINDYLGSVTLQSIIEQKNNSDGSRVVQFTHIH

SEQ ID NO: 24718 - protein, 90 aa, Neisseria meningitidis; identical to SEQ ID NO: 18174

SEQ ID NO: 24719 - protein, 380 aa, Neisseria meningitidis
MKVFKQQLEQLGAQNQYRSIPDLIHQGRYITRENRKMLNMSSNDYLGLASDENLRRSFLQQYGGNFPSFTSSSSRLLTGNFPIYTDLEELVAQRFQRESALLFNSGYHANLGILPALTTTKSLILADKFVHASMIDGIRLSRCAFFRYRHNDYEHLKNLLEKNVGKFDRTFIVTESVFSMDGDVADLKQLVQLKKQFPNTYLYVDEAHAIGVYGQNGLGIAERDNLIAEIDLLVGTFGKALASVGAYAVCNQVLKECLINQMRPLIFSTALPPFNVAWTYFIFERLPQFSKERSHLEQLSAFLRREVAHRTQIMPSQTCIVPYILGGNEAALAKAEYLQRQGYYCLPIRPPTVPKNTSRIRLSLTADMTTDEVRQFAACL

SEQ ID NO: 24720 - protein, 356 aa, Neisseria meningitidis
MYRRKGWGIKPWMGAGAAFAALVWLIFALGDTLTPFAVAAVLAYVLDPLVEWLQKKGLNRASASMSVMVFSLILLLALLLIIVPMLVGQFNNLASRLPQLISFMQNTLLPWLKNTIGGYMEIDQASIIAWLQAHTGELSNALKAWFPVLMRQGGNIVSSIGNLLLLPLLLYYFLLDWQRWSCGIAKLVPRRFAGAYTRITGNLNEVLGEFLRGQLLVMLIMGLVYGLGLVLVGLDSGFAIGMVAGILVFVPYLGAFTGLLLATVAALLQFGSWNGILSVWAVFAVGQFLESFFITPKIVGDRIGLSPFWVIFSLMAFGQLMGFVGMLAGLPLAAVTLVLLREGVQKYFAGSFYRGR

SEQ ID NO: 24721 - protein, 122 aa, Neisseria meningitidis; identical to SEQ ID NO: 19534

SEQ ID NO: 24722 - protein, 296 aa, Neisseria meningitidis; identical to SEQ ID NO: 19379

SEQ ID NO: 24723 - protein, 125 aa, Neisseria meningitidis
MSVKPRPVYLDLPNIRLPIPGIVSILHRISGVGLFIMLPFLLYFLSGTLSQESAFETYRAIVSHPLVKLVLIGVLWAYLHHSLAGIRFLFLDAHKGLELNTARNTAKAVFASALVLTVVLGALLW

SEQ ID NO: 24724 - protein, 415 aa, Neisseria meningitidis
MLKQTTLLAACASFAALLGGCATQQPAPVIAGNSGMQDAPSSAVYNNPYGATPYSPAPASDAPYVPPVQSAPVYTPPAYVPPSAPAVSGTYIPSYAPVDINAATHTIVRGDTVYNISKRYHISQDDFRAWNGMTDNTLSIGQIVKVKPAGYAAPKAAAVKSRPAVPAAAQPPVQSAPVDINAATHTIVRGDTVYNISKRYHISQDDFRAWNGMTDNMLSIGQIVKVKPAGYAAPKTAAVESRPAVPAAVQTPVKPAAQPPVQSAPQPAAPAAENKAVPAPAPQSPAASPSGTRSVGGIVWQRPTQGKVVADFGGNNKGVDIAGNAGQPVLAAADGKVVYAGSGLRGYGNLVIIQHNSSFLTAYGHNQKLLVGEGQQVKRGQQVALMGNTDASRTQLHFEVRQNGKPVNPNSYIAF

SEQ ID NO: 24725 - protein, 637 aa, Neisseria meningitidis
MLNITLPDGSVRQYESPVTVAQIAASIGAGLAKAAVAGRVNGKLVDACDPIVEDSAVQIITPKDQEGIEIIRHSCAHLVGHAVKQLYPNAKMVIGPVIEEGFYYDIATEKPFTPEDVAAIEARMKELIAQDYDVVKIMTPRAEAIKIFQERGEEYKLRLIDDMPEVEAMGMYHHQEYVDMCRGPHVPNTRFLKNFKLTKLAGAYWRGDSNNEMLQRIYGTAWATKDELKAYIQRIEEAEKRDHRKLGKQLDLFHLQDEAPGMVFWHPKGWALWQVIEQHMRKELNAAGYKEVKTPQIMDKTFWEKSGHWDNYKDNMFVTSSEKREYAVKPMNCPGHVQIFNNGLRSYRDLPMRLAEFGSCHRNEPSGALHGLMRVRGFVQDDAHIFCTEDQIVSEARAFNELLVRIYKQFGFHDVSVKLSLRPEKRAGSDDVWDKAEQGLREALTACGVEWGELPGEGAFYGPKIEYHVRDALGRSWQCGTLQLDFVLPERLNAEYVTENNDRARPVMLHRAILGSLERFIGILIENHAGSFPLWLAPVQMVIMNITENQADYCREVAAKLQAAGFRAELDLRNEKIGYKIRDNSQYRFPYQIVVGDKEKQENKVAVRRKAEDLGSLDLDDFIAQLQQEITDALVNH

SEQ ID NO: 24726 - protein, 165 aa, Neisseria meningitidis; identical to SEQ ID NO: 19855

SEQ ID NO: 24727 - protein, 242 aa, Neisseria meningitidis; identical to SEQ ID NO: 19330

SEQ ID NO: 24728 - protein, 212 aa, Neisseria meningitidis; identical to SEQ ID NO: 19072

SEQ ID NO: 24729 - protein, 83 aa, Neisseria meningitidis; identical to SEQ ID NO: 3011

SEQ ID NO: 24730 - protein, 729 aa, Neisseria meningitidis
MIYHRIAVNVPLSDGLLTYSHSDPLPPGTRVLVPFRNKTVVGMVWETDIAPDMDTARILSVRTAFSDEPLLPESWRDLLSFTSRYYHYPTGQAVFAALPQGLKETRAVEMPQPPLFYALNEAGRAQTPPPARFNKKAALWDALLSGEMTMAALKQVNAQAAKLIEDWAEQGWIETTEAAKPVLRSCNGQASHSEFVLNADQQKASDAIQTALGRFQPFLLYGITGSGKTEVYFDAMAKVLAQGRQVLFLLPEINLTPQLLKRVGNRFADVPTAVLHSQMAAGRRTQDYLRAMSGQAKLVIGTRLAVFTPMDDVGLIVVDEEHDGSFKQDNELRYHARDLAVWRAKQSGCPVVLGSATPSLESWHKVQSGAYRLLQLTERAHTAAQLPQVDILNVGRLKLDNGFSPQALQLLKQNFEAGGMSLVYLNRRGFAPALFCGDCGHTFGCPNCSAKMVLHQRVRQLRCHHCDHREPIPFKCPDCGNQDLTAVGHGTQRVEETLRAFLPKAAVVRVDRDSTAHKNDWADLYRRIADNEIDILVGTQMLAKGHDFARLNLVIVLNADGSLYSADFRAPERLFAELMQVSGRAGRADKPGKVLIQTQLPEHPVFAAVKAQDYAVFAENELNERQMFAMPPFGFQTAVRADAPRVADALEFLNAAKETLAPLLPASVSQFGAAPMLMVRLAERERAQIFLESPSRQDLHRAVSLWVQVLQQNRDGKIRWSVDVDPQEA

SEQ ID NO: 24731 - protein, 284 aa, Neisseria meningitidis
MKIVLISGLSGSGKSVALRQMEDSGYFCVDNLPLEMLPALVSYHIERADETELAVSVDVRSGIDIGQAREQIAYLRGLGHRVEVLFVEAEESVLVRRFSETRRGHPLSNQDMTLLESLKKEREWLFPLKEIAYCIDTSKMNAQQLRHAVRQWLKVERTGLLVILESFGFKYGVPNNADFMFDMRSLPNPYYDPELRPYTGMDKPVWDYLDGQPLVQEMVDDIERFVTHWLPRLEDESRSYVTVAIGCTGGQHRSVYIVEKLARRLKGRYELLIRHRQAQNLPSR

SEQ ID NO: 24732 - protein, 56 aa, Neisseria meningitidis; identical to SEQ ID NO: 18281

SEQ ID NO: 24733 - protein, 371 aa, Neisseria meningitidis; identical to SEQ ID NO: 14361

SEQ ID NO: 24734 - protein, 125 aa, Neisseria meningitidis; identical to SEQ ID NO: 19924

SEQ ID NO: 24735 - protein, 883 aa, Neisseria meningitidis
MELKFEELPYQLDAVNAVANLFAGQPNHARTFDLTSQGTGRFVGNGLDLDWETLGLNLNTVQKQNGQPETEIGAHGLNFSLEMETGTGKTYVYLRTIYELNRSYGWKKFVIVVPSVPIREGVLKSLEITKAHFDGVFGRPVMRYAEYSSSRLSDLRTFAVNDHIEILVINIQSFEKDGNVINKVNESGETPIKFIQETCPIVIIDEPQNMETEGRLNALESLNPLFTLRYSATHKQPYHKVYSLNPVQAYNLKLVKQIEVLPVLAENDVNGAFVELLEVKQAAKGRPKADLNIHYQDKKETKKKKVSVKWEDDLFEKSGGNEAYRHGFIIDGMDFDKQELAFSSGKTITRGGDGDAVRDEIMKNQIRETVREHLAKEKRLNPLGIKVLSLFFIDRVENYRTEDGTAGKFALWFEEIYRELAGNTDTAGVHDGYFSQDRKGRLKNTDGTTQADNDTYRLIMRDKETLLSFDSPLRFIFSHSALKEGWDNPNVFQICTLNETRSPLKKRQEIGRGLRIAVNQEGRRVRDENVNILTVVPNESYELFAANLQKEYEDECGIKFAAENIKNGNKKKKQLFRKDFPLDPEFQAIWDKLKYKTRYRVRFDTEELIKQASEAVANLPEIQKPKIRIRKAQLKQSQTYGIETVEIAGRSREMDVQWEIPDILGEIQRKTGLTRRTVYEIIIQSGRLKDVAGNPQRFIDLTAEAVNRSLHALMAAGIEYERTGEVYDQKLLEDMAREGIEFYENGFTFTVSNPQKTICENYIPLDSGTEKAFAQNCEDYDAKNEGGVAFYFKLPGWFKIPTPLGNYNPDWAVVKQVRDKVYFVAETKNTGKGIQTGVDMDKLRQNERLKIKCGKRHFEALGGLAYRVVEKVGDLKSEKEEQA

SEQ ID NO: 24736 - protein, 246 aa, Neisseria meningitidis; identical to SEQ ID NO: 18239

SEQ ID NO: 24737 - protein, 464 aa, Neisseria meningitidis; identical to SEQ ID NO: 19187

SEQ ID NO: 24738 - protein, 262 aa, Neisseria meningitidis
MNPKIVFFDIDDTLYRKYTDTLRPSVKTAVAALRGKGILTALATGRSLATIPEKVRDMMAETGMDAVVTINGQFALLHGKTVREVPMDAGLMGRVCAHLDGLGMDYAFVGGEGIAVSALSECVCRALQHIASDFFADKDYFSSKPVYQMLVFAEENEMPPWSDIVEREGLKTVRWHEEAVDLLPAGMSKTDGIRSVVEALGLEMADVMAFGDGLNDVEMLSEVGFGVAMGNGEQAVKEAAKYVCPGVDEDGVLRGLQDLGVI

SEQ ID NO: 24739 - protein, 214 aa, Neisseria meningitidis
VLASAIDFILHIDQHLLALSAQYGVWIYAILFLIVFCETGLIVTPLLPGDSLLFAAGGIAALGGMDIHLMVALLSLAAILGDALNFTVGKYFGGRLFANPDSKIFRREYLDKTRRFYEKHGGKTIIIARFVPIVRTFAPFVAGMGKMHYAKFIRYNIIGGFLWVILFSYAGYFFANFPIVKNNLGLVMGGIIIISILPGAVEIARAKLAVKSKR

SEQ ID NO: 24740 - protein, 322 aa, Neisseria meningitidis
MNEKTIILANPRGFCAGVDRAISIVERALEEFGAPIYVRHEVVHNKFVVDNLREKGAVFIEDLAEVPPGATLVYSAHGVSKAVRQEAAERGFRVFDATCPLVTKVHKEVARLDAQDCEIIMIGHKGHVEVEGTMGQLAPGKMLLVETVGDVAKLEVRNPDKLAYVSQTTLSVDETKDIIAALNARFPNIRNPHKEDICYATTNRQTAVKELAEQCDIVIVVGSPNSSNSNRLREVAAGIGTDAYMVDNAGYLQRAWFEGKNKVGVTAGASAPEVLVQEVLATIRGWGHETVREGEGAEESIVFVLPKELRREGETKPDLCKR

SEQ ID NO: 24741 - protein, 333 aa, Neisseria meningitidis
MLAEEVFGFGLYKESKGSGGRFYERCWLMGSEDVLYGRVHFGGQNNTILFELTGTGCGVAKEGWESRLFAFLTNAIHPKITRVDIAKDFFNGEYSPNQAREDRNKGMFTCHHVKPKGECLGSDWEEDDEAKMTKGKTYGIGSRESSKYVRVYEKGKQLGDKTSTWTRFEIEFKAKDIVIPFEVLQNPGEYFGGAYPICERFVQKATRIHAVKEDKVISADRYLEWVKKQFGRAANGLKFIFPELDKAKLFELIEPSHHKLPKSLAPEAYDCAFLKAQAIHEQPAFKPYKDPYYMYEYYENLEKQLEQQKHVNNEESYNNFIYDKFARLPISWA

SEQ ID NO: 24742 - protein, 152 aa, Neisseria meningitidis; identical to SEQ ID NO: 1697

SEQ ID NO: 24743 - protein, 489 aa, Neisseria meningitidis; identical to SEQ ID NO: 15549

SEQ ID NO: 24744 - protein, 108 aa, Neisseria meningitidis; identical to SEQ ID NO: 6420

SEQ ID NO: 24745 - protein, 65 aa, Neisseria meningitidis; identical to SEQ ID NO: 981

SEQ ID NO: 24746 - protein, 415 aa, Neisseria meningitidis; identical to SEQ ID NO: 19640

SEQ ID NO: 24747 - protein, 188 aa, Neisseria meningitidis; identical to SEQ ID NO: 5680

SEQ ID NO: 24748 - protein, 279 aa, Neisseria meningitidis; identical to SEQ ID NO: 19598

SEQ ID NO: 24749 - protein, 154 aa, Neisseria meningitidis; identical to SEQ ID NO: 2010

SEQ ID NO: 24750 - protein, 98 aa, Neisseria meningitidis; identical to SEQ ID NO: 2571

SEQ ID NO: 24751 - protein, 916 aa, Neisseria meningitidis; identical to SEQ ID NO: 1114

SEQ ID NO: 24752 - protein, 58 aa, Neisseria meningitidis; identical to SEQ ID NO: 19474

SEQ ID NO: 24753 - protein, 222 aa, Neisseria meningitidis; identical to SEQ ID NO: 197

SEQ ID NO: 24754 - protein, 291 aa, Neisseria meningitidis
MSNEVEVMDAVSVQNYQVAHSVMVMEQWGNGEVYNEATWIERGRLAVRQTMEGMFELGRALIVLKEHTEHGRFMEIVKGQFGIGHNETARLMSATQRFATPQMQKAAPKLMDLGKSKLLELLVEEDVTLVGLAEGEEVNGMTFDDVDRMTVRELRVALRESRENLAAKDEVMKTKTAKIDELTEKLAKKQTVVREPKAEDVGSELAMQLTSLEVGIRSQVSRLKDLFDQLNAHSEAHEISHQAKMVGTLNQIILDCEQLRESYALPTEAPTDNVPEWLGGETGEGDESGND

SEQ ID NO: 24755 - protein, 331 aa, Neisseria meningitidis
MLRKLLKWSAVFLTVSAAVFAALLFVPKDNGRAYRIKIAKNQGISSVGRKLAEDRIVFSRHVLTAAAYVLGVHNRLYTGTYRLPSEVSAWDILQKMRGGRPDSVTVQIIEGSRFSHMRKVIDATPDIEHDTKGWSNEKLMAEVAPDAFSGNPEGQFFPDSYEIDAGGSDLRIYQIAYKAMQRRLNEAWESRQDGLPYKNPYEMLIMASLIEKETGHEADRDHVASVFVNRLKIGMRLQTDPSVIYGMGAAYKGKIRKADLRRDTPYNTYTRGGLPPTPIALPGKAALDAAAHPSGEKYLYFVSKMDGTGLSQFSHDLTEHNAAVRKYILKK

SEQ ID NO: 24756 - protein, 188 aa, Neisseria meningitidis; identical to SEQ ID NO: 23521

SEQ ID NO: 24757 - protein, 714 aa, Neisseria meningitidis; identical to SEQ ID NO: 18756

SEQ ID NO: 24758 - protein, 352 aa, Neisseria meningitidis
MITPQQAIERLISNNELFYDEMTDLMRQIMRGQVLPEQIAAILTGLRIKVETVSEITAAAAVMREFATKVPLENAEGLVDIVGTGGDGAKTFNISTTSMFVAAAAGAKVAKHGGRSVSSSSGAADVMEQMGANLNLTPEQVAQSIRQTGIGFMFAPNHHSAMRHVAPVRRSLGFRSIFNILGPLTNPAGAPNQLLGVFHTDLCGILSRVLQQLGSKHVLVVCGEGGLDEITLTGKTRVAELKDGKISEYDIRPEDFGIETRRNLDEIKVANTQESLLKMNEVLEGREGAARDIVLLNTAAALYAGNVAASLSDGISAAREAIDSGRAKSKKEEFVGFQPQQRCHFLGKMELG

SEQ ID NO: 24759 - protein, 437 aa, Neisseria meningitidis
MMSVTVETLENLERKVVLSLPWSEINAETDKKLKQTQRRAKIDGFRPGKAPLKMIAQMYGASAQNDVINELVQRRFYDVAVAQELKVAGFPRFEGVEEQDDKESFKVAAIFEVFPEVVIGDLSAQEVEKVTASVGDAEVDQTVEILRKQRTRFNHVEREAQNGDRVIIDFEGKIDGEPFAGGASKNYAFVLGASQMLPEFEAGVVGMKAGESKDVTVNFPEDYHGKDVAGKTAMFTITLNNVSEATLPEVDADFAKALGIADGDVAKMREEVKKNVSREVERRVNEQTKESVMNALLKAVELKAPVALVNEEAARLANEMKQNFVNQGMADAANLDLPLDMFKEQAERRVSLGLILAKLVDENKLEPTEEQIKAVVANFAESYEDPQEVIDWYYAEPSRLQAPTSLAIESNVVDFVLGKAKVNEKALSFDEVMGAQA

SEQ ID NO: 24760 - protein, 112 aa, Neisseria meningitidis; identical to SEQ ID NO: 3481

SEQ ID NO: 24761 - protein, 337 aa, Neisseria meningitidis
MQVYYDKDADLSLIKGKTVAIIGYGSQGHAHAANLKDSGVNVVIGLRQGSSWKKAEAAGHVVKTVAEATKEADVVMLLLPDETMPAVYHAEVTANLKEGATLAFAHGFNVHYNQIVPRTDLDVIMVAPKGPGHTVRSEYKRGGGVPSLIAVYQDNSGKAKDIALSYAAANGGTKGGVIETTFREETETDLFGEQAVLCGGVVELIKAGFETLTEAGYAPEMAYFECLHEMKLIVDLIFEGGIANMNYSISNNAEYGEYVTGPEVVNASSKEAMRNALKRIQTGEYAKMFIQEGNVNYASMTARRRLNADHQVEKVGAQLRAMMPWITANKLVDQDKN

SEQ ID NO: 24762 - protein, 93 aa, Neisseria meningitidis; identical to SEQ ID NO: 2125

SEQ ID NO: 24763 - protein, 331 aa, Neisseria meningitidis
LQPLVSVLICAYNVEKYFAQSLAAVVNQTWCNLDILIVDDGSTDGTLAIAKDFQKRDSRIKILAQAQNSGLIPSLNIGLDELAKSGGEYIARTDADDIAAPDWIEKIVGEMEKDRSIIAMGAWLEVLSEEKDGNRLARHHRYGKIWKKPTRHEDIADFFPFGNPIHNNTMIMRRSVIDGGLRYNTERDWAEDYQFWYDVSKLGRLAYYPEALVKYRLHANQVSSKYSVRQHEIAQGIQKTARNDFLQSMGFKTRFDSLEYRQIKAVAYELLEKHLPEEDFERARRFLYQCFKRTDTLPAGAWLDFAADGRMRRLFTLRQYFGILRRLLKNR

SEQ ID NO: 24764 - protein, 151 aa, Neisseria meningitidis; identical to SEQ ID NO: 4206

SEQ ID NO: 24765 - protein, 595 aa, Neisseria meningitidis; identical to SEQ ID NO: 18209

SEQ ID NO: 24766 - protein, 611 aa, Neisseria meningitidis; identical to SEQ ID NO: 8062

SEQ ID NO: 24767 - protein, 456 aa, Neisseria meningitidis
MLDNLTGRFSNVFKNIRGQAKLTEDNIKEALREVRLALLEADVALPVVKEFINNVKEKALGQEVAGSLTPDQAFIGVVNKALTELMGRENKTLDLSVAPPAVVLMAGLQGAGKTTTVGKLARLLKNDQKKKVLVVSADVYRPAAIEQLRLLAEQVGVDFFPSDTNQKPVEIATAAVDYAKKHFYDVLMVDTAGRLAIDEEMMNEIKALHAAVNPVETLFVIDAMLGQDAVNTAQAFNEALPLTGVVLTKMDGDSRGGAALSVRHVTGKPIKFIGVGEKINGLEPFHPDRLASRILGMGDVLTLIEDVQKGIDEEAAAKMAKKLHKGKGFDLNDFKEQIQQMRNMGGLENLMSKMPGELGQISKQIPEGTAEKAMGKVEAIINSMTPKERANPALLKASRKRRIAMGAGTTVQEVNKLLKQFEQMQQMMKMFSGNGLGKLMRMAKGMKGMKGMFPGL

SEQ ID NO: 24768 - protein, 887 aa, Neisseria meningitidis; identical to SEQ ID NO: 19827

SEQ ID NO: 24769 - protein, 417 aa, Neisseria meningitidis; identical to SEQ ID NO: 4662

SEQ ID NO: 24770 - protein, 444 aa, Neisseria meningitidis; identical to SEQ ID NO: 2522

SEQ ID NO: 24771 - protein, 352 aa, Neisseria meningitidis
MSSRKIIHIDMDAFYASVELREQPHLKGRPVVVAWEGARSVICAASYEARQFGLHSAMSVATAKRLCPQAVYVPPHFDLYRQVSAQIHAVFRRYTDLIEPLSLDEAYLDVTRNFKNIPYASEVAKEIRAAIFAETGLTASAGIAPNKFLAKIASDWRKPNGQFVLPPHKVMAFLETLPLGKIPGVGKVTLKKMQSLGMRTAGDLRRFERGELLNHFGRYGYRLYDLARGTDERPVKAERERLQISTEITLPEDLPLEQAAGHLPHLAEDLWRQITRKNVEAQSVTLKLKTYDFRIITRTLTYSSVLPDCASLLQAAQMLMARVPPQTEDAFRLIGIGVGHLVPKNQQQDLWA

SEQ ID NO: 24772 - protein, 472 aa, Neisseria meningitidis
MSIKNAVKLIEESEARFVDLRFTDTKGKQHHFTVPARIVLEDPEEWFENGQAFDGSSIGGWKGIQASDMQLRPDASTAFVDPFYDDVTVVITCDVIDPADGQGYDRDPRSIARRAEAYLKSSGIGDTAYFGPEPEFFVFDGVEFETDMHKTRYEITSESGAWSSGLHLDGQNTGHRPTVKGGYAPVAPIDCGQDLRSAMVNILEELGIKVEVHHSEVGTGSQMEIGTRFATLVKRADQTQDMKYVIQNVAHNFGKTATFMPKPIMGDNGSGMHVHQSIWKDGQNLFAGDGYAGLSDTALYYIGGIIKHAKALNAITNPSTNSYKRLVPHFEAPTKLAYSAKNRSASIRIPSVNSSKARRIEARFPDPTANPYLAFAALLMAGLDGIQNKIHPGDPADKNLYDLPPEEDALVPTVCASLEEALAALKADHEFLLRGGVFSKDWIDSYIAFKEEDVRRIRMAPHPLEFEMYYSL

SEQ ID NO: 24773 - protein, 65 aa, Neisseria meningitidis; identical to SEQ ID NO: 9839

SEQ ID NO: 24774 - protein, 126 aa, Neisseria meningitidis; identical to SEQ ID NO: 6506

SEQ ID NO: 24775 - protein, 244 aa, Neisseria meningitidis; identical to SEQ ID NO: 19600

SEQ ID NO: 24776 - protein, 313 aa, Neisseria meningitidis; identical to SEQ ID NO: 18749

SEQ ID NO: 24777 - protein, 293 aa, Neisseria meningitidis
MPSENTLFPLPDTLLRPMVEQALSEDLGRRGDITSAAVIAPEKTAKLFLVSREDGVIAGMDLARLAFQTMDPSVRFQAEIRDGQVVRAGQTLAAVEGNARALLAAERTALNYLTHLSGIATATARAVAEVAEYGTDIVCSRKTIPLLRVLQKYAVRAGGGVNHRMGLDDAVLIKDNHLAYCGSIAQAVRQAKQAVGPLTCVEIEVDTLAQLDEAIAAGAERILLDNMDDETLKEAANRCHTQTAHPHTVYCEASGGIGFDRLKRVAQTGVDGIALGYLTHSSRSLDIGLDFLA

SEQ ID NO: 24778 - protein, 333 aa, Neisseria meningitidis
MQFPYRNVPASRMRRMRRDDFSRRLMREHTLTADDLIYPVFVLEGSAREEDVPSMQGVKRQSLDRLLFTAEEAVKLGIPMLALFPVVTANKTERAQEAYNPEGLVPSTVRALRERFPELGIMTDVALDPYTVHGQDGLTDENGYVMNDETVEVLVKQALCHAEAGAQVVAPSDMMDGRIGAIREALEDAGHIHTLIMAYSAKYASAFYGPFRDAVGSSGNLGKADKKTYQMDPANTDEALHEVALDIQEGADMVMVKPGLPYLDVVRRVKDEFGVPTYAYQVSGEYAMLQAAVANGWLDGDKVVLESLLAFKRAGADGILTYYAIEAAKMLKR

SEQ ID NO: 24779 - protein, 81 aa, Neisseria meningitidis; identical to SEQ ID NO: 2079

SEQ ID NO: 24780 - protein, 470 aa, Neisseria meningitidis; identical to SEQ ID NO: 14842

SEQ ID NO: 24781 - protein, 218 aa, Neisseria meningitidis; identical to SEQ ID NO: 19582

SEQ ID NO: 24782 - protein, 204 aa, Neisseria meningitidis; identical to SEQ ID NO: 504

SEQ ID NO: 24783 - protein, 57 aa, Neisseria meningitidis; identical to SEQ ID NO: 6070

SEQ ID NO: 24784 - protein, 433 aa, Neisseria meningitidis; identical to SEQ ID NO: 2404

SEQ ID NO: 24785 - protein, 114 aa, Neisseria meningitidis; identical to SEQ ID NO: 565

SEQ ID NO: 24786 - protein, 392 aa, Neisseria meningitidis; identical to SEQ ID NO: 19267

SEQ ID NO: 24787 - protein, 125 aa, Neisseria meningitidis; identical to SEQ ID NO: 348

SEQ ID NO: 24788 - protein, 394 aa, Neisseria meningitidis
MSLHSDILVVGAGPAGLSFAAELAGSGLKVTLIERSPLTVLQNPPYDGREIALTHFSREIMQRLGMWDKIPENEIYPLRDAKVLNGRSDYQLHFPQPTEARGEPADCLGYLISNHNIRRAAYEVVSQLDNVSILTDTVVKEVKTSDNEAQVILENGKILTARLLLAADSRFSQTRRQLGISSDMHDYSRTMFVCRMKHTLSNQHTAYECFHYGRTIALLPLEEHLTNTVITVDTDKINSVQNLSPEELAASVKEQLKARLGDMELVSSIHHYPLVGMIAKRFYGKRSALIGDAAVGMHPVTAHGFNLGLSSADILAKLILEAEQRGQDIGAASLLEKYSSKHMLHAHPLYHGTNMMLKLFTNETAPAKLLRGLVLRAGNNFPPLKKLITKQLTG

SEQ ID NO: 24789 - protein, 119 aa, Neisseria meningitidis; identical to SEQ ID NO: 3183

SEQ ID NO: 24790 - protein, 239 aa, Neisseria meningitidis; identical to SEQ ID NO: 18283

SEQ ID NO: 24791 - protein, 473 aa, Neisseria meningitidis; identical to SEQ ID NO: 719

SEQ ID NO: 24792 - protein, 109 aa, Neisseria meningitidis; identical to SEQ ID NO: 2887

SEQ ID NO: 24793 - protein, 458 aa, Neisseria meningitidis; identical to SEQ ID NO: 2678

SEQ ID NO: 24794 - protein, 324 aa, Neisseria meningitidis
MDTLTRFLPEHLQQNQLPEALGGVLLSVVSACTEINAKVRLGALAGVLGMAGTGNIQGEDQKKLDVIANNIMIDTLKANPAVAGLASEEEDSFVSAGENGRYLVLFDPLDGSSNIDVNISVGTIFSILEKPEGALATESFLQTGRQQLAAGYILYGPQTQLVFTFGHGVYMFTLNAENEFVLTKEKPKVPESTKEFAINMSNRRHWLPPVQQYIDELLAGETGTRGKNYNMRWVASMVAEIHRILMRGGVFMYPQDKRDPSKPGKLRLMYEANPMSLILEQAGASASNAYQAMLDIQPENLHQRVAVFMGSSEEVAYLDRLHAK

SEQ ID NO: 24795 - protein, 171 aa, Neisseria meningitidis; identical to SEQ ID NO: 18791

SEQ ID NO: 24796 - protein, 88 aa, Neisseria meningitidis; identical to SEQ ID NO: 255

SEQ ID NO: 24797 - protein, 397 aa, Neisseria meningitidis; identical to SEQ ID NO: 18337

SEQ ID NO: 24798 - protein, 477 aa, Neisseria meningitidis
MSQYDVVVIGAGPGGYVAAIRAAQLGFKTACVDAGVNKAGNAPALGGTCLNVGCIPSKALLQSSEHFHAAQHEFAEHGITVGDIKFDAAKMIERKDAIVTKLTGGVKFLFQKNKVTSLFGTASFAGKNGDAYQIEVDNKGEKTVIEAKHVIVATGSVPRPLPQVAIDNVNVLDNEGALNLTEVPAKLGVIGSGVIGLEMGSVWNRVGAEVTILEAAPTFLAAADQQIAKEAFKYFTKEQGLNIELGVKIGDIKSEGKGVSVAYETAAGEAKTEVFDKLIVAIGRIPNTKGLNAEAVGLEKDERGFIKVDGECRTNLPNVWAIGDVVRGPMLAHKASDEGVAVAERIAGQKPHIDFNNVPFVIYTDPEIAWVGKTEEQLKAEGVEYKKGTSGFGANGRALAMGKAKGTVKVLADAKTDRILGVHMIGPVVSELVTEGVTALEFFASSEDIARIIHAHPTLSEVVHEAALAADKRALHG

SEQ ID NO: 24799 - protein, 487 aa, Neisseria meningitidis; identical to SEQ ID NO: 9402

SEQ ID NO: 24800 - protein, 223 aa, Neisseria meningitidis; identical to SEQ ID NO: 19689

SEQ ID NO: 24801 - protein, 601 aa, Neisseria meningitidis
MKKLICLFAVFLMLCGRAFALDANDLLPPEKAFVPELAVADDGVNVRFKIADGYYMYQAKIVGKTDPADLLGQPSFSKGEEKEDEFFGRQTVYHHEAQVAFPYAKAVGEPYKLVLTYQGCAEAGVCYPPVDTEFDISGNGTYHPQTDEPASAKDRFLQPSSQNGSGALPPPKGDEGGDSRFKLSWDTLNANLLAFFLAGLGLSFTACMYPLLPIVSSIVVGDKKAGKARAFVLSVVYVQGLALTYTLVGIVAGLTGALLTVWLQQAWVVLAASALMVVLALSMFGLFNIQLPNAVQSYFQNQSSRLSGGKIVSVFIMGILSALIVGPCVAPPLAFALGYIGQTGDAVLGGLALYTLALGTGVPLIAIGTFGGHILPKAGDWMNAVKYAFGFILLAVAVYLATPHLPYYLVVALYTLLMLVPACMLLVNGRRQKRRPKAVAFALGSILLIGGAWFGWQGANGKTTALHHFLTLNPPAEAGKSSEHGKMFADTAALKAAMDTALKEHPDKPVVLDFYADWCISCKEMAAYTLNQPEVHQAVDMERFFQIDVTANTPEHQALLKEYGLFGPPGVFVVRSDGSRSEPLLGFVKADKFIEWYEQNR

SEQ ID NO: 24802 - protein, 145 aa, Neisseria meningitidis; identical to SEQ ID NO: 14768

SEQ ID NO: 24803 - protein, 256 aa, Neisseria meningitidis
VSETQNEQPVQPLVEHLIELRRRLMWTVVGILVCFFGLMPFAQQLYTFIADPLMANLPKDTSMIATDVIAPFFVPVKVTLMAAFLISLPHTLYQIWAFVAPALYQNEKRLITPLVLSSVSLFFIGMAFAYFLVFPVIFKFLASVTPVGVNMATDIDKYLSFILGMFVAFGTTFEVPIVVILLTKISVVTTGQLKRARPYVIVGAFVIAAIITPPDVISQTLLAIPLILLYEAGIWFGRFFTPRSEQDGDIQPPATT

SEQ ID NO: 24804 - protein, 1992 aa, Neisseria meningitidis
MNKGLHRIIFSKKHSTMVAVAETANSQGKGKQAGSSVSVSLKTSGDLCGKLKTTLKTLVCSLVSLSMVLPAHAQITTDKSAPKNQQVVILKTNTGAPLVNIQTPNGRGLSHNRYTQFDVDNKGAVLNNDRNNNPFVVKGSAQLILNEVRGTASKLNGIVTVGGQKADVIIANPNGITVNGGGFKNVGRGILTTGAPQIGKDGALTGFDVRQGTLTVGAAGWNDKGEADYTGVLARAVALQGKLQGKNLAVSTGPQKVDYASGEISAGTAAGTKPTIALDTAALGGMYADSITLIANEKGVGVKNAGTLEAAKQLIVTSSGRIENSGRIATTADGTEASPTYLSIETTEKGAAGTFISNDGRIESKGLLVIDTGEDIGLRNGAVVQNNGNRPAATVLNAGRNLVIESKANVNNAKGSTNLSTGGRTVIKEASIQTGTTVYSSSKGNAELGNNTRITGADVTVLSNGTISSSAVIDAKDTAHIEAGKPLSLEASTVTSDIRLNGGSIKGGKQLALLADDNITAKTTNLNTPGNLYVHTGKDLNLNVDKDLSAASIHLKSDNAAHITGTSKTLTASKDMGVEAGSLNVTNTNLRTNSGNLHIQAAKGNIQLRNTKLNAAKALETTALQGNIVSDGLHAVSADGHVSLLANGNADFTGHNTLTAKADVNAGSVGKGRLKADNTNITSSSGDITLVAGNGIQLGDGKQRNSINGKHISIKNNGGNADLKNLNVHAKSGALNIHSDRALSIENTKLESTHNTHLNAQHERVTLNQVDAYAHRHLSITGSQIWQNDKLPSANKLVANGVLALNARYSQIADNTTLRAGAINLTAGTALVKRGNINWSTVSTKTLEDNAELKPLAGRLNIEAGSGTLTIEPANRISAHTDLSIKTGGKLLLSAKGGNAGAPSAQVSSLEAKGNIRLVTGETDLRGSKITAGKNLVVATTKGKLNIEAVNNSFSNYFPTQKAAELNQKSKELEQQIAQLKKSSPKSKLIPTLQEERDRLAFYIQAINKEVKGKKPKGKEYLQAKLSAQNIDLISAQGIEISGSDITASKKLNLHAAGVLPKAADSEAAAILIDGITDQYEIGKPTYKSHYDKAALNKPSRLTGRTGVSIHAAAALDDARIIIGASEIKAPSGSIDIKAHSDIVLEAGQNDAYTFLKTKGKSGKIIRKTKFTSTRDHLIMPAPVELTANGITLQAGGNIEANTTRFNAPAGKVTLVAGEELQLLAEEGIHKHELDVQKSRRFIGIKVGKSNYSKNELNETKLPVRVVAQTAATRSGWDTVLEGTEFKTTLAGADIQAGVGEKARVDAKIILKGIVNRIQSEEKLETNSTVWQKQAGRGSTIETLKLPSFESPTPPKLSAPGGYIVDIPKGNLKTEIEKLAKQPEYAYLKQLQTAKNVDWKQVQLAYDKWDYKQEGLTGAGAAIVVIIVTALTYGYGAAAAGSVTAAGSSTAAAATTTAAATTTVSTAAAMQTAALASLYSQAAVAIINNKGDVGKALKDLGTSDTVKQIVTSALTAGALNQMGADIAQLNSKVRTELFSSTGNQTIANLGGRLATNLSNAGISAGINTAVNGGSLKDNLGNAALGALVNSFQGEAASKIKTTFSDDYVAKQFAHALAGCVSGLVQGKCKDGAIGAAVGEIVAESILGGRNPATLSDAEKHKVISYSKIIAGSVAALNGGDVNTAANAAEVAVVNNALNFDSTPTNAKKHQPQKPDKTALEKIIQSIMPAHAAGAMTNPQDKDAAIWISNIRNGITGPIVITSYGVYAAGWTAPLIGTAGKLAISTCMANPSGCTVMVTQAAEAGAGIATGAVTVGNAWEAPVGALSKAKAAKQAAPKETINNLANLAKAEQQILFRIAQRDTQLDAWKTGFNNRVRKGAGLLDASNIPITINGKTIKPVQAISLKGAPVYSGVSEQEIFALYRQMTGQNPNFRVLPDGRLANGIISTGEWAGTKIALRNFSKTENSTQARWTLDLQNPPSFIKGTKLELKFQ

SEQ ID NO: 24805 - protein, 100 aa, Neisseria meningitidis; identical to SEQ ID NO: 18276

SEQ ID NO: 24806 - protein, 99 aa, Neisseria meningitidis; identical to SEQ ID NO: 5781

SEQ ID NO: 24807 - protein, 485 aa, Neisseria meningitidis
MSRHPAPTGEKTFFGHPFQLSTLFHIELWERFSFYGMQGILLIYLYYTADKGGLGIDKTLAGGIVGAYSGSVYLSTILGAWFADRVWGAEKTLFLSGIVVMLGHIVLAAAPGLYGLLIGLIFIALGSGGVKSTASSMVGALYEQDEMRPLRDAGFSIFYIAINIGGFLGPLLTGLLQENIGFHYGFGAAAVGMAFGLWRYSLGRKNLPHPTVPHPLSKGQGKTAAAVGITLIAALATAIKTGLVNLDNFSGILLSTVILAVIAYFARLLTNPRVSSDNKRHIIAYIPLFLTICMFWAVWFQIYTVATVYFDETVNRTIGSFTVPVAWKDSMQSLWVILFSGLMAAMWTKMGRKQPKTPLKFAMAVFVTGASFLGFVPFISAGTPMPIAVFALIVLAITIGELMISPIALSISTKIAPPLFKTQMVALNFLAFSLGFTLGGVLFEKGYQAGDEIGFYRLLFYIGATTGFLLLLLVPKLNKMLEGTD

SEQ ID NO: 24808 - protein, 319 aa, Neisseria meningitidis; identical to SEQ ID NO: 18435

SEQ ID NO: 24809 - protein, 187 aa, Neisseria meningitidis; identical to SEQ ID NO: 2230

SEQ ID NO: 24810 - protein, 191 aa, Neisseria meningitidis; identical to SEQ ID NO: 18411

SEQ ID NO: 24811 - protein, 287 aa, Neisseria meningitidis; identical to SEQ ID NO: 18747

SEQ ID NO: 24812 - protein, 221 aa, Neisseria meningitidis; identical to SEQ ID NO: 109

SEQ ID NO: 24813 - protein, 397 aa, Neisseria meningitidis; identical to SEQ ID NO: 19122

SEQ ID NO: 24814 - protein, 174 aa, Neisseria meningitidis
VLDREGYRPNVGIILINNRDEVFWGKRVREHSWQFPQGGIKPGESPETAMYRELYEEVGLLPQHVKIIGRTRDWLRYDVPNNWVRREWRGSYRGQKQIWYLLRLTGRDCDVNLRATRHPEFDGWRWHQYWAPVDEVIDFKRDVYLGALKELSSRFLRGMESYEDFAARQSSDNR

SEQ ID NO: 24815 - protein, 102 aa, Neisseria meningitidis; identical to SEQ ID NO: 1826

SEQ ID NO: 24816 - protein, 864 aa, Neisseria meningitidis
MSKSAVSPMMQQYLGIKAQHTDKLVFYRMGDFYEMFFDDAVEAAKLLDITLTTRGQVDGEPVKMAGVPFHAAEQYLARLVKLGKSVAICEQVGEVGAGKGPVERKVVRIVTPGTLTDSALLEDKETNRIVAVSPDKKYIGLAWASLQSGEFKTKLTTVDKLDDELARLQAAEILLPDSKNAPQLQTASGVTRLNAWQFAADAGEKLLTEYFGCQDLRGFGLDGKEHAVAIGAAGALLNYIRLTQNLMPQHLDGLSLETDSQYIGMDAATRRNLEITQTLSGKKSPTLMSTLDLCATHMGSRLLALWLHHPLRNRAHIRARQEAVAALESQYKPLQCRLKNIADIERIAARIAVGNARPRDLASLRDSLFELAQIDLSANGSSLLETLKAVFPENLSTAEQLRQAILPEPSVWLKDGNVINHGFHPELDELRRIQNHGDEFLLDLEAKERERTGLSTLKVEFNRVHGFYIELSKTQAEQAPADYQRRQTLKNAERFITPELKAFEDKVLTAQEQALALEKQLFDGVLKNLQTALPQLQKAAKAAAALDVLSTFSALAKERNFVRPEFADYPAIHIENGRHPVVEQQVRHFTANHTNLDHKHRLMLLTGPNMGGKSTYMRQVALIVLLAHTGCFVPADAATIGPIDQIFTRIGASDDLASNRSTFMVEMSETAYILHHATEQSLVLMDEVGRGTSTFDGLALAHAVAEHLLQKNKSFSLFATHYFELTYLPEAHAAAVNMHLSALEQGQDIVFLHQIQPGPAGKSYGIAVAKLAGLPVRALKSAQKHLNELENQAAANRPQLDIFSTMPSEKGDEPNVGNFVDKAEEKHFEGILAAALEKLDPDSLTPRKALSELYRLKDLCKSVS

SEQ ID NO: 24817 - protein, 318 aa, Neisseria meningitidis; identical to SEQ ID NO: 3574

SEQ ID NO: 24818 - protein, 597 aa, Neisseria meningitidis; identical to SEQ ID NO: 8838

SEQ ID NO: 24819 - protein, 206 aa, Neisseria meningitidis; identical to SEQ ID NO: 1725

SEQ ID NO: 24820 - protein, 159 aa, Neisseria meningitidis; identical to SEQ ID NO: 22445

SEQ ID NO: 24821 - protein, 200 aa, Neisseria meningitidis; identical to SEQ ID NO: 19173

SEQ ID NO: 24822 - protein, 158 aa, Neisseria meningitidis; identical to SEQ ID NO: 6684

SEQ ID NO: 24823 - protein, 248 aa, Neisseria meningitidis
MNVLISNDDGYLSEGIAVLARVTAEFANVRVVAPERDRSGVSNSLTLERPLQLKQAQNGFYYVNGTPTDCIHIGQSVFSDFQADFVFSGINRGANMGDDTLYSGTVAAATEAYLMGIPAVAFSLNDASGRYWATAEKALWTLLAHFFKTPPQFPILWNINIPAVAPEDVRGIKIARLGRRHHGQNVIPARNPRGEQIYWIGPVGRVSDKEEGTDFGECGAGFITVTPLQIDLTAYPDMAETAVFWHAD

SEQ ID NO: 24824 - protein, 675 aa, Neisseria meningitidis
LSLSEFIERRTSFNPMVILTTLFFVCVLVVLVLTVPDQVQMWLDRAKEVIFTEFGWFYVLTFSIFLGFLLILSVSSLGNIRLGRDEDVPEFGFLSWLAMLFAAGMGVGLMFFGVAEPLMHYFSDITAGTPEHRQQQALLHTVFHWGVHAWSVYGTIALALAYFGFRYKLPLALRSCFYPLLKEKISGRFGDAIDIMALLATFFGIITTLGFGASQLGAGLQEMGWIAENSFSVQVLIIAAVMSLAVVSAISGVGKGVKVLSELNLSLAFLLLFFVLAAGPTVYLLSAFGDNIGNYLGNLVRLSFKTYAYEREHKPWFESWTVLYWAWWCSWAPFVGLFIARISKGRTIREFVFGVLLIPGLFGVLWFTVFGNTAIWLNDGVAGGMLEKMTSSPETLLFKFFNYLPLPELTSIVSLLVISLFFVTSADSGIYVLNNITSRDKGLSAPRWQAVMWGVLMSAVAVLLMRSGGLGNLQSMTLIVSLPFALLMLIMCFSLWKGLSADKKYFETRVNPTSVFWTGGKWKERLVQIMSQTQEQDILKFLKHTASPAMHELQRELSEEYGLSVRVDKMFHQDEPAIEFVIRKETMRDFMYGIKSVGQDVSDQLINDGKLPHIRHQTTYKPYAYFFDGRVGYDVQYMNKDELIADILKNYERYLMLLDDVGQELMAHEQVELAE

SEQ ID NO: 24825 - protein, 186 aa, Neisseria meningitidis
MSYQDILRGLLPPVSYARNAPRVRAQAEIDGAALDAVAESAQSVADAVDPSSAGQMLADWERVLGLDGTGKNRQRRVLAVMAKLNETGGLSIPYFVRLAEAAGYQIQIDEPQPFRAGVNRAGDRLAPQEIMWVWHVNVRGGNNRITRFRAGISAAGDRLTDYSDAVIESLFNRLKPAHTAIRFTYR

SEQ ID NO: 24826 - protein, 237 aa, Neisseria meningitidis; identical to SEQ ID NO: 6270

SEQ ID NO: 24827 - protein, 251 aa, Neisseria meningitidis; identical to SEQ ID NO: 4289

SEQ ID NO: 24828 - protein, 149 aa, Neisseria meningitidis; identical to SEQ ID NO: 4552

SEQ ID NO: 24829 - protein, 545 aa, Neisseria meningitidis; identical to SEQ ID NO: 775

SEQ ID NO: 24830 - protein, 481 aa, Neisseria meningitidis; identical to SEQ ID NO: 18290

SEQ ID NO: 24831 - protein, 351 aa, Neisseria meningitidis
MTILSDVKALGQQIWLDNLSRSLVQSGELAQMLKQGVCGVTSNPAIFQKAFAGDALYADEIAALKQQNLSPKQRYETMAVADVRAACGVCLAEHESTGGKTGFVSLEVSPELSKDAQGTVEEARRLYAAIGCKNAMIKVPATDAGIDALEILVSDGISVNLTLLFSRAQTLKAYAAYARGIAKRLAAGQSVAHIHVVASFFISRVDGALDTTLPDRLKGKIAIALAKAAYQDWAQYFGSSEFAALEAQGANRVQLLWASTGVKNPAYPDTLYVDSLIGAHTVNTVPDATLKAFIDHGTAKATLTEGVEEAQAQLAETAALGIDVETLAARLQEDGLKQFEEAFEKLLAPLV

SEQ ID NO: 24832 - protein, 123 aa, Neisseria meningitidis; identical to SEQ ID NO: 130

SEQ ID NO: 24833 - protein, 201 aa, Neisseria meningitidis; identical to SEQ ID NO: 2273

SEQ ID NO: 24834 - protein, 445 aa, Neisseria meningitidis; identical to SEQ ID NO: 18905

SEQ ID NO: 24835 - protein, 498 aa, Neisseria meningitidis; identical to SEQ ID NO: 1489

SEQ ID NO: 24836 - protein, 305 aa, Neisseria meningitidis; identical to SEQ ID NO: 1198

SEQ ID NO: 24837 - protein, 239 aa, Neisseria meningitidis; identical to SEQ ID NO: 3265

SEQ ID NO: 24838 - protein, 467 aa, Neisseria meningitidis
MKKIQADVVVIGGGTAGMGAFRNARLHSDNVYLIENNVFGTTCARVGCMPSKLLIAAAEARHHALHTDPFGVHLDKDSIVVNGEEVMQRVKSERDRFVGFVVADVEEWPADKRIMGSAKFIDEHTVQIDDHTQITAKSFVIATGSRPVILPQWQSLGDRLIINDDVFSWDTLPKSVAVFGPGVIGLELGQALHRLGVKVEIFGLGGIIGGISDPVVSDEAKAVFGEELKLHLDAKTEVKLDADGNVEVYWEQDGEKGVFVAEYMLAAVGRRPNVDNIGLENINIDKDARGVPVADPLTMQTSIPHIFIAGDASNQLPLLHEAADQGKIAGDNAGRYPNIGGGLRRSTIGVVFTNPQIGFVGLKYAQVTAQYQPDEFVIGEVSFKNQGRSRVMLVNKGHMRLYAEKATGRFIGAEIVGPAAEHLAHLLAWAHQMKMTVPQMLDMPFYHPVIEEGLRTALRDADAKLKA

SEQ ID NO: 24839 - protein, 61 aa, Neisseria meningitidis; identical to SEQ ID NO: 19332

SEQ ID NO: 24840 - protein, 1456 aa, Neisseria meningitidis
MKTTDKRTTETHRKAPKTGRIRFSPAYLAICLSFGILPQAWAGHTYFGINYQYYRDFAENKGKFAVGAKDIEVYNKKGELVGKSMTKAPMIDFSVVSRNGVAALVGDQYIVSVAHNGGYNNVDFGAEGSNPDQHRFSYQIVKRNNYKAGTNGHPYGGDYHMPRLHKFVTDAEPVEMTSYMDGWKYTDQNNYPDRVRIGAGRQYWRSDEDEPNNRESSYHIASAYSWLVGGNTFAQNGSGGGTVNLGSEKIKHSPYGFLPTGGSFGDSGSPMFIYDAQKQKWLINGVLQTGNPYIGKSNGFQLVRKDWFYDEIFAGDTHSVFYEPRQNGKYSFNDDNNGTGKINAKHEHNSLPNRLKTRTVQLFNVSLSETAREPVYHAAGGVNSYRPRLNNGENISFIDEGKGELILTSNINQGAGGLYFQGDFTVSPENNETWQGAGVHISEDSTVTWKVNGVANDRLSKIGKGTLHVQAKGENQGSISVGDGTVILDQQADDKGKKQAFSEIGLVSGRGTVQLNADNQFNPDKLYFGFRGGRLDLNRHSLSFHRIQNTDEGAMIVNHNATTTSTVTITGNESITQPSGKNINRLNYSKEIAYNGWFGEKDATKTNGRLNLVYQPAAEDRTLLLSGGTNLNGNITQTNGKLFFSGRPTPHAYNHLNNHWSQKEGIPHGEIVWDNDWINRTFKAENFHIQGGQAVISRNVAKVEGDWHLSNHAQAVFGVAPHQSHTICTRSDWTGLTNCVENTITDDKVIASLTNTDISGNVDLANHAHLNLTGLATLNGNLTAGGDTHYEVTHNATQNGNLSLVGNAQATFNQAALNGNTSASGNASFNLSDHAAQNGDLTLSGNAKANVSHSAFNGNVSLADKAVFHFENSRLTGQISGGKDTALHLKDSEWTLPSGTELGNLNLDNATITLNSAYRHDAAGAQTGSATDAPRRRSRRSLLSVTPPASAESHFNTLTVNGKLNGQGTFRFMSELFGYRSDKLKLAESSEGTYTLAVNNTGNEPASLEQLTVVEGKDNKPLSENLNFTLQNEHVDAGAWRYQLIRKDGEFRLHNPVKEQELSDKLGKAEAKKQAEKDNAQSLDALIAAGRDAVEKTESVAEPARQAGGENVGIMQAEEEKKRVQADKDTALAKQSEAETRPATTAFRRARRARRDLPQPQPQPQPQPQRDLISRYANSGLSEFSATLNSVFAVQDELDRVFAEDRRNAVWTSGIRDTKHYRSQDFRAYRQQTDLRQIGMQKNLGSGRVGILFSHNRTENTFDDGIGNSARLAHGAVFGQYGIDRFYIGISAGAGFSSGSLSDGIGGKIRRRVLHYGIQARYRAGFGGFGIEPHIGATRYFVQKADYRYENVNIATPGLAFNRYRAGIKADYSFKPAQHISITPYLSLSYTDAASGKVRTRVNTAVLAQDFGKTRSAEWGVNAEIKGFTLSLHAAAAKGPQLEAQHSAGIKLGYRW

SEQ ID NO: 24841 - protein, 188 aa, Neisseria meningitidis; identical to SEQ ID NO: 7019

SEQ ID NO: 24842 - protein, 207 aa, Neisseria meningitidis; identical to SEQ ID NO: 243

SEQ ID NO: 24843 - protein, 662 aa, Neisseria meningitidis; identical to SEQ ID NO: 18772

SEQ ID NO: 24844 - protein, 157 aa, Neisseria meningitidis; identical to SEQ ID NO: 24452

SEQ ID NO: 24845 - protein, 488 aa, Neisseria meningitidis; identical to SEQ ID NO: 7364

SEQ ID NO: 24846 - protein, 291 aa, Neisseria meningitidis; identical to SEQ ID NO: 18797

SEQ ID NO: 24847 - protein, 107 aa, Neisseria meningitidis; identical to SEQ ID NO: 1793

SEQ ID NO: 24848 - protein, 461 aa, Neisseria meningitidis; identical to SEQ ID NO: 7704

SEQ ID NO: 24849 - protein, 69 aa, Neisseria meningitidis; identical to SEQ ID NO: 7188

SEQ ID NO: 24850 - protein, 979 aa, Neisseria meningitidis; identical to SEQ ID NO: 19857

SEQ ID NO: 24851 - protein, 208 aa, Neisseria meningitidis; identical to SEQ ID NO: 2285

SEQ ID NO: 24852 - protein, 157 aa, Neisseria meningitidis
MKKQITAAVMMLSMIAPAMANGLDNQTFENQVFHTQADAPMQLAELSQKEMKETEGAFLPIVAGALMGGAISAWANHGISKIKTGQFASTRSTLAATAGGMIGGGYSSAMLRGAGITTSVFARSAWKGGNAIPNAVIRANGAALNQSSSAAMGKHRR

SEQ ID NO: 24853 - protein, 365 aa, Neisseria meningitidis; identical to SEQ ID NO: 11

SEQ ID NO: 24854 - protein, 242 aa, Neisseria meningitidis
MIKFKNVHKHFKDLHVINGVNLEIKKGEVVVVCGPSGSGKSTLIRTVNQLESIESGEIWVDGVNVADPKTDLNKIREEVGFVFQSFNLYPHLTVLENITLAPMKVKGQNAEQAEKKAMELLERVGLAHKKDAFPSQLSGGQQQRVAIARGLAMEPRVMLFDEPTSALDPEMVGEVLKVMKDLAESGMTMMCVTHEMGFAREVADRVLFVDKGQILEDETPEAFFTNPKHERAKQFLQQVMTH

SEQ ID NO: 24855 - protein, 193 aa, Neisseria meningitidis; identical to SEQ ID NO: 1600

SEQ ID NO: 24856 - protein, 291 aa, Neisseria meningitidis
MAYLLISIVFSVSVSILLKMARKKKIDIAQAVAVNYVVAVILTLLVLKPDIGNIGAFLPTWPLFAALGVLLPSVFVIMGKSVEAAGIVKSDAAQRLSLFLPIVAALTLFGEKLSEGRLIGLCLAFAALFCLLWKHSGGKKSGSAWRQAALLLGVWAGYGIIDILFKQLAKSGTAFAGNLLVAFVLAGVLMFACLFAKSVRWRVESVVGGIFLGGLNFMNIVTYITAHQMMKDNPTLVFAGMNIGVIVLGTLSGALFFKEKINTINTAGIVLALCSIACLFYWGEVKVLFGI

SEQ ID NO: 24857 - protein, 122 aa, Neisseria meningitidis; identical to SEQ ID NO: 17939

SEQ ID NO: 24858 - protein, 330 aa, Neisseria meningitidis
MKKSLIALTLAALPVAAMADVTLYGTIKAGVETSRSVEHNGGQVVSVETGTGIVDLGSKIGFKGQEDLGNGLKAIWQVEQKASIAGTDSGWGNRQSFIGLKGGFGKLRVGRLNSVLKDTGDINPWDSKSDYLGVNKIAEPEARLISVRYDSPEFAGLSGSVQYALNDNAGRHNSESYHAGFNYKNGGFFVQYGGAYKRHQDVDDVKIEKYQIHRLVSGYDNDALHASVAVQQQDAKLVEDNYSHNSQTEVAATLAYRFGNVTPRVSYAHGFKGSFDDADLSNDYDQVVVGAEYDFSKRTSALVSAGWLQEGKGENKFVSTAGGVGLRHKF

SEQ ID NO: 24859 - protein, 223 aa, Neisseria meningitidis; identical to SEQ ID NO: 18434

SEQ ID NO: 24860 - protein, 243 aa, Neisseria meningitidis
LQDRTGQKVPSVVFRTRVGDTWKDVSTDDLFKGKKVVVFSLPGAFTPTCSSSHLPRYNELFGAFKENGVDAIYCVSVNDTFVMNAWAAEEESDNIYMIPDGNGEFTEGMGMLVGKEDLGFGKRSWRYSMLVNDGVVEKMFIEPEEPGDPFKVSDADTMLKFVAPNWKAQESVAIFTKPGCQFCAKAKQALQDKGLSYEEIVLGKDATVTSVRAITGKMTAPQVFIGGKYIGGSEDLEAYLAKN

SEQ ID NO: 24861 - protein, 807 aa, Neisseria meningitidis
LATLPLRDVVVYPHMVLPLFVGRPKSIAALENAITREEPVFLLAQTDAALEEPVAADLYQTGTVAQVLQVLKLPDGTVKVLVEGLYRGRVLTIEDTGGLFVSHIEAVVEEDTGGNTDLEAVRRTLLAQFEQYAKLNKKIPAEIIGSINGIAENSRLTDTVAAHLQLKLAQRQQILEIPEIGKRMEFLLAQLESELDIMQAEKRIRGRVKRQMEKSQREYYLNEQIKAIHKELGEEDENGELDALEAGIKKAGMSKEAEEKCLSELKKLKMMPPMSAESTVVRNYIDTLLELPWKKKSRVSKDIAKAGLVLDTDHYGLEKVKERILEYLAVQKRMDKLKGPILCLVGPPGVGKTSLGESIAKATGRKYVRMALGGVRDESEIRGHRRTYIGSMPGKILQNMAKAGVKNPLFLLDEIDKLGSDFRGDPASALLEVLDPEQNNKFADHYAEVDYDLSDVMFIATSNSLNIPTPLLDRMEIIRLSGYTEDEKINIAMQYLVPKQMKRNGVKEGELLVEESAVRDIIRYYTREAGVRSLDREIAKICRKVVMQITLDEDKKRLSETKKTSKAKPKAVKVNEKNLHDYLGVRRFDYGVAESENRIGQVTGLAWTEVGGELLTVEAAALPGKGVIQCTGQLGDVMKESVSAAWSVVRSRAESVGLASDFYEKKDIHVHVPEGATPKDGPSAGIAMTLAMVSAFSKIPVRADVAMTGEITLRGEVLPIGGLKEKLLAALRGGIKHVLIPKDNFKDLEEIPENVKTGLTIHPVKWIDEVLALGLESQPEPWAEPSGAEAVAESASKPKPRSRATKH

SEQ ID NO: 24862 - protein, 268 aa, Neisseria meningitidis; identical to SEQ ID NO: 18441

SEQ ID NO: 24863 - protein, 763 aa, Neisseria meningitidis
MLAPELEQILQQLYREARKAHYEFISLEHLLLVLIEEDASVHNVLKLCGADLKVVSEQLAASVAENTPLIPDHLLDTVETQPTLGFQRVIQRAMVHTQSAGKGLVEPLDVLVALMSETDSHAVYFLKLQSVTRFEVLRCIAHGSPDEDEDDGNYSSDGMDDDNENRTKPGKNPLSAYTVNLNAEVKAGRIDPLIGRKHEMERLVQILCRRRKNNPLLVGEAGVGKTALAEGLAHQIVNGGIPDALKDAEVYALDMGSLLAGTKYRGDFEARVKSVLKQLEKIPHAILFIDEIHTIIGAGSTSGGTMDASNLLKPALAKGSLRCIGATTYDEYRTIFDKDHALSRRFQKIDVVEPTVSETVQILRGLKPMFEAFHQVRYTQGALEAAAELSARYINERFLPDKAIDVMDEAGAAQRILPKSKQKKVIGKAQIETVIAKVARIPEKTVSHDDKQVLQFLGRDLKNMVYGQENAIDALVAAVKMSRSGLALPDKPIGSFLFSGPTGVGKTEAAKQLAYSLGVPLQRFDMSEYMERHAVSRLIGAPPGYVGFEQGGLLTEAVNKQPHCVLLLDEIEKAHPDIFNVLLQVMDAGKLTDNNGKSADFRNVILIMTTNAGAESLSRPSLGFTAKRERGDEMQAINKLFTPEFRNRLDAIIPFAPLSEPIIVKVVDKFLLQLEHQLLDKKVEAEFTSALHKYLAEKGFDPQMGARPMHRLIQEKIRKPLADELLFGKLSDGGFVRIDWDAAKEEAVLKFKKSKVKIKTASA

SEQ ID NO: 24864 - protein, 241 aa, Neisseria meningitidis; identical to SEQ ID NO: 19206

SEQ ID NO: 24865 - protein, 246 aa, Neisseria meningitidis; identical to SEQ ID NO: 18931

SEQ ID NO: 24866 - protein, 113 aa, Neisseria meningitidis; identical to SEQ ID NO: 1729

SEQ ID NO: 24867 - protein, 395 aa, Neisseria meningitidis; identical to SEQ ID NO: 3616

SEQ ID NO: 24868 - protein, 60 aa, Neisseria meningitidis; identical to SEQ ID NO: 18484

SEQ ID NO: 24869 - protein, 64 aa, Neisseria meningitidis
MNIILNGGPAELHGTTVADLIAQTAPQKPFAVAVNTGFVAKGAYAETVLNENDKIDIVRPVVGG

SEQ ID NO: 24870 - protein, 431 aa, Neisseria meningitidis
LSGVGKLARLGAKLSTRAVPYVGTALLAHDVYETFKEDIQAQGYQYDPETDKFVKGYEYSNCLWYEDKRRINRTYGCYGVDSSIMRLMSDDSRFPEVKELMESQMYRLARPFWNWHKEELNKLSSLDWNNFVLNRCTFNWNGGDCLVNKGDDFRNGADFSLIRNSKYKEEMDAKKLEEILSLKVDANPDKYIKATGYPGYSEKVEVAPGTKVNMGPVTDRNGNPVQVVATFGRDSQGNTTVDVQVIPRPDLTPGSAEAPNAQPLPEVSPAENPANNPNPNENPGTSPNPEPDPDLNPDANPDTDGQPGTRPDSPAVPDRPNGRDGEDGGLLCKFFPDILACDRLPEPNPAEDLNLPSETVNVEFQKSGIFQNSAQCPAPVTFTVTVLDSSRQFAFSFENACTIAERLRYMLLALAWAVAAFFCIRTVSREV

SEQ ID NO: 24871 - protein, 321 aa, Neisseria meningitidis
MSYTQLTQGERYHIQYLSRHCTVTEIAKQLNRHKSTISREIRRHRTQGQQYSAEKAQRQSRTIKQRKRQPYKLDSQLIQHIDPLIRRKLSPEQVCAYLCKHHQITLHHSTIYRYLRQDKSNGSTLWQHLRICSKPYRKRYGSTWTRGKVPNRVVIENRPAIVDQKSRIGDWEADTIVGKGQKSALLTLVERVTRYTIICKLDSLKAEDTARAAVRALKAHKDRVHTITMDNGKEFYQHTKITKALKAETYFCRPYHSWEKGLNENTNGLIRQYFPKQTDFRNISDREIRRVQDELNHRPRKTLGYETPSVLFLNLFQPLIH

SEQ ID NO: 24872 - protein, 206 aa, Neisseria meningitidis; identical to SEQ ID NO: 320

SEQ ID NO: 24873 - protein, 215 aa, Neisseria meningitidis
MKTKFYNHQGGHLILYFAGWGTPPDAVNHLILPENHDLLICYDYQDVNLDFDFSAYRHIRLVAWSMGVWAAERALQGIRLKSATAVNGTGLPCDDNFGIPFAVFKGTLENLTEDTRLKFERRICGDKASFEDYQQFPARPFDEIHQELTSLFKMIGQDRCTDLIRWTNALVGSGDKIFMPANQHRYWTPRCTVREIDGGHYLFSRFTHWSALWNH

SEQ ID NO: 24874 - protein, 125 aa, Neisseria meningitidis; identical to SEQ ID NO: 535

SEQ ID NO: 24875 - protein, 238 aa, Neisseria meningitidis
MKTKLPLFIIWLSVSAACSSPVSRNIQDMRPEPQAEAGSSDAIPYPVPTLQDRLDYLEGKIVRLSNEVETLNGKVKALEHAKTHPSGRTYVQKLDDRKLKEHYLNTEGGSASAHTVETAQNLYNQALKHYKSGRFSAAAALLKGADGGDGGSIAQRSMYLLLQSRARMGNCESVIEIGGRYANRFKDSPTAPEAIFKIGECQYRLQQKDIARATWRSLIQAYPGSPAAKRAASAIRKR

SEQ ID NO: 24876 - protein, 431 aa, Neisseria meningitidis
MAQKIQSVKGMNDLLPVEQKDFKLTAAFWQVFEDTVNRWTRAYGYQQIRTPIVEQTGLFVRSIGEETDVVGKEMYTFSDSNDSLSLSLRPEGTASCLRAVVEHNLLYNSPQKLWYMGPMFRRERPQKGRYRQFHQVGIEALGFEGPDIDAEIIAMSADLWEKLGIREYLTLEINSLGNREERAAHRAALVEYLTRYEDKLDEDSKRRLKTNPLRVLDTKNPDLQEICNAAPRLVDYLGEASQNHYARFKAMLDGLGIQYIENPRLVRGLDYYNQTVFEWTTDKLGAQATVCGGGRYDGLIEELGGKPAPSIGFAMGIERLLLLVSEYGSLEVNAAPDVYAMHQGERADLQVMKYAQALRAQGFNVMQHSGYQSLKAQMKKADNSGARFALIVAQDELANGTVTLKDMNGAHGQQTVAAEDLTHTLQQWKNA

SEQ ID NO: 24877 - protein, 47 aa, Neisseria meningitidis; identical to SEQ ID NO: 2624

SEQ ID NO: 24878 - protein, 223 aa, Neisseria meningitidis; identical to SEQ ID NO: 2385

SEQ ID NO: 24879 - protein, 96 aa, Neisseria meningitidis; identical to SEQ ID NO: 3537

SEQ ID NO: 24880 - protein, 244 aa, Neisseria meningitidis; identical to SEQ ID NO: 7175

SEQ ID NO: 24881 - protein, 528 aa, Neisseria meningitidis
MALFLSIFPIVLLIWLMVKKNSMPSYVALPITAVLIYAIKLFYFGDAGMLLNATAASGLVKTLTPITVIFGAIMFNRMMETTGCIDVIRKWLATISPNPVAQLMIIGWAFAFMIEGASGFGTPAAIAAPILMSLGFNPLKVAIFTLVMNSVPVSFGAVGTPTWFGFAPLNLSAEDILAIGRQTGVMHFFAGFVIPVIGLGFIVPWSEIRKNLGFVAIAVFSCTIPYVALAMVNEEFPSLVAGAIGLMVSVFAANQGWGLSKDHAKDPNAEKVPFAQVAKALAPLGMLIGMLVVTRIKQLGIKGILTSKEEWFSFQLPFDLSKITVSDSLTITFGNIFGQDVSASYQTLYVPAWIPFVLTVWICILLYKTKFKDAWTIYAVTFNQTKKPLLALMGALIMVQLMLVGGDNSMVKIIGKEFAAMAGEHWVYFSPYLGAIGAFFSGSNTVSNLTFGPIQQQIALDTGLSVTLILALQSVGGAMGNMVCLNNIIAVCTVLDVKNSEGAIIKKTVIPMAIYGVIAVVAAMIFFL

SEQ ID NO: 24882 - protein, 156 aa, Neisseria meningitidis; identical to SEQ ID NO: 18642

SEQ ID NO: 24883 - protein, 255 aa, Neisseria meningitidis
MQTRILSAVLLAFSTAAFAGGAFTLQFDNPSEDGGFTQNQLLSAPYGFGCSGGNASPALSWKNPPAGTKSFVLTVYDKDAPTGLGWMHRVVADIPADVHRRNATSLQLSRCANIADRTGLDALGGRRHSRRCPPPQRGLAAIKPLRQHRRRPVRSHIGGNQFADLPHQVDAFVHGKTDAVMLQPRQHAAKRDLRRIVRHFFIRQHRRRIIKRRAHPPGVRQLHRIAHCLRRPVLCGEPFYGFLFESNPLRLIEAV

SEQ ID NO: 24884 - protein, 72 aa, Neisseria meningitidis; identical to SEQ ID NO: 1579

SEQ ID NO: 24885 - protein, 103 aa, Neisseria meningitidis; identical to SEQ ID NO: 1510

SEQ ID NO: 24886 - protein, 122 aa, Neisseria meningitidis; identical to SEQ ID NO: 2347

SEQ ID NO: 24887 - protein, 260 aa, Neisseria meningitidis; identical to SEQ ID NO: 6334

SEQ ID NO: 24888 - protein, 391 aa, Neisseria meningitidis
MKRQTLAALIASVFALAACGEQAAKPAETPAATASAEAPAASNSQAAAETPSSELPVIDAIVTHAPEVPPPTDRDHPAKVRVKMETVEKTMKMDDGVEYHYWTFDGDVPGRMIRVREGDTVEVEFSNNPSSTVPHNVDFHAATGQGGGAAATFTAPGRTSTFSFKALQAGLYIYHCAVAPVGMHIANGMYGLILVEPKEGLPKVDKEFYIVQGDFYTKGKKGAQGLQPFDMDKAIAEQPEYVVFNGHVGSIAGDNALKAKAGETIRMYVGNGGPNLVSSFHVIGEIFDKVYVEGGKLINENVQSTIVPAGGSAIVEFKVDIPGSYTLVDHSIFRAFNKGALGQLKVEGEENPEIMTQKLSDTAYAGNGAASAASAPAASAPAASASEKSVY

SEQ ID NO: 24889 - protein, 213 aa, Neisseria meningitidis; identical to SEQ ID NO: 5657

SEQ ID NO: 24890 - protein, 735 aa, Neisseria meningitidis; identical to SEQ ID NO: 19384

SEQ ID NO: 24891 - protein, 166 aa, Neisseria meningitidis; identical to SEQ ID NO: 1498

SEQ ID NO: 24892 - protein, 140 aa, Neisseria meningitidis; identical to SEQ ID NO: 2178

SEQ ID NO: 24893 - protein, 74 aa, Neisseria meningitidis; identical to SEQ ID NO: 15629

SEQ ID NO: 24894 - protein, 468 aa, Neisseria meningitidis; identical to SEQ ID NO: 13408

SEQ ID NO: 24895 - protein, 112 aa, Neisseria meningitidis; identical to SEQ ID NO: 191

SEQ ID NO: 24896 - protein, 335 aa, Neisseria meningitidis
MSTFFQQTAQAMIAKHIDRFPLLKLDQVIDWQPIEQYLNRQRTRYLRDHRGRPTYSLLSMFKSVLLGQWHSLSDPELEHSLITRIDFNLFCRFAELSIPDYSTLCRYRNWLAQDDTLSELLKLINRQLTEKGLKVEKASAAVVDATIIQTAGSKQRQAIEVDEEGQISGQTTPSKDSDARWIKKNGLYKLGYKQHTRTDAEGYIEKLHITPANAHECKHLPPLLEGLPKGTTVYADKGYDSAENRQHLEERQLLDGIMRKACRNRPLTETQTKHNRYLSKIRYVVEQSFGTLHRKFRYARAAYFGLIKVSAQSHLKAMCLNLLKAANRLSAPAAA

SEQ ID NO: 24897 - protein, 188 aa, Neisseria meningitidis; identical to SEQ ID NO: 19683

SEQ ID NO: 24898 - protein, 316 aa, Neisseria meningitidis; identical to SEQ ID NO: 3819

SEQ ID NO: 24899 - protein, 518 aa, Neisseria meningitidis; identical to SEQ ID NO: 8503

SEQ ID NO: 24900 - protein, 49 aa, Neisseria meningitidis; identical to SEQ ID NO: 5144

SEQ ID NO: 24901 - protein, 121 aa, Neisseria meningitidis; identical to SEQ ID NO: 10590

SEQ ID NO: 24902 - protein, 266 aa, Neisseria meningitidis; identical to SEQ ID NO: 8298

SEQ ID NO: 24903 - protein, 92 aa, Neisseria meningitidis; identical to SEQ ID NO: 510

SEQ ID NO: 24904 - protein, 87 aa, Neisseria meningitidis; identical to SEQ ID NO: 205

SEQ ID NO: 24905 - protein, 233 aa, Neisseria meningitidis; identical to SEQ ID NO: 18301

SEQ ID NO: 24906 - protein, 145 aa, Neisseria meningitidis
MPVKKVEKNILVLHGADKMFELVDKVEDYPHFLPWYSKTEVIGRSGNELKARLFMDYMHVRQSFATHNRNIPGREIRMELLEGPFKTLRGTWKFIDLGDDMCKIEFNLEYDFSNAVLSALISPVFNHLSATLVEAFVKEADRRYA

SEQ ID NO: 24907 - protein, 95 aa, Neisseria meningitidis; identical to SEQ ID NO: 3028

SEQ ID NO: 24908 - protein, 168 aa, Neisseria meningitidis; identical to SEQ ID NO: 13130

SEQ ID NO: 24909 - protein, 145 aa, Neisseria meningitidis
VGMMAFEKVEHLLPDTVLDIVDVIGLAATEQLVKAIGGARFKFGKGKVDTERLAILVEAIGEVKTHELLQVYGGEELYVPRCGKALIQLRNHRFYQEFVKLRDIDKESGLMAMTKLCPKYGISSRTGYTIINEMSRPAAQQAALF

SEQ ID NO: 24910 - protein, 201 aa, Neisseria meningitidis
MKKIGLFGGTFDPIHNGHLHIARAFADEIGLDAVVFLPTGGPYHKDAASASAADRLAMVELATAEDARFAVSDCDIVRRGETYTFDTVQIFRQQFPSAQLWWLMGSDSLMKLHTWKKWQMLVRETNIAVAMRQGDSLHQTPRELHAWLGNALQDGSVRILSAPMHNVSSTEIRRNLAGQGVSDGIPPAAARYIREHGLYEK

SEQ ID NO: 24911 - protein, 199 aa, Neisseria meningitidis; identical to SEQ ID NO: 18036

SEQ ID NO: 24912 - protein, 1392 aa, Neisseria meningitidis
MNYSFTEKKRIRKSFAKRENVLEVPFLLATQIDSYAKFLQLENAFDKRTDDGLQAAFNSIFPIVSHNGYARLEFVHYTLGEPLFDIPECQLRGITYAAPLRARIRLVILDKEASKPTVKEVRENEVYMGEIPLMTPSGSFVINGTERVIVSQLHRSPGVFFEHDKGKTHSSGKLLFSARIIPYRGSWLDFEFDPKDLLYFRIDRRRKMPVTILLKALGYGNEQILDIFYDKETFYLSSNGVQTDLVAGRLKGETAKVDILDKEGNVLVAKGKRITAKNIRDITNAGLTRLDVEPESLLGKALAADLIDSETGEVLASANDEITEELLAKFDINGVKEITTLYINELDQGAYISNTLRTDETAGRQAARVAIYRMMRPGEPPTEEAVEQLFNRLFFSEDSYDLSRVGRMKFNTRTYEQKLSEAQQNSWYGRLLNETFAGAAEKGGYVLSVEDIVASIATLVELRNGHGEVDDIDHLGNRRVRSVGELTENQFRSGLARVERAVKERLNQAESENLMPHDLINAKPVSAAIKEFFGSSQLSQFMDQTNPLSEVTHKRRVSALGPGGLTRERAGFEVRDVHPTHYGRVCPIETPEGPNIGLINSLSVYARTNDYGFLETPYRRVIDGKVTEEIDYLSAIEEGRYVIAQANADLDSDGNLIGDLVTCREKGETIMATPDRVQYMDVATGQVVSVAASLIPFLEHDDANRALMGANMQRQAVPCLRPEKPMVGTGIERSVAVDSATAIVARRGGVVEYVDANRVVIRVHDDEATAGEVGVDIYNLVKFTRSNQSTNINQRPAVKAGDVLQRGDLVADGASTDLGELALGQNMTIAFMPWNGYNYEDSILISEKVAEDDRYTSIHIEELNVVARDTKLGAEDITRDIPNLSERMQNRLDESGIVYIGAEVEAGDVLVGKVTPKGETQLTPEEKLLRAIFGEKASDVKDTSLRMPTGMSGTVIDVQVFTREGIQRDKRAQSIIDSELKRYRQDLGDQLRIFDNDAFDRIERMIVGQKANGGPMKLAKGSEITTEYLAGLPSRHDWFDIRLTDEDLAKQLELIKVSLQQKREEADELYEIKKKKLTQGDELQPGVQKMVKVFIAIKRRLQAGDKMAGRHGNKGVVSRILPVEDMPYMADGRPVDIVLNPLGVPSRMNIGQILEVHLGWAAKGIGERIDRMLKEQRKAGELREFLNRLYNGSGKKEDLDALTDEEIIELASNLRKGASFASPVFDGAKESEIREMLNLAYPSDDPEVEKLGFNDSKTQITLYDGRSGEAFDRKVTVGVMHYLKLHHLVDEKMHARSTGPYSLVTQQPLGGKAQFGGQRFGEMEVWALEAYGAAYTLQEMLTVKSDDVNGRTKMYENIVKGEHKIDAGMPESFNVLVKEIRSLGLDIDLERY

SEQ ID NO: 24913 - protein, 164 aa, Neisseria meningitidis; identical to SEQ ID NO: 8223

SEQ ID NO: 24914 - protein, 83 aa, Neisseria meningitidis; identical to SEQ ID NO: 5347

SEQ ID NO: 24915 - protein, 382 aa, Neisseria meningitidis; identical to SEQ ID NO: 18068

SEQ ID NO: 24916 - protein, 245 aa, Neisseria meningitidis; identical to SEQ ID NO: 388

SEQ ID NO: 24917 - protein, 636 aa, Neisseria meningitidis
MTLETLIALPRNIKKICFLIHDFLMIFIAFWFTQSLKADYSNEWFDPANWQSFLLTAFLTACLFFRMGLYRAVTRFISFRILSTALAGSLASAVLFFLNTLIFEERLRLALPIVYFLLLFVSVTGSRMVLRGLLSEHPKKQMAPVIIYGAGQAGRQLLEAVKQMREYSAAAFVDDDPKLWRTVICGLAVYRPDDIAALIGRYGVEKILLAIPSATQEQRRRIINKLEAYPCEVLTIPGMKDLMDGKISIGTLKKISVSDLLGRDSVTPDDRLMSADIEGKTVMVTGAGGSIGSELCRQIIRRRPEKLLLFELSEFALYAVEKELRETCIQKRLDTEILPFLGSVQNRTLLEHVMTAFSVATVYHAAAYKHVPMVEFNTVEGIRNNIFGTLECALAATASGVETFVLISTDKAVRPTNTMGASKRMAELCLQALAAEPGQKTRFSMVRFGNVLGSSGSVVPLFEKQIAEGGPLTLTHPDITRYFMTIPEAAQLVIQAGAMGTGGDVFVLDMGESVKIIDLARQMITLSGLKPKTPEQPDGDIEILITGLRPGEKLYEELLIGDNVRKTGHPRIMTADEAMLPWHELSVLLDRIRAACDRYDQQAIRTLLINAPTGFAPSDGICDLLWVRETHRKNAV

SEQ ID NO: 24918 - protein, 442 aa, Neisseria meningitidis
MKKVFIRTFGCQMNEYDSDKMLAVLAEEHGGIEQVTQADEADIILFNTCSVREKAQEKVFSDLGRVRPLKEKNPGLIIGVAGCVASQEGENIIKRAPYVDVVFGPQTLHRLPKMIVDKETSGLSQVDISFPEIEKFDHLPPARVEGGAAFVSIMEGCSKYCSFCVVPYTRGEEFSRPLNDVLTEIANLAQQGVKEINLLGQNVNAYRGEMDDGEICDFATLLRIVHEIPGIERMRFTTSHPREFTDSIIECYRDLPKLVSHLHLPIQSGSDRVLSAMKRGYTALEYKSIIRKLRAIRPDLCLSSDFIVGFPGETEREFEQTLKLVKDIAFDLSFVFIYSPRPGTPAANLHDDTPHEEKVRRLEALNEVIEAETARINQTMIGTVQRCLVEGISKKDPDQLQARTANNRVVNFTGTPDMINQMIDLEITEAYTFSLRGKTVSI

SEQ ID NO: 24919 - protein, 380 aa, Neisseria meningitidis
MNTLYTLFATCPRGLETVLSQELESLGCTDVQVFDGGVSCRGGLEQVYAANLHSRTASRILLRLTKGTYRNERNIYKLAKNINWFNWFTLQQTFKVKVEAKRANVKSIQFVGLTVKDAVCDAFRDIYDARPSVDKAAPDVRIHAFLDERNVEIFIDTSGEALFKRGYRLDTGEAPLRENLAAGLLLSAGYDGTQPFQDPFCGSGTIAIEAAWIAARRAPGMMRRFGFEKLQNFDKTLWSDLRRRAEAQVKPAFAPISGSDSDRRIIQTALANARSAGVDDIVSFSVADAQSVRPNGVGGIMVSNPPYGVRLEEVRALQALYPQLGTWLKKYYAGWLAAMFTGDREMPKFMRLSPKRKIPLYNGNLDCRLFLIDMVEGSNR

SEQ ID NO: 24920 - protein, 74 aa, Neisseria meningitidis; identical to SEQ ID NO: 19783

SEQ ID NO: 24921 - protein, 1328 aa, Neisseria meningitidis
MSVVLPLRGVTALSDFRVEKLLQKAAALGLPEVKLSSEFWYFAGSEKALDAATVEKLQALLAAQSVEQTPKAREGLHLFLVTPRLGTISPWASKATNIAENCGLAGIERIERGMAVWLEGALTDRQKQQWAALLHDRMTESVLPDFQTASKLFHHLESETFSTVDVLGGGKEALVKANTEMGLALSADEIDYLVENYQALQRNPSDVELMMFAQANSEHCRHKIFNADFILNGEKQPKSLFGMIRDTHNAHPEGTVVAYKDNSSVIEGAKIERFYPNAAENQGYRFHEEDTHIIMKVETHNHPTAIAPFAGAATGAGGEIRDEGATGKGSRPKAGLTGFTVSNLNIPDLKQPWEQAYGKPDHIASPLDIMIEGPIGGAAFNNEFGRPNLLGYFRTFEEKFDGQVRGYHKPIMIAGGLGSIQAQQTHKDEIPEGALLIQLGGPGMLIGLGGGAASSMDTGTNDASLDFNSVQRGNPEIERRAQEVIDRCWQLGDKNPIISIHDVGAGGLSNAFPELVNDAGRGAVFKLREVPLEEHGLTPLQIWCNESQERYVLSILEKDLDAFRAICERERCPFAVVGTATGDGHLKVRDDLFSNNPVDLPLNVLLGKPPKTTRTDKTVTPYATEGNPFGKKPFNAGDIDITEAAYRVLRLPAVAAKNFLITIGDRSVGGMTHRDQMVGKYQTPVADCAVTMMGFNTYRGEAMSMGEKPAVALFDAPASGRMCIGEAITNIAAVNIGDIGNIKLSANWMAACGNEGEDEKLYRTVEAVSKACQALDLSIPVGKDSLSMKTVWQDGADKKSVVSPLSLIISAFAPVEDVRKTVTPELKNVEDSVLLFIDLGFGKARMGGSAFGQVYNNMSGDAPDLDDTSRLKAFYNVIQQLVAEDKLLAYHDRSDGGLFAVLVEMAFAGRCGLDIDLNLLLAQTFITNHTALSQSLRTEEVKALAEWQETIARTLFNEELGAVIQVRKQDVADIINLFYQQQLHHNVFEIGTLTDENTLIIRDGQTHLISDNLIKLQQTWQETSHQIQRLRDNPACADSEFALIGDNERSALFADVKFDVNEDIAAPFINSGAKPKIAILREQGVNGQIEMAAAFTRAGFDAYDVHMSDLMAGRFRLADFKMLAACGGFSYGDVLGAGEGWAKSILFHPALRDQFAAFFADPDTLTLGVCNGCQMVSNLAEIIPGAEAWPKFKRNLSEQFEARLSMVHVPKSASLILNEMQGSSLPVVVSHGEGRADFALHGGNISADLGIALQYVDGQNQVTQTYPLNPNGSPQGIAGITNADGRVTIMMPHPERVYRAAQMSWKPEGWTELSGWYRLFAGARKALG

SEQ ID NO: 24922 - protein, 320 aa, Neisseria meningitidis
MQARLLIPILFSVFILSACGTLTGIPSHGGGKRFAVEQELVAASARAAVKDMDLQALHGRKVALYIATMGDQGSGSLTGGRYSIDALIRGEYINSPAVRTDYTYPRYETTAETTSGGLTGLTTSLSTLNAPARSRTQSDGSGSRSSLGLNIGGMGDYRNETLTTNPRDTAFLSHLVQTVFFLRGIDVVSPANADTDVFINIDVFGTIRNRTEMHLYNAETLKAQTKLEYFAVDRTNKKLLIKPKTNAFEAAYKENYALWMGPYKVSKGIKPTEGLMVDFSDIRPYGNHTGNSAPSVETDNSHEGYGYSDEVVRQHRQGQP

SEQ ID NO: 24923 - protein, 96 aa, Neisseria meningitidis; identical to SEQ ID NO: 6081

SEQ ID NO: 24924 - protein, 229 aa, Neisseria meningitidis; identical to SEQ ID NO: 18366

SEQ ID NO: 24925 - protein, 758 aa, Neisseria meningitidis; identical to SEQ ID NO: 14184

SEQ ID NO: 24926 - protein, 306 aa, Neisseria meningitidis; identical to SEQ ID NO: 14851

SEQ ID NO: 24927 - protein, 575 aa, Neisseria meningitidis
MQLSGAQIIVQSLKAEGVEYVFGYPGGAVIEIYDALFQLNKFKHILTRHEQAAVHAADAYARVSGKVGVALVTSGPGVTNALTGIATAYTDSIPMVVISGQVGNSLIGTDAFQEVDTVGITRPCVKHNFLVTDINELAETIKKAFQIAASGRPGPVVVDVPKDVTQAMAKFSYPQEDIFIRSYQPVVQGHIGQIKKAVQMLASAKRPVVYFGGGVVLGNASEELTRFVRMTGAPCTGTLMGLGAYPSGDRQFLGMLGMHGTYEANLAMQNADVVLAVGARFDDRVVSVPSKFFEKAKKVIHIDVDPSSIAKRVKADIPIVGDVKNVLSEMVALWQKQESVPSEDVLGKWWKTIEEWRSRDCLWFDNGSEIIKPQYVIQKLAEITGNSAIITSDVGQHQMFAAQYYPFERPRQWLNSGGLGTMGVGLPYAIGAKLAAPDQDVFCITGDGSIQMNIQELSTCFQYRIPVNVITLNNGYLGMVRQWQEIYYGGRESETYFDSLPDFVKLAEAYGHIGIRVDKKSDVEGALLEALNQKDRLVFIDFLTDQKQNVMPMVGNGKGLDEMVLPPHMRADEKA

SEQ ID NO: 24928 - protein, 139 aa, Neisseria meningitidis; identical to SEQ ID NO: 18668

SEQ ID NO: 24929 - protein, 137 aa, Neisseria meningitidis; identical to SEQ ID NO: 9005

SEQ ID NO: 24930 - protein, 680 aa, Neisseria meningitidis; identical to SEQ ID NO: 18792

SEQ ID NO: 24931 - protein, 199 aa, Neisseria meningitidis; identical to SEQ ID NO: 2856

SEQ ID NO: 24932 - protein, 861 aa, Neisseria meningitidis; identical to SEQ ID NO: 354

SEQ ID NO: 24933 - protein, 153 aa, Neisseria meningitidis; identical to SEQ ID NO: 19769

SEQ ID NO: 24934 - protein, 405 aa, Neisseria meningitidis; identical to SEQ ID NO: 13355

SEQ ID NO: 24935 - protein, 271 aa, Neisseria meningitidis; identical to SEQ ID NO: 3345

SEQ ID NO: 24936 - protein, 556 aa, Neisseria meningitidis; identical to SEQ ID NO: 2805

SEQ ID NO: 24937 - protein, 253 aa, Neisseria meningitidis; identical to SEQ ID NO: 15245

SEQ ID NO: 24938 - protein, 167 aa, Neisseria meningitidis; identical to SEQ ID NO: 189

SEQ ID NO: 24939 - protein, 214 aa, Neisseria meningitidis; identical to SEQ ID NO: 3176

SEQ ID NO: 24940 - protein, 162 aa, Neisseria meningitidis; identical to SEQ ID NO: 9363

SEQ ID NO: 24941 - protein, 232 aa, Neisseria meningitidis
MSFEIYRYNPDVDAKPYMQRYELELEPTDVKLLDALVRLKAQDDTLSFRRSCREGICGSDGMNINGKNGLACLTDLRGLKQPVKIRPLPGLPVIRDLIVDMTQFFKQYHSVKPYVVNDNPIDADKERLQTQEERKELDGLYECILCACCSTACPSFWWNPDKFVGPSGLLNAYRFIADSRDTITNERLDDLNDPYRLFRCHTIMNCVDVCPKHLNPTRAIGKIKEIMLKRAV

SEQ ID NO: 24942 - protein, 307 aa, Neisseria meningitidis
MKKRNNPLPLLNGVKPSYLVLPHEKQFYGLPLLHFLCIRFPFVGADDWRRRLNSGFVVGSDGAALDEHTLFEPGKVMFYYRETSSEDEPRIPFEEKILHIDEHLIVVDKPHFLPVIPSGRFLRETLLTRLRLRPELQHLNVEDITPLHRLDKDTAGVMLLSHNPATRGAYQTMFQNKTVWKTYEALAPTRTDLPYPLDVVSRLVRGEKFFTTQEAEGEPNAHTTVELIENRGEFSLYRLTPHTGKKHQLRVHMMGLGMPLLNDALYPVPSEAGSEDYRKPLKLLAKKIAFADPLSGRERVFCSGFCL

SEQ ID NO: 24943 - protein, 274 aa, Neisseria meningitidis; identical to SEQ ID NO: 5721

SEQ ID NO: 24944 - protein, 209 aa, Neisseria meningitidis; identical to SEQ ID NO: 15159

SEQ ID NO: 24945 - protein, 812 aa, Neisseria meningitidis; identical to SEQ ID NO: 18145

SEQ ID NO: 24946 - protein, 305 aa, Neisseria meningitidis
MEKAEHLNSSRFVNLVKSGGGSYVEGSYRFDTLSNGISIHGGTVTARCDFCSSRLAEPYVSFVLLLEGSLDFGINRRRFQIDADGGKIVLIAVGEEVLFSRYLYRGGKTVKMTIKGMEQWLLRPEYARFAPLLYREPVRIWNLSPNLRGSAASCLKAVPKGHLGETLRREADVLRLLSDLWDTVSDGIGPAAGQTAEADAMPSEDFNRTLNAAFADGAHQVNRLTDALNISERTLQRRMRDHFGITASEWLHHKQMQHALYLLQNGGKSIGETAYLCGYRHVSSFTQAFRQYFGSTPAETKKENR

SEQ ID NO: 24947 - protein, 637 aa, Neisseria meningitidis
MNPSPLLDLIDSPQDLRRLDKKQLPRLAGELRAFLLESVGQTGGHFASNLGAVELTIALHYVYDTPEDKLVWDVGHQSYPHKILTGRKNQMHTMRQYGGLAGFPKRCESEYDAFGVGHSSTSIGAALGMAAADKLLGSDRRSVAIIGDGAMTAGQAFEALNCAGDMDVDLLVVLNDNEMSISPNVGALPKYLASNVVRDMHGLLSTVKAQTGKVLDKIPGAMEFAQKVEHKIKTLAEEAEHAKQSLSLFENFGFRYTGPVDGHNVENLVDVLKDLRSRKGPQLLHVITKKGNGYKLAENDPVKYHAVANLPKESAAQMPSEKEPKPAAKPTYTQVFGKWLCDRAAADSRLVAITPAMREGSGLVEFEQRFPDRYFDVGIAEQHAVTFAGGLACEGMKPVVAIYSTFLQRAYDQLVHDIALQNLPVLFAVDRAGIVGADGPTHAGLYDLSFLRCIPNMIVAAPSDENECRLLLSTCYQADAPAAVRYPRGTGTGAPVSDGMETVEIGKGIIRREGGKTAFIAFGSMVAPALAVAEKLNATVADMRFVKPIDEELIVRLARSHDRIVTLEENAEQGGAGGAVLEVLAKHGICKPVLLLGVADTVTGHGDPKKLLDDLGLSAEAVERRVRAWLSDRDAAN

SEQ ID NO: 24948 - protein, 792 aa, Neisseria meningitidis
MKPLQMLPIAALVGSIFGNPVLAADEAATETTPVKAEIKAVRVKGQRNAPAAVERVNLNRIKQEMIRDNKDLVRYSTDVGLSDSGRHQKGFAVRGVEGNRVGVSIDGVNLPDSEENSLYARYGNFNSSRLSIDPELVRNIEIVKGADSFNTGSGALGGGVNYQTLQGRDLLLDDRQFGVMMKNGYSTRNREWTNTLGFGVSNDRVDAALLYSQRRGHETESAGNRGYAVEGEGSGANIRGSARGIPDSSKHKYHSFLGKIAYQINDNHRIVGASLNGQQGHNYTVEESYNLTASSWREADDVNRRRNANLFYEWMPDSNWLSSLKADFDYQKTKVAAVNNKGSFPMDYSTWTRNYNQKDLDEIYNRSMDTRFKRFTLRLDSHPLQLGGGRHRLSFKTFVSRRDFENLNRDDYYFSGRVVRTTSSIQHPVKTTNYGFSLSDQIQWNDVFSSRAGIRYDHTKMTPQELNAECHACDKTPPAANTYKGWSGFVGLAAQLNQAWHVGYDITSGYRVPNASEVYFTYNHGSGNWLPNPNLKAERSTTHTLSLQGRSEKGMLDANLYQSNYRNFLSEEQKLTTSGTPGCTEENAYYGICSDPYKEKLDWQMKNIDKARIRGIELTGRLNVDKVASFVPEGWKLFGSLGYAKSKLSGDNSLLSTQPLKVIAGIDYESPSEKWGVFSRLTYLGAKKAKDAQYTVYENKGWGTPLQKKVKDYPWLNKSAYVFDMYGFYKPAKNLTLRAGVYNVFNRKYTTWDSLRGLYSYSTTNSVDRDGKGLDRYRAPSRNYAVSLEWKF

SEQ ID NO: 24949 - protein, 376 aa, Neisseria meningitidis; identical to SEQ ID NO: 6637

SEQ ID NO: 24950 - protein, 350 aa, Neisseria meningitidis; identical to SEQ ID NO: 16166

SEQ ID NO: 24951 - protein, 678 aa, Neisseria meningitidis
MNDMTLYLIIALVPLAGSLIAGLFGNKIGRAGAHTVTILGVAVSAVLSAYVLWGFLNGSRAKFDENVYTWLTMGGLDFSVGFLVDTMTAMMMVVVTGVSLMVHIYTIGYMHDEKVGYQRFFSYISLFTFSMLMLIMSNNFIQLFFGWEAVGLVSYLLIGFYFKRPSATFANLKAFLINRVGDFGFLLGIGLVLAYFGGSLRYQDVFAYLPNVQNATIQLFPGVEWSLITVTCLLLFVGAMGKSAQFPLHVWLPDSMEGPTPISALIHAATMVTAGLFMVSRMSPIYEMSSTALSVIMVIGAITALFMGFLGVIQNDIKRVVAYSTLSQLGYMTVALGASAYSVAMFHVMTHAFFKALLFLAAGSAIIGMHHDQDMRHMGNLKKYMPITWLTMLIGNLSLIGTPFFSGFYSKDSIIEAAKYSTLPGSGFAYFAVLASVFVTAFYAFRQYFMVFHGEEKWRSLPEHHDDHHGDHHGEEHHSLGKNDNPHESPLVVTLPLILLAIPSVIIGYVAIEPMLYGDFFKDVIFVNADAHPTMHIMKEEFHGALAMVSHSLHSPVLYLAIAGVLSAWLLYVKLPHLPAKIAQTFRPIYVLFENKYYLDALYFNVFAKGTRALGTFFWKVGDTAIIDNGIVNGSAKLVGAIAAQVRKAQTGFIYTYAAAMVFGVLVLLGMTFWGLFR

SEQ ID NO: 24952 - protein, 199 aa, Neisseria meningitidis
MSEKPEKIVLASGNAGKLEEFGNLFKPYSITVLPQSAFGIPECPEPYPTFVENALAKARHAAEYSGLPALADDSGICAAALNGAPGIHSARYAGDNPKSDTANNLKLAAELVGKADKSCCYVCVLVFVRHKDDPRPIIAEGVWHGQWNGVPAGENGFGYDPYFYLPGHGKTAAELDSEVKNRESHRAQALADLIRKLAL

SEQ ID NO: 24953 - protein, 283 aa, Neisseria meningitidis; identical to SEQ ID NO: 7579

SEQ ID NO: 24954 - protein, 257 aa, Neisseria meningitidis; identical to SEQ ID NO: 780

SEQ ID NO: 24955 - protein, 354 aa, Neisseria meningitidis; identical to SEQ ID NO: 18215

SEQ ID NO: 24956 - protein, 125 aa, Neisseria meningitidis
VNKTLILVLSALFSLTACSVERVSLFPSYKLKIIQGNELEPRAVAALRPGMTKDQVLLLLGSPMLRDAFHTDRWDYTFNTSRNGIIKERSNLTVYFENGVLVRTEGDVLQNAAEALKDRQNTDKP

SEQ ID NO: 24957 - protein, 456 aa, Neisseria meningitidis
MINPIASLSPLDGRYAQSVEALRPIFSEYGLMKARVKVELNWLKALAAEPKIAEVPPFSAETLAEIDTVIENFSLEDAAAVKAIEATTNHDVKAIEYWLKKRFAEVPEVAAVSEFIHFACTSEDINNLSHALMLQEAREAVLLPKLAEIIEKLTAMAHDLAAVPMMSRTHGQPATPTTLGKETANVVYRLQRQFKNLQVQEFLGKINGAVGNYNAHMVAYPDVDWETHCRNFVEISLGLTFNPYTIQIEPHDYMAEFFQTLSRINTILIDFNRDVWGYISLGYFKQKVKAGEVGSSTMPHKVNPIDFENSEGNLGMANAVLGFLSEKLPISRWQRDLTDSTVLRNMGVGVGYAVLGFAAHLRGLNKLEPNPAALAADLDATWELLAEPIQTVMRRYGVANPYEKLKDLTRGKGGITPEVLKGFIGSLEIPVEAKAKLLELTPALYVGKAEALAKRI

SEQ ID NO: 24958 - protein, 205 aa, Neisseria meningitidis; identical to SEQ ID NO: 18580

SEQ ID NO: 24959 - protein, 484 aa, Neisseria meningitidis
MTTQTIKFHMKPETFKQNAAISLQDKPLRKSLRTAMDMLMTKRKAVLTDEEELQSLRDLCEHVRQRSLSKLPALLEQLEENLTKLGVKVHWAETPAEACEIIHDIITAKNGKLMVKGKSMVSEEIELNHYLEAKGIKAVESDLGEFIVQMAGEKPTHIVMPAIHKTKEQVSELFHQNLGTPLTDDVDQLTGFARKALRDIYSTADVGLSGVNFAVAETGTLCLVENEGNGRLSTTVPPVHIAITGIEKVVAKLSDIPPLYSLLPRSAIGQNITTYFNMITGPRRSEELDGPQEMHLVLLDNGRSQAYAEDQMRRTLQCIRCGACMNHCPVYTRIGGAAYGTTYPGPIGEIISPHLLGLDATRDLPTACTMCGACVEVCPVRIPITEQMQRLRVEAQRSPTETVPHPIRGQGASHTFGEQMAWRTFNGIFSGSKTYRAFGWAATKFRNLTPRKQLGWTQNRVPMKPAKKTLHELMAEKMRQKEQA

SEQ ID NO: 24960 - protein, 88 aa, Neisseria meningitidis; identical to SEQ ID NO: 1100

SEQ ID NO: 24961 - protein, 241 aa, Neisseria meningitidis
MPRFYLPENLSVGQTVALPDNIVRHLNVLRVRPNENITLFDGKGKAHAAQLTVLEKRRAEAEILHEDTTDNESPLNITLIQSISSGDRMDFTLQKSVELGVTAIQPVISERCIVRLDGERAAKRLARWQEIVISACEQSGRNTVPPVLPIIGYREALDKMPSESTKLIMSINRARKLGDIRQPSGAIVFMVGPEGGWTEQEEQQAFDAGFQAVTLGKRILRTETAPLAALAAMQTLWGDFA

SEQ ID NO: 24962 - protein, 426 aa, Neisseria meningitidis
MKSLFIRLLLLGSAAGVFYHTQNQSLPAGELVYPSAPQIRDGGDALHYLNRIRAQIGLHKLAHAPVLENSARRHASYLTLNPEDGHGEHHPDNPHYTAQKLTEHTRLAGYLYNGVHENISTEEEAAESSDSDIRTQQRQVDGLMSAIYHRLSLLDRHTDEAGAAFVRENGKTVLVFNQGNGRFERHCAQGRNQPEAGRKYYRNACHNGAVVYTDEAMPAQELLYTAYPVGSGALPYFHGERPDPVPEYEITGNPASIDFSEAAGKITMKSFKLYQGKNEIRPVRVLTAGNDPNGRLTAYQFALFPLKPLEYGTLYTAVFDYVRNGRRAQAKWQFRTRKPDYPYFEVNGGETLAVRKGEKYFIHWRGRWCLEACTRYTYRQRPGSRLSIGRHEAGGIVFSVDGMAGSRITLAPEGETERGVTLYLQD

SEQ ID NO: 24963 - protein, 706 aa, Neisseria meningitidis; identical to SEQ ID NO: 18585

SEQ ID NO: 24964 - protein, 161 aa, Neisseria meningitidis
MFVNEKDPYAALFAGLVFLTLPFALAVHDALAFVFGRTGLLVSVSDGGFGWRGGWDGVVWFVYGVFAFLNLVVSAGLTKLAYKKMMRRHSRYALFLSGVAACAAAAVAWIFELLLGSGALGGLRGEAVLEYAFAVWLVAMLTLPKRLTRAPVQPVVFHRKK

SEQ ID NO: 24965 - protein, 286 aa, Neisseria meningitidis; identical to SEQ ID NO: 5950

SEQ ID NO: 24966 - protein, 200 aa, Neisseria meningitidis
MTEKLPPDALIEAALLTQAEPLNEKTMRELCVPPLSQDKLIDVLAQLKTRWQDRALQLVHTQEGWRFQIVQTAFERLGSLQEQRAPRYSRAVMETLAIIAYQQPVTRGDIEGIRGVAVSQNVMQTLQDRGWIEVIGHRDTLGKPALWATTATFLSDLRLDGLEELPPLTELGELVLPDLMEMPPTDEEEPEAVPSDTLPN

SEQ ID NO: 24967 - protein, 619 aa, Neisseria meningitidis
MPEYRSKTSTHGRNMAGARALWRATGVMETDFGKPIIAVANSFTQFVPGHVHLHNMGQLVAREIEKAGAIAKEFNTIAIDDGIAMGHSGMLYSLPSRDLIADSIEYMVNAHCADALVCISNCDKITPGMLIAAMRLNIPTIFVSGGPMEAGKVIGVANIQPERRLDLIDAMIESADDNVSNRQVEEVEQNACPTCGSCSGMFTANSMNCLTEALGLSLPGNGSYLATHAGRKELFLEAGRMIVEITKRYYEQNDETVLPRSIATKKAFENAMTMDIAMGGSTNTILHLLAVANEAGVDFKMADIDRLSRVVPCICKTAPNNHDYYMEDVHRAGGIFAILKELDKAGKLHTDVHTIHAPTLKDAIEKWDVTNPENTRAIERFKAAPGGVRTTQAFSQNRMWKTLDLDREKGCIRDVAHAYSQDGGLAVLFGNIAERGCVVKTAGVDESILKFTGRARVFESQEAAVEGILGNQIVAGDIVIIRYEGPKGGPGMQEMLYPTSYLKSKGLGKACALLTDGRFSGGTSGLSIGHASPEAAEGGAIGLVHEGDTVEIDIPNRSIHLVISDEELAARRAEMEARGSKAWKPENRDRYVSAALRAYGAMATSADKGAVRDVAQIER

SEQ ID NO: 24968 - protein, 469 aa, Neisseria meningitidis; identical to SEQ ID NO: 19069

SEQ ID NO: 24969 - protein, 166 aa, Neisseria meningitidis; identical to SEQ ID NO: 2937

SEQ ID NO: 24970 - protein, 192 aa, Neisseria meningitidis
MSNKIKMLVGLGNPGKEYEQTRHNAGFWFLDELAWKWKASFKEEKKFFGEVARAALPDGDVWLLKPATFMNRSGQAVAALAQFYKIKPEEILVVHDELDIPCGRIKFKLGGGNGGHNGLKDIQAKLGTADYYRLRLGIDHPGDRNLVVGYVLNKPSTEHRRQIDDAVAKSLQAIPDILAGKWEEATRFLHSK

SEQ ID NO: 24971 - protein, 48 aa, Neisseria meningitidis; identical to SEQ ID NO: 6016

SEQ ID NO: 24972 - protein, 78 aa, Neisseria meningitidis; identical to SEQ ID NO: 1622

SEQ ID NO: 24973 - protein, 280 aa, Neisseria meningitidis; identical to SEQ ID NO: 19580

SEQ ID NO: 24974 - protein, 169 aa, Neisseria meningitidis; identical to SEQ ID NO: 19393

SEQ ID NO: 24975 - protein, 195 aa, Neisseria meningitidis; identical to SEQ ID NO: 2216

SEQ ID NO: 24976 - protein, 210 aa, Neisseria meningitidis; identical to SEQ ID NO: 14345

SEQ ID NO: 24977 - protein, 363 aa, Neisseria meningitidis
MSLKCGIVGLPNVGKSTLFNALTQSGIEAANYPFCTIEPNVGIVEVPDPRMAELAKIVNPQKMQPAIVEFVDIAGLVAGASKGEGLGNQFLANIRETDAIVNVVRCFDDDNIVHVAGRVDPIADIETIGTELALADLASVEKAIVREEKRARSGDKDAQKLVDLCKKLLPHLDEGKPVRSFGLDAEERAMLKPLFLLTAKPAMYVGNVAEDGFENNPHLERLKELAAKENAPVVAVCAAMESEIAELEDDEKAEFLAEMGLEEPGLNRLIRAGYDLLGLQTYFTAGVKEVRAWTIHKGDTAPQAAGVIHTDFERGFIRAQVISYEDFIALGGEAKAKEAGKMRVEGKEYVVQDGDVMHFLFNV

SEQ ID NO: 24978 - protein, 107 aa, Neisseria meningitidis; identical to SEQ ID NO: 19842

SEQ ID NO: 24979 - protein, 543 aa, Neisseria meningitidis
MNWLNLRAIVPSDKQNMPNKKKKAAFARAATENGVPDVSNIKNSYDDLMYESKAFSQTAINALEARARMMGLQPAPAANAKVLELGCSMGGNIITQALYYPDAEFVGIDLSGRQVAQGNAIIEKMGLKNVRLEEKDILTVDESFGKFDYIIVHGIWSWVPDAVKDKIFSICRNNLTEHGIAYISYNVYPGWKRQEQLREIMYFAGRDVLEEPLEARTRKGLDALKALAEILENDKGLDGGGKLPAIQKILNHNFYYIAHEYMEAFNDPIYVNGFIEWANRHRLAYIGDADLHASFVSWMAEHTRERILALAGGDYIAKEFYSDILSDRQFRRSLLCREEVGDTVRRDESVAVEVIESLNFRPARGETINFDENDTLLSGIRDVMKTGEPFKTEDVAENLARRFPGLTFDRMKINSQLLLQTILGRFSVSSDNAGKQFFEDHKTYVPARFTDYAAAFVEHGAEAFVRPANRYNESTPSFGYGHLYIMRQLSRPTSKQALIETVAENLNIVSTTPDGLTFHPPAEVYVEEILADLADRHFLVSAD

SEQ ID NO: 24980 - protein, 92 aa, Neisseria meningitidis
LLFPCAILAACARNIPASPAVSNCAHLQNRTILYFDAHGKPADGAVKGGFYKIIEIQGANCILIQDFNSTGNALGGSYVPDCRKSSLFPKNI

SEQ ID NO: 24981 - protein, 114 aa, Neisseria meningitidis; identical to SEQ ID NO: 18081

SEQ ID NO: 24982 - protein, 423 aa, Neisseria meningitidis
MFQWLYDALWLLAPIWIRRYLDKRSGSAPAYRAHRDERFGKPYPNPVTGAVWIHAVSVGETRAAQPLIRELRQRFPDAPLLMTQMTPTGRETAQVLFPDAQCRYLPYDKKTWVRQFLREHRPMFGILMETEIWPNLMKECRRAGVPLFLANARLSEKSLNGYLKVRRLIRPAAASLTGCLAQTEADAARLAKLGAASVQVCGNTKYDLMPSEQMKTLAGQFEKRIGGRPVAVCGSTRVYRGEDEAEKLLAAWQQYRGDALLVVVPRHPEHFQTVFETAQRFGFKVQRRSDGLPVEPDTQVWIGDSMGELYAYYLCADVAFVGGSLVDSGCQNIIEPLSCGVPTIFGFSTYNFSEACRHALASGAAVRVESADAWREAVEKTLSSEGGGMQMQAHVDGFIAQHRGAGARIAEAVREAVCGHRGR

SEQ ID NO: 24983 - protein, 196 aa, Neisseria meningitidis; identical to SEQ ID NO: 1629

SEQ ID NO: 24984 - protein, 219 aa, Neisseria meningitidis
MDTWHDALGNEKRQPYFQEILNAVRQERLSGQIIYPPAEDVFNAFRLTAFDRVKVVILGQDPYHGAGQAHGLAFSVRQGVRIPPSLLNIYKELETDINGFSIPDHGCLTAWAEQGVLLLNTVLTVRAGQAHSHALLGWERFTDTVIRQLAAHRKHLVFMLWGGYAQQKGRLIDSQNHLILTAPHPSPLSAYRGFFGCRHFSQANSYLSQHGIEPINWKL

SEQ ID NO: 24985 - protein, 164 aa, Neisseria meningitidis
MSSSVSSKTRYWVLALAAIVLDQWSKWAVLSSFQYRERVNVIPSFFDLTLVYNPGAAFSFLADQGGWQKYFFLVLAVAVSAYLVRAILRDEFAALGKTGAAMIIGGALGNVIDRLIHGHVVDFLLFYWQNWFYPAFNIADSFICVGAVLAVLDNIVHRKDGKKT

SEQ ID NO: 24986 - protein, 145 aa, Neisseria meningitidis; identical to SEQ ID NO: 7320

SEQ ID NO: 24987 - protein, 336 aa, Neisseria meningitidis
MNDNTQTLPPRRLSVAPMLDWTDRHYRYMARQITRNTWLYSEMVNAGAIVYGDKDRFLMFNEGEQPVALQLGGSDPSDLAKAAKAAEEYGYNEVNLNCGCPSPRVQKGAFGACLMNEVGLVADCLNAMQDAVKIPVTVKHRIGVDRQTEYQTVADFVGTLRDKTACKTFIVHARNAWLDGLSPKENRDVPPLKYDYVYRLKQEFPGLEIIINGGITTNEEIAQHLQHVDGVMVGREAYHNPMVMREWDRLFYGDTRSPIEYADLVQRLYTYSQAQIQAGRGTILRHIVRHSLGLMHGLKNARTWRRMLSDATLLKDNDGGLILEAWKEVERANMRE

SEQ ID NO: 24988 - protein, 168 aa, Neisseria meningitidis
MFEQEDEWVSKTQMKKQMNGLQDLGMELTKLSSDTLKKIGLDEDLYEAVVTYKKITSNGALKRQAQFIGRLMRDTDPAPIEAFLAKLRGDDAVHNAFLQRVEQARVRLLADDGALTQFMSDFPHADAGKLRTLVRNTKKEQEQNKPPKNFRALFQELKTVMENGDAEI

SEQ ID NO: 24989 - protein, 245 aa, Neisseria meningitidis; identical to SEQ ID NO: 3123

SEQ ID NO: 24990 - protein, 260 aa, Neisseria meningitidis
MQETHFSILLDELAAKQEAAIAPHLLADGTKVWIRKAGRHNARWRYALLGMVARYLKLGVLKPVPSLGGEPAIATESKRLYELRAAGIAVPELLAVRKNALMFGNLEGIPLDTQIRQEAEAGKADAWLAGLEAIARVHKKQQFLSQAFARNMMSDEENISFLDFEDDPSEVLTIAQCQARDWLCYIHSTALILKNGGLLEAAAEKWGGVLSEQPAEIQRLIAATVKPILPIRRLEHPRWGRDALRLAASISLISLADIPP

SEQ ID NO: 24991 - protein, 388 aa, Neisseria meningitidis
MNLHEYQAKELLASYGLPVQGGILAHNGEEAAAAYDKLGGKFAVVKAQVHAGGRGKAGGVKVVKSREEAKEVAESLIGTNLVTYQTDANGQPVNSVLVCEDMYPVQTELYLGAVVDRSTRRVTFMASTEGGVEIEKVAAETPEKIFKVTVDPLVGLQPCQAREVAFQLGLKDKQINEFVKLMTGAYKAFVENDFALFEVNPLAVRENGALACVDGKIGIDSNALYRLPKIAELRDKSQENERELKASEFDLNYVALEGNIGCMVNGAGLAMATMDIIKLKGGQPANFLDVGGGATKDRVVEAFKLILEDKSVKGVLINIFGGIVRCDMIAEAIVAAVKEINVDVPVVVRLEGNNAELGAKILNESGLKLTSADGLNDAAEKIVAAVNA

SEQ ID NO: 24992 - protein, 374 aa, Neisseria meningitidis
MQNTSFDNESDYSDDSDFASASETENRIGLTVPLELAGGRLDAVLAKLLPDYSRSRLTSWIKEGAVIVNDKPSQPKDKMIGGEQICVTVRPSEENLAFVPEPMALDIVYEDDTVIVVNKPAGLVVHPAAGNWTGTLLNGLLAHCPELSQIPRAGIVHRLDKETSGLMVVAKTLSAQNSLVRQLQERTVKRIYRAVANGIVPFDGKIETQIGRDPHNRLKMAVVKFGGKPAVTHVKVLERYLAHSYIECSLETGRTHQIRVHMREANHPLAGDPVYGNPRHPCGDTVKEAVKSLGARQALHAYRLSFTHPESGETVSFEAPIPDDIYHLLSVLRLEAGLDSSLSNEEEWQDKFGADDDDDWNEDDYDVEVVYVRE

SEQ ID NO: 24993 - protein, 525 aa, Neisseria meningitidis
MNKFFKRLFDIIASASGLIVLSPVFLILAYLIRKNLGSPVFFIQERPGKDGKPFKMVKFRSMRDALDSDGIPLPDSERLTPFGKKLRAASLDELPELWNVLKGDMSLVGPRPLLTGYLPLYNDFQNRRHEMKPGITGWAQVNGRNALSWDEKFACDVWYTDNFSFWLDMKILFLTVKKVLIKEGISAEGEATMPYFTGNQTNEKNNILILSAGRRVELVQDFQTEAARFSDGISVFATDLNPRMSSACHVSDGSFEVPPISADSYIDSIFNLAVRENIGLIIPTIDTELQKLADERERFEAASVHIVVSDSDFIAQCRDKRKTATLFARYGIRSPEIYDRKKLVFPCFAKPYDGSRAIGAKRIDTPADLTPEVLADTKLMFCQFIDIENKFSEFTVDMYYDRQCRLKCAIPRKRLEVRSGEISKGVTCKNSLYQTLLEKMSVLQGARGCITAQFFYNEETGEFYGVEINPRFGGGFPLTYAAGGNYPSRLMREYLGDEEIPFSDDWENNLIMLRYDAKVLVHEND

SEQ ID NO: 24994 - protein, 132 aa, Neisseria meningitidis
MSNCCNRIQPVLLSVLRIVTAYLFLLHGTSKFFAFPIEMGSGSPGGLMLLAGILEVVGGILLVLGLFARPAAFVLSGQMAVAYFMAHASGNALFPIANGGESAVLFCFVFFYIAAAGGGAWSLDRLFFKRKA

SEQ ID NO: 24995 - protein, 701 aa, Neisseria meningitidis; identical to SEQ ID NO: 1407

SEQ ID NO: 24996 - protein, 212 aa, Neisseria meningitidis
MQTAIIDYGMGNLHSVLKSVRTAGQLAGKNTEIFLSGDPERVSRADKVIFPGQGAMPDCMAALKRDGLDEAVKDALKNKPFFGICVGAQLLFNHSEEGNTDGLGWFGGKVRRFERDLRDRQGCRLKVPHMGWNTVRQTQNHPLFKDIPQNTRFYFVHSYYFDPENPETILGESDYPSPFACIVGKDNVFATQFHTEKSHDAGLTMLKNFLNW

SEQ ID NO: 24997 - protein, 117 aa, Neisseria meningitidis
MTGFNDAAGVASTASDIKGKYVQSVTVANGVVTAQMASSGVNKEIQGRKLSLWAKRQNGSVKWFCGQPVTRNANNTANDAVTATDKQIDTKHLPSTCRDAASVVCIETPPTAFYKNT

SEQ ID NO: 24998 - protein, 198 aa, Neisseria meningitidis; identical to SEQ ID NO: 6940

SEQ ID NO: 24999 - protein, 415 aa, Neisseria meningitidis; identical to SEQ ID NO: 8108

SEQ ID NO: 25000 - protein, 787 aa, Neisseria meningitidis; identical to SEQ ID NO: 19161

SEQ ID NO: 25001 - protein, 127 aa, Neisseria meningitidis; identical to SEQ ID NO: 2146

SEQ ID NO: 25002 - protein, 160 aa, Neisseria meningitidis; identical to SEQ ID NO: 1762

SEQ ID NO: 25003 - protein, 127 aa, Neisseria meningitidis; identical to SEQ ID NO: 19049

SEQ ID NO: 25004 - protein, 81 aa, Neisseria meningitidis; identical to SEQ ID NO: 7948

SEQ ID NO: 25005 - protein, 572 aa, Neisseria meningitidis
MNLHQTVEREAAAAFAAAGIAGSPVVLQPTKNAEHGDFQINGVMGAAKKAKQNPRELAQKVADALAGNAVIESAEVAGPGFINLRLRPEFLAQNIHAALNDARFGIAQTDKPQTVVIDYSSPNLAKEMHVGHLRSSIIGDSISRVSEFMGNTVIRQNHVGDWGTQFGMLVAYLVEQQKDNAAFELADLEQFYRAAKVRFDEDPAFADTAREYVVKLQGGDETVLALWKQFVDISLSHAQAVYDTLGLKLRPEDVAGESKYNDDLQPVVDDLVQKGLAVEDDGAKVVFLDEFKNKEGEPAAFIVQKQGGGFLYASTDLACLRYRVGTLHADRLLYVVDHRQALHFEQLFTTSRKAGYLPENVGAAFVGFGTMMGKDGKPFKTRSGDTVKLVDLLTEAVERATALVKEKNPELGTDEAGKIGKTVGIGAVKYADLSKNRTSDYVFDWDAMLSFEGNTAPYLQYAYTRVQSVFRKAGEWDANAPTVLTEPLEKQLAAELLKFEDVLQSVADTAYPHYLAAYLYQIATLFSRFYEACPILKAEGASRNSRLQLAKLTGDTLKQGLDLLGIDVLDVM

SEQ ID NO: 25006 - protein, 329 aa, Neisseria meningitidis; identical to SEQ ID NO: 19766

SEQ ID NO: 25007 - protein, 118 aa, Neisseria meningitidis; identical to SEQ ID NO: 2492

SEQ ID NO: 25008 - protein, 285 aa, Neisseria meningitidis; identical to SEQ ID NO: 18795

SEQ ID NO: 25009 - protein, 106 aa, Neisseria meningitidis; identical to SEQ ID NO: 2510

SEQ ID NO: 25010 - protein, 275 aa, Neisseria meningitidis; identical to SEQ ID NO: 12127

SEQ ID NO: 25011 - protein, 590 aa, Neisseria meningitidis
MIPSDFIDELLAKTDIVDIIDEQVPLKKGGANYMACCPFHKEKTPSFSVSPTKQFYHCFSCGAHGSAIGFVMEHQGLSFPEAVQFLADRVGMIVPKVRGQNDNPEVRAERKKKQQTLEETTAEAADFYAQQLKFNPTAKAYLDKRGLSAEVIAHYGLGYAPDGWQPLAQVFQPYPNTALVDTGMVIDNEGRYYDRFRHRIMFPIRNPRGQVIGFGGRVLDDSKPKYLNSPDTPLFDKGKNLYGLYEGRAAVKEVGRILVVEGYMDVVALAQFGVGYGVAALGTATTAEHVKILMRQADSIYFCFDGDSAGRKAAWRALENALPQLKDDKSLHFLFLPEEHDPDSYIRAYGKAQFEDALLNQSKPLSEYFWEHLSDGIHLNTQEGKAELVKTSSPLLAQITAPALAYLLKQRLSELVGIDPDNLAQLLGQEAPKRHVKQKNYKLPPISVKQPVMPTLVQRQIRSLLINPDWAAYIDLPDYLALDGDFACLANLAETIKNHPSVPATAQVLEHMRGSPYEETITRIFHSTHQSEEMNSSSEEDCENFQIGMKKLLNELKYSQIETLKQKSLQSGLNESEKKLLLSLLTAKQN

SEQ ID NO: 25012 - protein, 61 aa, Neisseria meningitidis; identical to SEQ ID NO: 2615

SEQ ID NO: 25013 - protein, 271 aa, Neisseria meningitidis; identical to SEQ ID NO: 1333

SEQ ID NO: 25014 - protein, 457 aa, Neisseria meningitidis; identical to SEQ ID NO: 2036

SEQ ID NO: 25015 - protein, 192 aa, Neisseria meningitidis; identical to SEQ ID NO: 18256

SEQ ID NO: 25016 - protein, 163 aa, Neisseria meningitidis; identical to SEQ ID NO: 6300

SEQ ID NO: 25017 - protein, 151 aa, Neisseria meningitidis
MKKPKILFVCLGNICRSPMAEYILRRRAAEAGIPLEADSAGTSGWHDGEDMHRETAKILKKHGIDASGFTSRKICQSDAAAFDCIIAMDGKNLSELERTFGRRPEKIFKLTDLIPESGYDHVPDPWYTGDFEETFRLADAGCRALLEKISK

SEQ ID NO: 25018 - protein, 423 aa, Neisseria meningitidis; identical to SEQ ID NO: 18895

SEQ ID NO: 25019 - protein, 490 aa, Neisseria meningitidis; identical to SEQ ID NO: 18335

SEQ ID NO: 25020 - protein, 101 aa, Neisseria meningitidis; identical to SEQ ID NO: 2399

SEQ ID NO: 25021 - protein, 260 aa, Neisseria meningitidis
MTDILNKILATKAQEVAAQKAAVNAEHIRALAAEAAPVRSFIDSIRGKHRLNLPAVIAEIKKASPSKGLIRPDFRPAEIARAYENAGAACLSVLTDEPYFQGSPEYLKQAREAVSLPVLRKDFIIDEYQVYQARAWGADAVLLIAAALEQEQLERFEAVAHELGMTVLLELHDETELEKCRNLTTPLWGVNNRNLRTFEVSLDQTLSLLPALEGKTVVTESGITGKADVEFMQSRGVHTFLIGETFMRAGDIEAEVGKLF

SEQ ID NO: 25022 - protein, 206 aa, Neisseria meningitidis; identical to SEQ ID NO: 18065

SEQ ID NO: 25023 - protein, 65 aa, Neisseria meningitidis; identical to SEQ ID NO: 127

SEQ ID NO: 25024 - protein, 358 aa, Neisseria meningitidis; identical to SEQ ID NO: 18266

SEQ ID NO: 25025 - protein, 332 aa, Neisseria meningitidis; identical to SEQ ID NO: 155

SEQ ID NO: 25026 - protein, 476 aa, Neisseria meningitidis; identical to SEQ ID NO: 19035

SEQ ID NO: 25027 - protein, 430 aa, Neisseria meningitidis
MQFSAFGEKFTQHSGILQLMDDLGDALKSDKPVNMLGGGNPARIPEIDRAFADIFSKLAAEHAVENIGNYSNPQGDAALIDALTAFLNREYGWNLTADNIALTNGSQNAFFYLFNLFGGKFKLSDGTSAEKAILLPLAPEYIGYADVHIEGQHFVSAKPKIENVEHEGEAGFFKYRVNFDALENLPELKEGKIGAICCSRPTNPTGNVLTDGEMARLDALAQKHGIPLIIDNAYGMPFPNIIYSDVTLNWHENIILCFSLSKVGLPGVRTGIIVAAPEVVKAVSSLNAIVNLAPTRFGAAIAAPLLESGEMKRLADQVIRPFYRNQAQTAVSLLKRELGAYPMKIHKPEGAIFLWLWFENLPVSSQTLYEILKAEGTLIIPGEHFFIGIDTQDYPHAGECIRMSIAQDAQTLEKGIAAIGKTVRKLYDNV

SEQ ID NO: 25028 - protein, 162 aa, Neisseria meningitidis; identical to SEQ ID NO: 7842

SEQ ID NO: 25029 - protein, 427 aa, Neisseria meningitidis
MTVSKSGFIGQIFSRNMLVCIFTGFTSGLPLYFLINLIPAWLRSEQVDLKSIGLMALIGLPFTWKFLWSPLMDAVRVPILGRRRGWMLLTQAGLLAALAAYAFLNPRNHLPLIAGLSVLVAFFSASQDIVLDAFRREILSDEELGLGNSVHVNAYRIAALIPGSLSLVLADRMPWSEVFVITSLFMLPGLLMTLFLAREPVLPPSVPKTLKQTVVEPFKEFFTRKGIASAVCVLLFIFLYKLGDSMATALATPFYLDMGFSKTDIGLIAKNAGLWPAVAAGILGGVWMLKIGVNKALWIFGAVQAVTVLGFVWLAGFGHFDTVGTGERLMLAAVIGAEAVGVGLGTAAFVSYMARETNPAFTATQLALFTSLSAVPRTVINSFAGYLIEWLGYVPFFQLCFILALPGMLLLLKVAPWNGEKTQDAGR

SEQ ID NO: 25030 - protein, 817 aa, Neisseria meningitidis
LKNNRQIKLIAASVAVAASFQAHAGLGGLNIQSNLDEPFSGSITVTGEEAKALLGGGSVTVSEKGLTAKVHKLGDKAVIAVSSEQAVRDPVLVFRIGAGAQVREYTAILDPVGYSPKTKSALSDGKTHRKTAPTAESQENQNAKALRKTDKKDSANAAVKPAYNGKTHTVRKGETVKQIAAAIRPKHLTLEQVADALLKANPNVSAHGRLRAGSVLHIPNLNRIKAEQPKPQTAKPKAETASMPSEPSKQATVEKPVEKPEAKVAAPEAKAEKPAVRPEPVPAANTAASETAAESAPQEAAASAIDTPTDETGNAVSEPVEQVSAEEETESGLFDGLFGGSYTLLLAGGGAALIALLLLLRLAQSKRARRTEESVPEEEPDLDDAADDGIEITFAEVETPATPEPAPKNDVNDTLALDGESEEELSAKQTFDVETDTPSNRIDLDFDSLAAAQNGILSGALTQDEETQKRADADWNAIESTDSVYEPETFNPYNPVEIVIDTPEPESVAQTAENKPETVDTDFSDNLPSNNHIGTEETASAKPASPSGLAGFLKASSPETILEKTVAEVQTPEELHDFLKVYETDAVAETAPETPDFNAAADDLSALLQPAEAPSVEENITETVAETPDFNATADDLSALLQPSKVPAVEENAAETVADDLSALLQPAEAPAVEENVTETVAETPDFNATADDLSALLQPSEVPAVEENAAEITLETPDSNTSEADALPDFLKDGEEETVDWSIYLSEENIPNNADTSFPSESVGSDAPSEAKYDLAEMYLEIGDRDAAAETVQKLLEEAEGDVLKRAQALAQELGI

SEQ ID NO: 25031 - protein, 229 aa, Neisseria meningitidis; identical to SEQ ID NO: 524

SEQ ID NO: 25032 - protein, 423 aa, Neisseria meningitidis; identical to SEQ ID NO: 18241

SEQ ID NO: 25033 - protein, 348 aa, Neisseria meningitidis; identical to SEQ ID NO: 2437

SEQ ID NO: 25034 - protein, 263 aa, Neisseria meningitidis; identical to SEQ ID NO: 1443

SEQ ID NO: 25035 - protein, 242 aa, Neisseria meningitidis; identical to SEQ ID NO: 5117

SEQ ID NO: 25036 - protein, 101 aa, Neisseria meningitidis; identical to SEQ ID NO: 18172

SEQ ID NO: 25037 - protein, 503 aa, Neisseria meningitidis; identical to SEQ ID NO: 8447

SEQ ID NO: 25038 - protein, 56 aa, Neisseria meningitidis; identical to SEQ ID NO: 326

SEQ ID NO: 25039 - protein, 945 aa, Neisseria meningitidis
VIASRLSGNISSAIQEHKDGKVNINRFQNILADLYSLGGLGSTLIEKNGNMQSWGIPLAIAGDIIAATAIATGDTGTISTEEFYNFDNWKGFGYELFEDWSRWVYDWLPDGWNLWKELDRNRSGQYHIYDPLALDLDGDGIETVAAKGFSGSLFDHNGNGIRTATGWVSADDGLLVRDLNGNGIIDNGAELFGDNTKLADGSFAKHGYAALAELDSNGDNIINAADAAFQTLRVWQDLNQDGISQTNELRTLEELGIQSLDLAYKDVNKNLGNGNTLAQQGSYTKTDGTTAKMGDLLLAADNLHSRFKDKVELTAEQAKAANLAGIGRLRDLREAAALSGDLANMLKAYSAAETKEAQLALLDNLIHKWAETDSNWGKKSPMRLSTDWTQTANEGIALTPSQVAQLKKNALVSLSDKAKAAIDAARDRIAVLDAYTGQDSSTLYYMSEEDALNIVKVTNDTYDHLAKNIYQNLLFQTRLQPYLNQISFEMENDTFTLDFSGLVQAFNHVKETNPQKAFVDLAEMLAYGELRSWYEGRRLMADYVEEAKKAGKFEDYQKVLGQETVALLAKTSGTQADDILQNVGFGHNKNVSLYGNDGNDTLIGGAGNDYLEGGSGSDTYVFGEGFSQDTVYNYDYATGRKDIIRFTDGITADMLTFTREGNHLLIKAKDGSGQVTVQSYFQNDGSGAYRIDEIHFDNGKVLDVATVKELVQQSTDGSDRLYAYQSGSTLNGGLGDDYLYGADGDDLLNGDAGNDSIYSGNGNDTLDGGEGNDALYGYNGNDALNGGEGNDHLNGEDGNDTLIGGAGNDYLEGGSGSDTYIFGKGFGQDTVYNYHVDKNSDTMHFKGFKAADVHFIRSGSDLVLSASEQDNVRISGFFYGENHRVDTFVFDDAAISNPDFAKYINAGNNLVQSMSVFGSNTAATGGNVDANIQSVQQPLLVTPSA

SEQ ID NO: 25040 - protein, 508 aa, Neisseria meningitidis
MDYPPLKGAALAWVTLSLGLAVFMEVLDTTIANVAVPVIAGNLGAATTQGTWVITSFAVANAVSVPLTGFLAKRIGEVKLFTAAAVGFVITSWLCGIAPNLQSLVVFRILQGFIAGPLIPLSQSLLMASYPPAKRTLALALWAMTVVVAPVLGPILGGWISGNWHWGWIFFINIPIGIISAWITWKHLKYRETETVKMPTDYVGLTLMVVGIGALQMMLDRGKELDWFASGEIITLGVVALVCLSYFIVWELGEKYPIVDLSLFKDRNFTVGVIATSLGFMVYMGTLTLLPLVLQTNLGYTSTWAGLAAAPVGILPVFLSPLIGRFGNKIDMRLLVTASFLTFAFTFYWRTDFYADMDIGNVIWPQFWQGAGVAMFFLPLTTITLSHMKGGQIAAAGSLSNFLRVLMGGVGVSVVSTLWERREALHHTRFAEHITPYSATLHETAAHLSQQGISDIQTLGIINNTITQQGFIIGSNEIFMAGSLLFIIMIPVIWLAKPPFHSSGGGGH

SEQ ID NO: 25041 - protein, 71 aa, Neisseria meningitidis; identical to SEQ ID NO: 6296

SEQ ID NO: 25042 - protein, 128 aa, Neisseria meningitidis; identical to SEQ ID NO: 1074

SEQ ID NO: 25043 - protein, 156 aa, Neisseria meningitidis; identical to SEQ ID NO: 955

SEQ ID NO: 25044 - protein, 468 aa, Neisseria meningitidis; identical to SEQ ID NO: 3129

SEQ ID NO: 25045 - protein, 419 aa, Neisseria meningitidis; identical to SEQ ID NO: 6779

SEQ ID NO: 25046 - protein, 288 aa, Neisseria meningitidis; identical to SEQ ID NO: 19920

SEQ ID NO: 25047 - protein, 181 aa, Neisseria meningitidis; identical to SEQ ID NO: 18427

SEQ ID NO: 25048 - protein, 171 aa, Neisseria meningitidis; identical to SEQ ID NO: 19365

SEQ ID NO: 25049 - protein, 318 aa, Neisseria meningitidis
MILTPPDTPLFLRNGNADTIAAKFLQRPAPAYRRELLPDSTGKTKVAYDFSDGISPDAPLVVLFHGLEGSSRSHYAVELMLAVRDRGWHGVVVHFRSCGGIANTAPVFYHLGDTAEIAFTLDTFAARYREIYAVGVSLGGNALAKYLGEQGKKALPQAAAVISAPVDAEAAGRRFDSGITRLLYTRYFLRTLIPKAKSLQGFQTAFAAGCKTLGEFDDRFTAPLHGFADRHDYYRQTSCKPLLKHVAKPLLLLNAVNDPFLPPEALPIPDEVSEAVTLFQPAHGGHVGFVGSTGGRLHLQWLPQTVLSYFDSFRTNSR

SEQ ID NO: 25050 - protein, 408 aa, Neisseria meningitidis
MNTDNLHDILDEMVQVYSQKKQSRSETPAEIGAHFHPLLDRLCETAEAQNASDILISKGFPPSLKINSALTPQPQKALTGEETAAIAASTMNAEQSEIFRRDGEINYSVQSRSGTRYRANAYHSQGSAGLVLRRINHVIPQMQELGLPEKLKDLAVAPRGLLIIVGPTGSGKSTTMATMLEHRNKTLPGHIVTIEDPIEFIYKPRRCIFTQREIGVDTINWQTAVQNAMRQSPDVVCIGEVRSRESMEYAMQLAQTGHLCIFTLHANTAPQSLERILNFYPKEQHNQILIDIALNLTGIICQRLALKQDKTGRTAVVDLLINTPAIQDFILKGDLMNISKIMETAKTDGMQTMDQNLFELYRHGIISYEEALRQSVSANNLRLHIQLHKEGKTPELLYDRVNGLNLIS

SEQ ID NO: 25051 - protein, 671 aa, Neisseria meningitidis
MKSYPDPYRHFEDLDSAETQNFAAEANAETRARFLNNDKARALSDGILAQLQDTRQIPFCQEHRARMYHFHQDTEYPKGVYRVCTAATYRSGYPEWKILFSVADFDELLGDDVYLGGVSHLVEQPNRALLTLSKSGGDTAYTLEVDLEAGELVEGGFHFPAGKNHVSWRDENSVWVCPAWDERQLTESGYPREVWLVERGKSFEESLPVYQIDKDAMMVNAWRYLDPQGSPIDLIEASDGFYTKTYLQVSSESEAKPLNLPNDCDVAGYLAGHLLLTLRKDWNRANQSYPSGALVAVKLNRGELGAAQLLFAPDETQALESVETTKRFVVASLLENVQGRLKAWRFADGKWQEAELPRLPSGALEMTDQPWGGDVVYLAASDFTTPLTLFALDLNVMELTVMRRQPQQFDSDGINVQQFWTTSADGERIPYFHVGKNAAPDMPTLVYAYGGFGIPELPHYLGSIGKYWLEEGNAFVLANIRGGGEFGPRWHQAAQGISKHKSVDDLLAVVRDLSERGMSSPRHIGLQGGSNGGLITAAAFVCEPQSIGALVCEVPLTDMIRYPLLSAGSSWTDEYGNPQKYEVCKRWLGELSPYHNLSDGIDYPPALITTSLSDDRVHPAHALKFYAKLHETSAQSWLYSPDGGGHTGNGTQRESADELACVLLFLKEFLG

SEQ ID NO: 25052 - protein, 128 aa, Neisseria meningitidis; identical to SEQ ID NO: 18385

SEQ ID NO: 25053 - protein, 328 aa, Neisseria meningitidis; identical to SEQ ID NO: 19312

SEQ ID NO: 25054 - protein, 75 aa, Neisseria meningitidis; identical to SEQ ID NO: 8304

SEQ ID NO: 25055 - protein, 90 aa, Neisseria meningitidis; identical to SEQ ID NO: 18174

SEQ ID NO: 25056 - protein, 197 aa, Neisseria meningitidis; identical to SEQ ID NO: 1551

SEQ ID NO: 25057 - protein, 432 aa, Neisseria meningitidis
MAKNVVVIGAQWGDEGKGKIVDWLAEEAGGVVRFQGGHNAGHTLVVGGKKTILRLIPSGILHESLDCFIGSGVVVSPEALLGEIDELNAAGVKNVEGRLKIAPTCPLILPYHIALDQAREASRGKGKIGTTGRGIGPAYEDKVARRAIRAADLLHPEKLREKLDAILAYYNVQLQHLHNAEPVKAEDVMAVIEKVALRIAPMITDVSRVLNEKNKNGEKLLFEGAQGALLDIDYGTYPFVTSSNCLAGAASAGAGVGPQMLDYVLGIVKAYTTRVGSGPFPTELFDEVGAGLAERGHEFGSVTGRARRCGWFDAAALKRSIQINGISGMCITKLDVMDGVETINICVGYELPDGGKTDILPCGSDAVETCKPIYETMEGWKESTFGIKNYEELPDNAKAYLKRIEEVCGAPVAIVSTGPDREETIVLHHPFA

SEQ ID NO: 25058 - protein, 475 aa, Neisseria meningitidis
MYINGRFENDFNGEWRDVLNPSTEETIAREPKGGKADVDRAVAAARAAQPAWERLPAVERGAYLRKIAQGIRGRADELTDTIVAEGGKTKDLARVEVMFTADYLDYQAEWARRYEGEIIQSDRPRENILLFKRPLGVIAGILPWNFPFFLIARKMGPALVTGNTIVVKPSSVTPINCHIFAEIVDAVGLPAGVFNVVNGPGAEIGNALSAHPQVDMVSLTGSVEAGRQVMEAASANITKVSLELGGKAPAIVLKDADLDLAVKSILASRVGNTGQICNCAERVYVHSSLKDAFIEKMTAAMKGVRYGNPAEAEAGALEMGPLIEERAVKAVAEKVERAVKQGAKLVCGGKRAEGRGYFFEPTLLTDTDNSMDIMKEETFGPVLPVSTFDTLDQVIALANDCEFGLTSSVYTTNLNEAFYVTRRLQFGETYINRENFEAMQGFHAGWKKSGIGGADGKHGLEEYLQTQVVYLETDI

SEQ ID NO: 25059 - protein, 222 aa, Neisseria meningitidis; identical to SEQ ID NO: 19273

SEQ ID NO: 25060 - protein, 142 aa, Neisseria meningitidis; identical to SEQ ID NO: 19559

SEQ ID NO: 25061 - protein, 96 aa, Neisseria meningitidis; identical to SEQ ID NO: 5466

SEQ ID NO: 25062 - protein, 270 aa, Neisseria meningitidis
MENIGRQRPIGVFDSGIGGLTNVRALMERLPMENIIYFGDTARVPYGTKSKATIENFSMQIVDFLLEHDVKAMVIACNTIAAVAGQKIRQKTGNMPVLDVISAGAKAALATTRNNKIGIIATNTTVNSNAYARAIHRDNPDTLVRTQAAPLLVPLVEEGWLEHEVTRLTVCEYLKPLLADGIDTLVLGCTHFPLLKPLIGREAGNVALVDSAITTAEETARVLAQEGLLNTDNNNPDYRFYVSDIPLKFRTIGERFLGRTMEQIEMVSLG

SEQ ID NO: 25063 - protein, 248 aa, Neisseria meningitidis; identical to SEQ ID NO: 639

SEQ ID NO: 25064 - protein, 305 aa, Neisseria meningitidis
MVLDGFAAHFDAYLENIVREGKSGHTVAAYRRDLEELFALLAQMPSEDAGGVPQGLSQRDFTAALRRLSQRGLNARTLARKLSSWRQYCAWLVKRGLLHTDPTADIKPPKQPERVPKALPQEWLNRMLDLPVDGGDPLAVRDHALFELMYGSGLRVSEIHGLNADDVYLDEAWVHVTGKGRKQRQVPLVGKSVEALKNYLSLRQTASDGKALFTGRNGTRLSQRQIQKRLAQWAAQNGDGRHVSPHMMRHSYAGHLLQASRDIRAVQELLGHSSLSTTQIYTKLDFDHIARLYDEAHPRAKRQDE

SEQ ID NO: 25065 - protein, 279 aa, Neisseria meningitidis; identical to SEQ ID NO: 9071

SEQ ID NO: 25066 - protein, 291 aa, Neisseria meningitidis; identical to SEQ ID NO: 6524

SEQ ID NO: 25067 - protein, 522 aa, Neisseria meningitidis
MAKKDNKTKIQKPEAALQTDAAQITATGRVIAEHPSNFITPQKMRALFEDAESGDIRAQHELFADIEERDSDIAANMGTRKRALLTLNWRVAPPRNATPEEEKLSDQAYEMMDSLPTLEDLIMDLMDAVGHGFSALEVEWVFSDGLYLPRNFIHRPQSWFKWDKDDGLLLRTRENPEGEALWPLGWVVHTQKSRSVRQARNGLFRSLSWLYMFKHYAVHDFAEFLELYGMPIRIGKYGAGATKEEKNTLLRAVAEIGHNAAGIMPEGMEIELHNAASGTTATSNPFLQMADWCEKSAARLILGQTLTSGADGKSSTNALGNIHNEVRRDLLVSDAKQVAQTITSQIIGPFLQINYPHADPNRVPKFEFDTREPKDIAVFADAIPKLVDVGVQIPESWVRDKLVIPDVQEGEAVLVRQVPDNPVNRTTLAALSAHTVPSKATGRHQEILDGALDDALVEPDFNSQLNPMVRQAVAALNACNSYEEADAALNALYPNLDNAKLRTYMQQALFISDILGQDHARA

SEQ ID NO: 25068 - protein, 392 aa, Neisseria meningitidis; identical to SEQ ID NO: 633

SEQ ID NO: 25069 - protein, 475 aa, Neisseria meningitidis; identical to SEQ ID NO: 18624

SEQ ID NO: 25070 - protein, 155 aa, Neisseria meningitidis; identical to SEQ ID NO: 6437

SEQ ID NO: 25071 - protein, 92 aa, Neisseria meningitidis; identical to SEQ ID NO: 10783

SEQ ID NO: 25072 - protein, 161 aa, Neisseria meningitidis; identical to SEQ ID NO: 7269

SEQ ID NO: 25073 - protein, 157 aa, Neisseria meningitidis; identical to SEQ ID NO: 18150

SEQ ID NO: 25074 - protein, 239 aa, Neisseria meningitidis; identical to SEQ ID NO: 11311

SEQ ID NO: 25075 - protein, 431 aa, Neisseria meningitidis
MSVIQDLQSRDLIAQTTDIEALDALLNEQKIALYCGFDPTADSLHIGHLLPVLALRRFQQAGHTPIALVGGATGMIGDPSFKAAERSLNSAETVAGWVESIRNQLTPFLSFEGGNAAIMANNADWFGSMNCLDFLRDIGKHFSVNAMLNKESVKQRIDRDGAGISFTEFAYSLLQGYDFAELNKRHGAVLEIGGSDQWGNITAGIDLTRRLNQKQVFGLTLPLVTKSDGTKFGKTEGGAVWLNAKKTSPYQFYQFWLKVADADVYKFLKYFTFLSIEEIDAVEAKDKASGSKPEAQRILAEEMTRLIHGEEALAAAQRISESLFAEDQSSLTESDFEQLALDGLPAFEVSDGINVVEALVKTGLASSNKEARGFVNSKAVLLNGKPAEANNPNHAAERPDDACLLTDEHKRFGKYTILRRGKRNHALLVWK

SEQ ID NO: 25076 - protein, 566 aa, Neisseria meningitidis; identical to SEQ ID NO: 18971

SEQ ID NO: 25077 - protein, 928 aa, Neisseria meningitidis
MANNKTLFEVIENRKAVYLEDGDDEKYRLPKFVSNNLKYPFFEWQKSALENFVIFDRTSKLKDFPDIKNRPTHLLFNMATGAGKTMMMAALILYYFEKGYRHFLFFVNQNNIVDKTENNFIDPTHAKFLFTEKILQGDTVIPIRKVETFSPHSDGIEIKFTSIQKLYNDIHTERENQTTLADLHELNLVMLGDEAHHLNAQTKGKKQGELDLEVELKANAGNAEIERKGWEHMVLELLLNKNGNPSQNVLLEFTATLPENADVQQKYADKIITKFGLKEFLQKGYTKEINLVSSTLGKKERVLHALLFAWYRHQIALKYGIANFKPVMLFRSKTIDESKADYLAFLNWAENVQAVDFSFLTTFSTSLNDSDSDNANEQGKTRTEQALKFMQEKGVEFAHLADWVKQNYQKHNVIITNSETNKTKTEKTDSETEKLLNNLEAADNPIRAIFTVDRLTEGWDVLNLFDIVRLYEGQNGGGSNKKSGKTAAATVSEKQLIGRGVRYFPFAFEGKQPNKRKFDNDMQHELRILEELFYYAHDEQSRYISELKNELRKDGYLPEKDDDKVLATFKLKSEFAANKDFRELLIWANKKIPNPNAKSNNADSLKANPQTLSFQVHGNQLLQETQFTADENDETARQIGTQNNFTQTIKMSEMERHIFNKALHIKGKNSQSLFHFNRLQSKLDIQNRNELQNNLLKDWQIEFLGLGQDKQVRLDDKLAGCLKILEMVEKHLNESDMPFIGTKEFTPKKLWEIFGTPKQKWVKKDDVKTTIATQNDWYVMNNFAGTGLEEALIQFISARLGDLKSKYDVHLIRNEEVFKLNNFADGEGFMPDFILLLKDKQKSSSNGVNDFLHYQIFIEPKGEHLVETDGWKEEFLEAITVEYGMDKILQKDTPHYRLIGLPFFTDHQKNGQFTESFPLGAASLEKMK

SEQ ID NO: 25078 - protein, 595 aa, Neisseria meningitidis
MKLPLSYLPNIRFLSWCCLLAGIIAPATLLASPNPAEIRMQQDIQQRQREEQLRQTMQPESDVRLHQKNTGETVNQLMGDDSSQPCFAINEVVLEGEHHDRFQFALKRALRETGFQAGKCLHAGNINQIMSLAQNALIGRGYTTTRILAAPQDLNSGKLQLTLIPSYLRSIRIDRSNDDQTHAGRIAAFQNKFPTRSNDLLNLRDLEQGLENLKRLPTAEADLQIVPVEGEPNQSDVVVQWRQRLLPYRVSVGMDNSGSEATGKYQGNITFSADNPFGLSDMFYVNYGRSIGGTPDEESFDGHRKEGGSNNYAVHYSAPFGKWTWAFNHNGYRYHQAVSGLSEVYDYNGKSYNTDFGFNRLLYRDAKRKTYLGVKLWTRETKSYIDDAELTVQRRKTAGWLAELSHKEYIGRSTADFKLKYKRGTGMKDALRAPEEAFGEGTSRMKIWTASADVNTPFQIGKQLFAYDTSVHAQWNKTPLTSQDKLAIGGHHTVRGFDGEMSLSAERGWYWRNDLSWQFKPGHQLYLGADVGHVSGQSAKWLLGQTLAGTAIGIRGQIKLGGNLHYDIFTGRALKKPEFFQSRKWASGFQVGYTF

SEQ ID NO: 25079 - protein, 1069 aa, Neisseria meningitidis; identical to SEQ ID NO: 19118

SEQ ID NO: 25080 - protein, 280 aa, Neisseria meningitidis
MIQHAGLGYRRDLAEDFLSLSENSPICFIEAAPENWLKMGGWARKQFDRVAERLPLALHGLSMSLGGQAPLDTDLIDGIKEMMRRYDCTFFSDHLSYCHDGGHLYDLLPLPFTEEMVHHTARRIREVQDRLGCRIAVENTSYYLHSPLAEMNEVEFLNAVAREADCGIHLDVNNIYVNTVNHGLLSPEAFLENVDADRVCYIHIAGHDVETPELLIDTHGAAVLPTVWDLLELAYAKLPTIPPTLLERDFNFPPFAELEAEVAKIADYQTRAGKEYRRAA

SEQ ID NO: 25081 - protein, 942 aa, Neisseria meningitidis
MMDEKLNFSYLFGSNAPYIEELYEAFLENPDAVDEKWKQYFTDLSKQPGTVAVDVAHTPIRESFVTLAKKKIASAVAGGADEAMLKKQVSVLRLISAYRIQGVGAAQLDPLKRIPPRDIEALDPKFHGLSDADMTLQFNMGEGDFANRGKLPLSQIISNLKQTYCGHIALEYIYIPNTEERRWVRNYFESVLSTPHYNADQKRRILKEMTAAETLERYLHTKYVGQKRFGVEGGESAIAGLNYLIQNASKDGVEEVIIGMAHRGRLNVLVNILGKKPGDLFAEFEGRAEIKLPSGDVKYHMGFSSDIATPHGPMHVSLAFNPSHLEIVNPVVEGSARAKQKRLGENGRDKVLPVLIHGDSAFIGLGVNQATFNLSKTRGYTTGGTVHIVINNQIGFTTSDIRDTRSTVHCTDIAKMVSAPVIHVNGDDPERVCFAIQAALDYRKKFHKDIVIDVVCYRKWGHNEGDDPTLTQPMMYKKVSQHPGARALYTEQLIAEGVVTQAEADGYIQAYRDALDKGEHVEQTTLSNFQRTQIDWSKYQGKDWREHIETGLPAADIERLTEKFTAVPEGFALHPTAKRVIEARKAMASGKQAIDWGMAETLAYASLVTKGHGVRISGEDSGRGTFSHRHAVLHDQKREKWDDGTYVPLRHMGEGMGEFLVIDSILNEEAVMAFEYGFACSAPDKLTIWEAQFGDFANGAQVTIDQFLSSGETKWGRLCGLTTILPHGYDGQGPEHSSARVERWLQLCSENNMQVIMPSEASQMFHLLQRQVLGSYRKPLVIFMSKRLLRFKGAMSPLENFTEGSTFRPVIGDTAERASNGSVKRVVLCAGQVYYDLEAGRTERKLEDDVAIVRVEQLYPFPYEEVKAELAKYPNAKSVVWAQEEPKNQGAFYQIRHRIEDVISEEQKLSYAGRPSSASPAVGYSSKHIAQLKQLVEDALAL

SEQ ID NO: 25082 - protein, 67 aa, Neisseria meningitidis; identical to SEQ ID NO: 86

SEQ ID NO: 25083 - protein, 443 aa, Neisseria meningitidis
MLFNHTASELLDLCRRTLDLAKAAGATAAEADFSESLGQSVSVRLGEIEQIEFQQDKSLDITVYVGKRKGRASTADFSEKALQDTVKAAIDIARYTAEDDCAGLADASLMAQHIGDPDLYHEWDLDTEAAVELAKQCEQAALNEDERIENSEGAAVQTGHYQYVYGNTHGFAAHQQGTRHSISCSVVAADENGMQRDYWYDSSCRHQDMDSPTQIGQTAAERTLRRLNSRSIPTGSYPVLFDATVSGGLIGHLVGALSGGSLYRQSSFLIDSIGKQVLPDFLNLREEPHIPRSFRSSYFDAEGVATAPRFVIQNGIVEGYFLSSYSARKLGMQTTGNAGGAHNLYLNHTHETQSDLLKEMGTGLLVTELMGQGANTITGDYSRGAAGFWVENGVIAYPVHEITVAGRLQDMYRDIVGVADDALRRSSNKIGSILIAGMTVAGS

SEQ ID NO: 25084 - protein, 331 aa, Neisseria meningitidis
VNLKNRHFLKLLDFTPEEITAYLDLAAELKAAKKAGREIQRMKGKNIALIFEKTSTRTRCAFEVAARDQGAGVTYLEPSASQIGHKESIKDTARVLGRMYDAIEYRGFGQEVVEELAKYAGVPVFNGLTNEFHPTQMLADALTMREHSGKPLNQTAFAYVGDARYNMGNSLLILGAKLGMDVRIGAPQSLWPSEGIIAAAHAAAKETGAKITLTENAHEAVKNVDFIHTDVWVSMGEPKEVWQERIDLLKDYRVTPELMAASGNPQVKFMHCLPAFHNRETKVGEWIYETFGLNGVEVTEEVFESPASIVFDQAENRMHTIKAVMVAALGD

SEQ ID NO: 25085 - protein, 404 aa, Neisseria meningitidis; identical to SEQ ID NO: 756

SEQ ID NO: 25086 - protein, 81 aa, Neisseria meningitidis
MINHECINQPYGRILKFSRVQAKEMLTADELKENFAQNGQTLAQWARENGFKPRDVYLVIGGQRKGNYGKGYEIAKKLGLK

SEQ ID NO: 25087 - protein, 279 aa, Neisseria meningitidis; identical to SEQ ID NO: 2627

SEQ ID NO: 25088 - protein, 375 aa, Neisseria meningitidis; identical to SEQ ID NO: 18117

SEQ ID NO: 25089 - protein, 228 aa, Neisseria meningitidis
VQADLAYAAERITHDYPKPTGANNTSTVSDYFRNIRAHSIHPRVSVGYDFGDWRIAADYASYRKWNNNKYSVNTKEVRRNRGNSENLKTENQENGSFHAVSSLGLSAIYDFKLNDKFDKFKPYIGARVAYGHVKHQVHSVETETKIIFTTPTKGAKVGGTILDKSMSKPPYHESNSISSLGLGVIAGVGFDITPKLTLDTGYRYHNWGRLENTRFKTHEVSLGMRYRF

SEQ ID NO: 25090 - protein, 389 aa, Neisseria meningitidis
MRKKLTALVLSALPLAAVADVSLYGEIKAGVEGRNYQLQLTEAQAANGGASGQVKVTKAKSRIRTKISDFGSFIGFKGSEDLGEGLKAVWQLEQDVSVAGGGATQWGNRESFIGLAGEFGTLRAGRVANQFDDASQAIDPWDSNNDVASQLGIFKRHDDMPVSVRYDSPDFSGFSGSVQFVPIQNSKSAYTPAHVVVNNKVATHVPAVVGKPGSDVYYAGLNYKNGGFAGNYAFKYARHANVGRNAFELFLIGSATSDQAKGTDPLKNHQVHRLTGGYEEGGLNLALAAQLDLSENADKTKNSTTEIAATASYRFGNAVPRISYAHGFDLIERGKKGENTSYDQIIAGVDYDFSKRTSAIVSGAWLKRNTGIGNYTQINAASVGLRHKF

SEQ ID NO: 25091 - protein, 339 aa, Neisseria meningitidis; identical to SEQ ID NO: 18070

SEQ ID NO: 25092 - protein, 465 aa, Neisseria meningitidis
MTVRIEHDLLGDREIPAEVYWGIHTLRAIENFKISTQKISDVPQFVRSMVMVKKATAQANGELGAVKPEIAAAIEKACDEVLLNNRCLDQFPSDVYQGGAGTSVNMNTNEVIANLALEVLGYEKGRYDIVNPMDHVNASQSTNDAYPTGFRLAVYYSIGELLDKLAVLKNAFAAKAEEFKDVLKMGRTQLQDAVPMTAGQEFQSFQVLLEEEILNLDRTRQLLLEVNLGATAIGTGVNTPKGYAELVVKKLSEVSGLPCKLTENLIEATSDCGAYVMVHGALKRTTVKLSKICNDLRLLSSGPRAGLKEINLPELQAGSSIMPAKVNPVIPEVVNQVCFKVIGNDTTITFAAEAGQLQLNVMEPVIAQCMFETISLLGNAAVNLSDKCVKGITVNREICERYVFNSIGLVTYLNPYIGHHNGDLVGKICAQTGKGVREVVLERGLLSEEELNRILSPENLMNPHL

SEQ ID NO: 25093 - protein, 389 aa, Neisseria meningitidis; identical to SEQ ID NO: 19357

SEQ ID NO: 25094 - protein, 47 aa, Neisseria meningitidis; identical to SEQ ID NO: 17316

SEQ ID NO: 25095 - protein, 675 aa, Neisseria meningitidis
MEVIRYPDSPFKLHQPFPPAGDQPTAIADLLEGLSDGLAYQTLLGVTGSGKTYTMANVIAQSGRPAIIMAHNKTLAAQLYAEMREFFPENAVEYFVSYYDYYQPEAYVPSRDLFIEKDSAINEHIEQMRLSATKNLMTRDDVIIVATVSAIYGIGDPTEYQQMVLSVKEGDTIEQRDIIATLVSMQYERGDLDFKRGSFRVRGDVIDVYPAESSENALRISLFDDEIDRLDMFDPLSGSLHQRVGRYTVFPSSHYVTPRDTVLRACESIKEELRERIDFFTKENRPVEQQRIEQRTRFDLEMLYEMGFCKGIENYSRHFSGKKEGEPPPTLMDYLPDNAIMFIDESHVTVTQIGGMYKGDASRKQNLVDYGFRLPSARDNRPLKFHEFEKVMPQTVFVSATPAKYEEEHAGQVVEQVVRPTGLVDPQIIIRPVATQVDDLMSEINDRIQKGERVLVTTLTKRMAEQLTDYYSELGIKVRYLHSDIDTVERVEIIRDLRLGLFDVLVGINLLREGLDIPEVSLVAILDADKEGFLRSHRSLIQTIGRAARNVNGVAILYADKITDSMKAAIDETERRREKQIKFNEEHGIVPQQIKKQVKDIIDGVYHEEDSGKGRRQGKNKVKVGEIHNEEDTIKEIAKLEKAMQQAARDLQFEEAAVLRDRIRNIKESLLFGAE

SEQ ID NO: 25096 - protein, 64 aa, Neisseria meningitidis; identical to SEQ ID NO: 2003

SEQ ID NO: 25097 - protein, 381 aa, Neisseria meningitidis; identical to SEQ ID NO: 14816

SEQ ID NO: 25098 - protein, 241 aa, Neisseria meningitidis; identical to SEQ ID NO: 400

SEQ ID NO: 25099 - protein, 278 aa, Neisseria meningitidis
MIDLHCHSTVSDGMLSPAEVVRLAHQNGCTLLALTDHDHTGGIAEARAEADRLDLRLINGVEISVTWRGRTIHVVGLDFDERDENLQNLLAQVRQGRLKRLEAIAAKLEKKGIGGAYDGALALAANKEMVSRTHVAEFLIRAGHVKNKQQAFTKYLGDGKSCAVRHEWATLEDCVSAVNGAGGLAVIAHPMRYDLSATAKRNLFEEFKNLGGAGIEVHSGNCCKNDRLNYALLAERFGLLASAGSDFHRLNDFSGGILGACPELPENCRPVWEHFSRH

SEQ ID NO: 25100 - protein, 249 aa, Neisseria meningitidis; identical to SEQ ID NO: 1428

SEQ ID NO: 25101 - protein, 277 aa, Neisseria meningitidis; identical to SEQ ID NO: 18591

SEQ ID NO: 25102 - protein, 296 aa, Neisseria meningitidis
MFPVFHLSGESRRRMLQAASRFPYVFKARAEDSHKGTFGTLAVVGGSAGMSGAPVLAASAAMYLGCGKVWAGFNQDALPFAVIAGFPEIMLDTADGLTKRQGINAWMVGCGLGTDKAAVGTLAGILAEHTDKPVLLDADALNILSTDAETRNLARGCKNLILTPHPAEAARLLGTTVAQVQADRTAAVRKIGAIFGATVVLKGHKTLVAASDTEIYVNESGNAGLATAGSGDVLGGIIGSLLAQGVPVFEAACAGAWLHGAAADVIKESAGIAAGLLAGEIAPAARWLRNRITKSM

SEQ ID NO: 25103 - protein, 306 aa, Neisseria meningitidis
MRIRLGRHNAPDFPHGAAVTIGNFDGVHLGHKHILQKLRLEADARGLPVVAVIFEPQPKEFFASRTGRVPPCRISPLRTKLELLEGTGCIDAVWVLRFDRHFSEISAQGFIDRLLRQTLNTRYLLVGDDFRFGAGREGCFELLAQQPDMQTERTPSVIVEDIRTSSTAVRQALSDGNLAYAKKLLGHDYVLGGRVVHGRKLGRTLNAPTANIRLPGHRYALGGVFVVEADGAFGTRRGVASFGFNPTVDSGCSQKLEVHLFDFQGDLYGQRLNVRFLHKLRDEEKFDGMEELKRQIAADMEAAKCW

SEQ ID NO: 25104 - protein, 84 aa, Neisseria meningitidis; identical to SEQ ID NO: 3171

SEQ ID NO: 25105 - protein, 275 aa, Neisseria meningitidis
MKLDIYALLERALLSGDPDEKGRLTDEAFAAVQNMDGAETNTPPADFPRAGRPDKPVLVAPSQLTPRKMNTAEGYAAMLHAIAHIEFNAVNLALDAAYRFRTLPFQFVRDWVKVAKEEVYHFRLMRDRLRAFGFDYGSFEAHNHLWDMAYKTAYDPLLRMALVPRVLEARGLDVTPGIRAKVAQRGDSETCGVLDIIYRDEVGHVAIGNHWYQHLCRERGLEPVALFRSLITRYDMFIFRGYVNIEAREKAGFSRFELDMLEDFEQGLKQNKNTV

SEQ ID NO: 25106 - protein, 146 aa, Neisseria meningitidis; identical to SEQ ID NO: 11655

SEQ ID NO: 25107 - protein, 216 aa, Neisseria meningitidis; identical to SEQ ID NO: 13452

SEQ ID NO: 25108 - protein, 296 aa, Neisseria meningitidis
MNPKSPLFLRLSDRLDVYIRLMRADKPIGTLLLLWPTYWALWLASDGIPDLAVLAAFTIGTFLMRSAGCVINDFADRDFDGAVERTKNRPFAQGRVKKKEALLLTAFLCLLAALCLIPLNHLTWLMSLPALFLALTYPFTKRFFPIPQLYLGLAFSFGIPMAFAAVAGNVPPQAWILFAANVLWTLAYDTVYAMADKEDDLKIGIKTSAVTFGRYDIAAVMLCHGGFTLLMAVLGAVIGAAWAYWTAIPIVLLLQYRQYAAIKSRVRQICFETFLANNRIGWVWFTAIFAHTFFAK

SEQ ID NO: 25109 - protein, 73 aa, Neisseria meningitidis; identical to SEQ ID NO: 227

SEQ ID NO: 25110 - protein, 346 aa, Neisseria meningitidis
MDISDFDFTLPEKLIAQHPPEVRGSSRLLVALPDMPMQDRVFGDLPDYVEAGDVLVFNNTKVMKARLFGQKDSGGRIEALIERVLDSHTALAHIRSSKSPKPGMGLVFEGGIRAVMVGREGELFCLRFEGGQTVYELLEQNGHLPLPPYIERAADADDDSRYQTVYAKYQGAVAAPTAGLHFTEELLRRLKDKGAVTAEVTLHVGAGTFQPVRVEKIEEHKMHSEWFEVPSETAAAVEAAKARGNKVWAVGTTSMRALESAAHETGHLKDGQGDTDIFITPGYRFNVADRLVTNFHLPKSTLLMLVSAFSGMGHIRAAYRYAVEREYRFFSYGDAMVLGRNEGVVR

SEQ ID NO: 25111 - protein, 377 aa, Neisseria meningitidis
MSTPALLVLADGSVFHGTSIGYEGSTSGEVVFNTSMTGYQEILTDPSYCKQIVTLTYPHIGNTGTNAEDEESRSVYAAGLIIRDLPLLHSNFRASESLHDYLVRNQTVAIADIDTRRLTTLLREKGAQGGAILTGADATVEKAQELIAAFGSMVGKDLAKEVSCTETYEWTEGEWALGKGFVTPDEQPYHVVAYDFGVKTNILRMLASRGCRLTVVPAQTSAQDVLALNPDGVFLSNGPGDPEPCTYAIEAVQKLMESGKPIFGICLGHQLISLAIGAKTLKMRFSHHGANHPVQDLDSGKVVITSQNHGFAVDADTLPANARITHKSLFDNTLQGIELTDKPVFCFQGHPEASPGPQDVGYLFDKFIGNMKAAKRA

SEQ ID NO: 25112 - protein, 96 aa, Neisseria meningitidis; identical to SEQ ID NO: 4744

SEQ ID NO: 25113 - protein, 334 aa, Neisseria meningitidis
MSGAAAALLAGIILYFKSDKKRQENGEWSSGLEYAYILTAVGVFAALSLFMSFTAVFLIFVVLCGTAWGVYKYRLKTHPEISESSHFGDYFGSFFPTVLVLFLIRSFIAEPFQIPSSSMRPGLIKGDFILVGKFSYGLRVPVLNNIFIPTGKIERGDVVVFNYPLQPEMTYIKRIVGIPGDVVEYRNKVLTVNGKPASDIPDGTYRYPDDTDPSEIHNTDMFHSGLDGKSFNILKKEGQPAVSLPVLGKYTSDIMSENGYSIEQSGLEHCQYADDGSGFVCKVPEGRYFAMGDNRDNSADSRYWGFVDDKLVVGKAMFILMNFGDFGRAGTAIR

SEQ ID NO: 25114 - protein, 247 aa, Neisseria meningitidis; identical to SEQ ID NO: 19102

SEQ ID NO: 25115 - protein, 318 aa, Neisseria meningitidis; identical to SEQ ID NO: 46

SEQ ID NO: 25116 - protein, 371 aa, Neisseria meningitidis
MKVGFVGWRGMVGSVLMQRMKEENDFAHIPEAFFFTTSNVGGAAPDFGQAAKTLLDANDVAELAKMDIIVTCQGGDYTKSVFQALRDSGWNGYWVDAASSLRMKDDAIIVLDPVNRNVIDNGLKNGVKNYIGGNCTVSLMLMALGGLFQNDLVEWATSMTYQAASGAGAKNMRELISGMGAVHAQVADELADPAGSILDIDRKVSDFLRSEDYPKANFGVPLAGSLIPWIDVDLGNGQSKEEWKGGVETNKILGRSDNPTVIDGLCVRVGAMRCHSQAITLKLKKDLPVSEIEAILAGANDWVKVIPNEKEASIRELTPAKVTGTLSVPVGRIRKLGMGGEYISAFTVGDQLLWGAAEPLRRVLRIVLGSL

SEQ ID NO: 25117 - protein, 124 aa, Neisseria meningitidis
MIVLHGIPNCDTVKKAKNRLAGYGLEFEFRDFKKQMPSEAEICSWLEQVPLATLLNKRGTSWRKLDAETQQKALFSTAEAVKLMSEMPSLIKRPVLECGGKVYAGFSEETYDGIFNRQAPCRQG

SEQ ID NO: 25118 - protein, 241 aa, Neisseria meningitidis; identical to SEQ ID NO: 18462

SEQ ID NO: 25119 - protein, 218 aa, Neisseria meningitidis; identical to SEQ ID NO: 19343

SEQ ID NO: 25120 - protein, 221 aa, Neisseria meningitidis; identical to SEQ ID NO: 13609

SEQ ID NO: 25121 - protein, 315 aa, Neisseria meningitidis; identical to SEQ ID NO: 18765

SEQ ID NO: 25122 - protein, 189 aa, Neisseria meningitidis
MAAGKHTKHSNQVRIIGGQCRGRKLSFASANGLRPTPDSVREKLFNWLGQDLTGKTVLDLFGGSGALGIEAASRNAKRVLISDNNRQTVQTLQKNSRELGLGQVQIVCSDGIAYLKTVSEQFDVVFLDPPFAWQDWQILFDALKPCLNPRAFVYLEAGRLPDIPDWLTEYREGKSGQSTFELRVFQVAE

SEQ ID NO: 25123 - protein, 273 aa, Neisseria meningitidis; identical to SEQ ID NO: 14267

SEQ ID NO: 25124 - protein, 107 aa, Neisseria meningitidis; identical to SEQ ID NO: 4856

SEQ ID NO: 25125 - protein, 160 aa, Neisseria meningitidis
MGYIKGVFGIKGWLKIAANTEYSDSLLDYPEWHLVKDGKTISVTLEAGKVVNGELQVKFEGINDRDLAFSLRGYTIEIPREAFAPTEEDEYYWTDLVGMTVVNKDHTVLGKVSNLMETGANDVLMIDGEHGQILIPFVSQYIETVDTGSKIITADWGLDY

SEQ ID NO: 25126 - protein, 334 aa, Neisseria meningitidis; identical to SEQ ID NO: 309

SEQ ID NO: 25127 - protein, 263 aa, Neisseria meningitidis; identical to SEQ ID NO: 14166

SEQ ID NO: 25128 - protein, 181 aa, Neisseria meningitidis; identical to SEQ ID NO: 19013

SEQ ID NO: 25129 - protein, 757 aa, Neisseria meningitidis
MNITQILSQELSATTAQINAAIELLDDGATVPFIARYRKEATGGLDDTQLRRLAERLQYLRELEERKAVVLKSIEEQGKLSDDLRAQIEAADNKTALEDLYLPYKPKRRTKAQIAREHGLQPLADVLLAEQPQDVEAAAQGYLNENVPDTKAALDGARAILMEQFAEDAELIGTLRDKLWNEAEIHAQVVGGKETEGEKFSDYFDHREPIRAMPSHRALAVLRGRNEGVLNIALKYRPDDTPITQQSEYEQIIARRFKVSDGHKWLRDTVRLTWRAKIFLSLELEALNRLKEAADTDAITVFARNLKDLLLAAPAGRLTTLGLDPGYKNGVKCAVVDDTGKLLDTVIVYLHQENNMLATLSRLIKKHGVKLIAIGNGTASRETDKIAGELVRGMPEMGLHKIVVSEAGASIYSASELAAREFPDLDVSLRGAVSIARRLQDPLAELVKIDPKSIGVGQYQHDVNQSQLAKSLDAVVEDCVNAVGVDVNTASAPLLARISGLNQTLAQNIVAYRNENGAFDSRKKLLKVPRLGEKTFEQAAGFLRINGGTEPLDASAVHPEAYPVVAKMLAQQGISAAELIGNRERVKQIKASDFTDERFGLPTILDILSELEKPGRDPRGAFQTASFAEGIHEIGDLQVGMILEGVVSNVANFGAFVDIGVHQDGLVHISALSNKFVQDPREVVKAGDVVKVKVLEVDAARKRIALTMRLDDEPGGAKHKMPSENRSRERTAGRKPQRNDRAPANSAMADAFAKLKR

SEQ ID NO: 25130 - protein, 74 aa, Neisseria meningitidis; identical to SEQ ID NO: 801

SEQ ID NO: 25131 - protein, 168 aa, Neisseria meningitidis
MVDAWSVPDFESKICPPEALAARLALLPRPLVFTNGCFDILHRGHVTYLAQARSMGGALVLALNTDASVRRLGKGGDRPINPLENRAAVAAALESVDLVTWFDEDTPAALIEAVKPEILVKGGDWAADKIVGAAETLARGGQVFSIPFLHQTSTTKTLAKIRAAEGGK

SEQ ID NO: 25132 - protein, 122 aa, Neisseria meningitidis; identical to SEQ ID NO: 3130

SEQ ID NO: 25133 - protein, 261 aa, Neisseria meningitidis; identical to SEQ ID NO: 19636

SEQ ID NO: 25134 - protein, 352 aa, Neisseria meningitidis; identical to SEQ ID NO: 19238

SEQ ID NO: 25135 - protein, 179 aa, Neisseria meningitidis
MDFLEIFIMSAFRKILLIISCLLIASCSFVETIFYMAISPEPVVVDFPLGKKTKRSIELKQKIGKPYAISLGTNFIHYDPKQGERWIDDKLNYPYNISVKIFKVEEDGKKLIIDELLTERSRKLGGGVFGAGGKYSMHIYDFYLPEGEYLFEISDNSEYIPLYDEINNSIRIVVNARIQ

SEQ ID NO: 25136 - protein, 63 aa, Neisseria meningitidis; identical to SEQ ID NO: 7354

SEQ ID NO: 25137 - protein, 1044 aa, Neisseria meningitidis
MNKTLKRQVFRHTALYAAILMFSHTGGGGGAQAETHNYAIVMNNQKLPEVKWGQQYQSLVNKENTRQVIHTSGFGIKKNVSLSFNNTDEVVAKKNGTVVFGAATYLPPYGKVSGFDEEKLKERTNALDWIGTTDPGLVGYSYENVTCNSGNCPEVSYKTQFIFDNHQLAKKKTDSKLDIYEDKSRDNSPIYKLQDYPWLGVSFNLGGESSFKPKRQGSLVSSFSEDVTQQNGTQDQYKGKNLVYTTEDYNNQGNRNHQDKHHAIAFYLNAKLHLLDKKGIKDITDKTVQLGVLKPRIDLTEAWKNRHGSFFSNGNWTFEDKGAVSVKLILPEVKAGRCINKSNPNPKAQVLSPALTAPALWFGPVQNGKVQMYSASVSTYPDSSSSRIFLQNLKRKTDPGRPGRYSLATLNKSDIESRKPTFTGRQTIIRLDGGVQQIKLDKSNEATGLNGNTNNNTFGIVKEYSVNPETNEWKKVLLPWTVRSFSNDNEFVKFNKESDKYSQRYRIRENGNNSKRDLGDIVNSPIVAVGGYLATSANDGMVHIFKKGNGGDDRNYSLKLSYIPGTMPRKDIESKDSNLAKELRTFAEKSYVGDRYGVDGGFVLRKVDNLNGQNRVFMFGAMGFGGRGAYALDLTKADGSDPTKASLFDVKDNGNNGNNRVELGYTVGTPQIGKTHDGKYAAFLASGYATKEINSTDNKTALYVYDLESSGTLIKKIDVPGGKGGLSSPTLVDKDLDGIVDIAYAGDRGGKMYRFDLSNQDSSQWTVRTIFEGTKPITSAPAISQLKDKRVVIFGTGSDLSEEDVDNNDIQSIYGIFDNDTDTGFAQDGLGKGLLEQKLEKDKDGKTLFLSDYKRSDGSGDKGWVVKLEAGQRVTVKPTVVLRTAFVTIHKYTGNDKCGAETAILGINTADGGKLTKKSARPIVPEANTAVAQYSGHKKTSSGKSIPIGCMEKGNETVCPNGYVYGKPVNVRYLDEKKTDGFSTTADGDAGGSGIDPAGKRSGKNNRCFSQKGVRTLLMNDLDSLDITGPTCGMKRISWREIFY

SEQ ID NO: 25138 - protein, 366 aa, Neisseria meningitidis; identical to SEQ ID NO: 18457

SEQ ID NO: 25139 - protein, 330 aa, Neisseria meningitidis
MENVNRIVAEGIAAVEAAQDFNALEQIKARYLGKTGELTGLLKTLGQMSPEERKTIGAHINECKNRFQTAFNAKRDALNEAKLQARLAAEALDITLPGRAQEGGSLHPVTLTLQRVVELFHGMGFEVADGPEIEDDFHNFQALNIPANHPARAMQDTFYVENGDVLRTHTSPIQIRYMLDKKEPPIRIIAPGRVYRVDSDATHSPMFHQAEGLWVEEGVTFADLKAVFTDFIRRFFERDDLQVRFRPSFFPFTEPSAEIDIMGENGKWLEVGGCGMVHPNVLKNVNIDSEKYTGFAFGIGLDRFAMLRYNVNDLRLFFDNDLNFLKQFVK

SEQ ID NO: 25140 - protein, 358 aa, Neisseria meningitidis; identical to SEQ ID NO: 18789

SEQ ID NO: 25141 - protein, 349 aa, Neisseria meningitidis
MQNNNEFKIGNRSVGYNHEPLIICEIGINHEGSLKTAFEMVDAAYNAGAEVVKHQTHIVEDEMSDEAKQVIPGNADVSIYEIMERCALNEEDEIKLKEYVESKGMIFISTPFSRAAALRLQRMDIPAYKIGSGECNNYPLIKLVASFGKPIILSTGMNSIESIKKSVEIIREAGVPYALLHCTNIYPTPYEDVRLGGMNDLSEAFLDAIIGLSDHTLDNYACLGAVALGGSILERHFTDRMDRPGPDIVCSMNPDTFKELKQGAHALKLARGGKKDTIIAGEKPTKDFAFASVVADKDIKKGELLSGDNLWVKRPGNGDFSVNEYESLFGKIAACDIRKGAQIKKTDIE

SEQ ID NO: 25142 - protein, 227 aa, Neisseria meningitidis; identical to SEQ ID NO: 1151

SEQ ID NO: 25143 - protein, 495 aa, Neisseria meningitidis
MLKKIKKALFQPKKFFQDSMWLTTSPFYLTPPRNNLFVISNLGQLNQVQSLIKIQKLTNNLLVILYTSKNLKMPKLVHQSANKNLFESIYLFELPRSPNNITPKKLLYIYRSYKKILNIIQPAHLYMLSFTGHYSYLISIAKKKNITTHLIDEGTGTYAPLLESFSYHPTKLERYLIGNNLNIKGYIDYFDILHVPFPEYAKKIFNAKKYNRFFAHAGGISINNNIANLQKKYQISKNDYIFVSQRYPISDDLYYKSIVEILNSISLQIKGKIFIKLHPKEMGNNYVMSLFLNMVEINPRLVVINEPPFLIEPLIYLTNPKGIIGLASSSLIYTPLLSPSTQCLSIGELIINLIQKYSMVENTEMIQEHLEIIKKFNFINILNDLNGVISNPLFKTEETFETLLKSAEFAYKSKNYFQAIFYWQLASKNNITLLGHKALWYYNALYNVKQIYKMEYSDIFYIDNISVDFHSKDKLTWEKIKHYYYSADNRIGRDR

SEQ ID NO: 25144 - protein, 326 aa, Neisseria meningitidis; identical to SEQ ID NO: 8539

SEQ ID NO: 25145 - protein, 305 aa, Neisseria meningitidis
MNVSVLNFGNTPVSFRQDGFLNATAIASHFGKLPKDYLKSEQTQQYISALAENLSVRRKILTEANQIVIVKRGGSEQGTWLHPKLAIHFARWLNPKFAVWCDEQIEILLNGKISDGIKTVTPKPTRALPDGLTGEQIEAVKKLHNALTKSAPKEAQARIAITLWSAVKSKFGCSYKEVPAEQFPEVLSVMSRVAVENGVLYGEVLDREPLPAPQPALPISGNALYDLAVAVSYGAWAIQMGRDVSLPLKQLGCKQAVTMWTVWAETRSRLKAAANALEALNAHADAEHAAKIRPILPEIRNLSSV

SEQ ID NO: 25146 - protein, 144 aa, Neisseria meningitidis; identical to SEQ ID NO: 4312

SEQ ID NO: 25147 - protein, 284 aa, Neisseria meningitidis
MPPIPAPSAPSEHTVAWVFGQPVTDLPQDLFIPPDALKVVLGSFQGPLDLLLYLIRKQNIDVLDIPMVKITEQYLHYIAQIETYQFDLAAEYLLMAAMLIEIKSRLLLPRTETVEDEEADPRAELVRRLLAYEQMKLAAQGLDALPRAGRDFAWAYLPLEIAVEAKLPEVYITDLTQAWLGILSRAKHTRSHEVIKETISVRAQMTAILRRLNKHGICRFHDLFNPEQGAAYVVVNFISLLELAKEGLVRIVQEVGFGEIRISLNHEGAHSDGISGTRGGRDVF

SEQ ID NO: 25148 - protein, 92 aa, Neisseria meningitidis; identical to SEQ ID NO: 18803

SEQ ID NO: 25149 - protein, 916 aa, Neisseria meningitidis
MTDATIRHDHKFALETLPVSLEDEMRKSYLDYAMSVIVGRALPDVRDGLKPVHRRVLYAMHELKNNWNAAYKKSARIVGDVIGKYHPHGDTAVYDTIVRMAQNFAMRYVLIDGQGNFGSVDGLAAAAMRYTEIRMAKISHEMLADIEEETVNFGPNYDGSEHEPLVLPTRFPTLLVNGSSGIAVGMATNIPPHNLSDTVNACLRLLDAPDTEIDELIDIIQAPDFPTGATIYGLSGVREGYKTGRGRVVMRGKTHIEPIGRNGEREAIVIDEIPYQVNKAKLVEKIGDLVREKTLEGISELRDESDKSGMRVVIELKRNENAEVVLNQLYKLTPLQDSFGINMVVLVDGQPRLLNLKQILSEFLRHRREVVTRRTLFRLKKARHEGHIAEGKAVALSNIDEIIRLIKESPNAVEAKDKLLAHPWRSSLVEEMLTRSGLDLEMMRPEGLAANIGLKEQGYYLSEIQADAILRMSLRNLTGLDQEEIVESYKNLMGKIIDFVDILSKPERITQIIRDELEEIKTNYGDERRSEINPFGGDIADEDLIPQREMVVTLTHGGYIKTQPTTDYQAQRRGGRGKQAAATKDEDFIETLFVANTHDYLMCFTNLGKCHWIKVYKLPEGGRNSRGRPINNVIQLEEGEKVSAILAVREFPEDQYVFFATAQGMVKKVQLSAFKNVRAQGIKAIALKEGDYLVGAAQTGGADDIMLFSNLGKAIRFNEYWEKSGNDEAEDADIETEISDGIEDETADSENALPSGKHGVRPSGRGSGGLRGMRLPADGKIVSLITFAPETEESGLQVLTATANGYGKRTPIADYSRKNKGGQGNIAINTGERNGDLVAATLVGETDDLMLITSGGVLIRTKVEQIRETGRAAAGVKLINLDEGETLVSLERVAEDESELSDASVISNVTEPEVEN

SEQ ID NO: 25150 - protein, 216 aa, Neisseria meningitidis; identical to SEQ ID NO: 4887

SEQ ID NO: 25151 - protein, 642 aa, Neisseria meningitidis; identical to SEQ ID NO: 2342

SEQ ID NO: 25152 - protein, 178 aa, Neisseria meningitidis
MNTLQKGFTLIELMIVIAIVGILAAVALPAYQDYTARAQVSEAILLAEGQKSAVTEYYLNHGEWPGNNTSAGVATSADIKGKYVQSVTVANGVVTAQMASSGVNKEIQGRKLSLWAKRQNGSVKWFCGQPVTRDATNADDVTADGNDKIDTKHLPSTCRDDSSVVCIETPPTAFYKNT

SEQ ID NO: 25153 - protein, 131 aa, Neisseria meningitidis; identical to SEQ ID NO: 18330

SEQ ID NO: 25154 - protein, 215 aa, Neisseria meningitidis; identical to SEQ ID NO: 1509

SEQ ID NO: 25155 - protein, 55 aa, Neisseria meningitidis; identical to SEQ ID NO: 1257

SEQ ID NO: 25156 - protein, 323 aa, Neisseria meningitidis; identical to SEQ ID NO: 3380

SEQ ID NO: 25157 - protein, 520 aa, Neisseria meningitidis
VFQVGKAMDGRRWAVWGAFALLPSAFLAVMVVAPLWAVAAYDGLAWRAVLSDAYMLKRLAWTVFQAAATCVLVLPLGVPVAWVLARLAFPGRALVLRLLMLPFVMPTLVAGVGVLALFGADGLLWRGRQDTPYLLLYGNVFFNLPVLVRAAYQGFVQVPAARLQTARTLGAGAWRRFWDIEMPVLRPWLAGGVCLVFLYCFSGFGLALLLGGSRYATVEVEIYQLVMFELDMAVASVLVWLVLGVTAAAGLLYAWFGRRAVSDKAVSPVMPSPPQSVGEYVLLAFAAEVLSVCCLFPLLAIVVKAWSAGESWRVLMESETWQAVWNTLRFSAAAVFAAAVLGVVYAAAARRSAWMRGLMFLPFMVSPVCVSAGVLLLYPQWTASLPLLLAMYALLAYPFVAKDVLSAWDALPPDYGRAAAGLGANGFQTACRITFPLLKPALRRGLTLAAATCVGEFAATLFLSRPEWQTLTTLIYAYLGRAGEDNYARAMVLTLLLSAFALGIFLLLDNGEGGKQTETL

SEQ ID NO: 25158 - protein, 96 aa, Neisseria meningitidis; identical to SEQ ID NO: 5810

SEQ ID NO: 25159 - protein, 157 aa, Neisseria meningitidis; identical to SEQ ID NO: 7285

SEQ ID NO: 25160 - protein, 144 aa, Neisseria meningitidis; identical to SEQ ID NO: 5717

SEQ ID NO: 25161 - protein, 325 aa, Neisseria meningitidis; identical to SEQ ID NO: 19566

SEQ ID NO: 25162 - protein, 128 aa, Neisseria meningitidis; identical to SEQ ID NO: 605

SEQ ID NO: 25163 - protein, 106 aa, Neisseria meningitidis; identical to SEQ ID NO: 18796

SEQ ID NO: 25164 - protein, 425 aa, Neisseria meningitidis; identical to SEQ ID NO: 19625

SEQ ID NO: 25165 - protein, 469 aa, Neisseria meningitidis; identical to SEQ ID NO: 19963

SEQ ID NO: 25166 - protein, 515 aa, Neisseria meningitidis; identical to SEQ ID NO: 654

SEQ ID NO: 25167 - protein, 480 aa, Neisseria meningitidis
MHPTYSAVQARLLEANRLSPELLAKSLCIIGAHHVDYADIYCQRTAYESWHLEEGIVKSGSFQINQGVGVRAVSGDKTAFAYADSLCIDSINRSARAVRAIGAAGGKVSAKMPSETRGKPVCSASDPIAGLDSAAKVALLNKVEAIAKAADPRIVQVMAGLTCEYDMVYLARLDGKHAADIRPMVRMNVTVIAKQGERREQGSAGGGGRYDLAYFDENLVHRFVDSAVKQALTNLESRPAPAGEMTVVLGNGWPGVLLHEAVGHGLEGDFNRKGTSVFSGRIGERVAAKGVTVVDQGDIAGRRGSLNIDDEGNETRRTVLIEDGILVGYMQDETNARLMGTQSTGNGRRESYASVPMPRMTNTFMENGGYEPDEIIASIDKGIYAVNFGGGQVDITSGKFVFSASEAWWVEGGRLQYPVKGATIIGNGPEVLKHVSMIGNDTALDSGVGVCGKEGQSVPVGVGQPTLRIDAGLTVGGSAI

SEQ ID NO: 25168 - protein, 502 aa, Neisseria meningitidis
MQTDCDVLIAGNGLAALTLALSLPESFRIVILCKNRLDDTASRHAQGGIAAAWSGEDDIEKHVADTLEASAGLCDEAAVRTILSQGKPAIEWLLAQGVAFDRNHNDLHLTREGGHTCRRIAHVADYTGEAVMQSLLAQIRRRPHIRVCERQMALDIQTESGVACGLIVLDRRTQETYLIRARHTVLAGGGLGQIYAATTTPPECTGDAIAMAIRAGCAVENLEFIQFHPTGLARSSENGRTFLISEAVRGEGGILTNQAGERFMPYYDRRAELAPRDIVARAIAAEIAKQTQDFVSLDISHQPAAFVRRHFPSIHRHCLSQCGLDITRQAIPVRPVQHYTCGGIQTDPCGRTSLPQLYSLGETACTGLHGANRLASNSLLECVVTARLAAQTIADGQAFQAKTSPRPSESLSSEAGIFSDGIQSAFSRPVLQAFNQRHLGILRNDTGLRCAIAQLRLWKQNQTEPHTASEYENRNLLECSLAVAQAAYRRRQNIGAHFNSDC

SEQ ID NO: 25169 - protein, 311 aa, Neisseria meningitidis; identical to SEQ ID NO: 5677

SEQ ID NO: 25170 - protein, 464 aa, Neisseria meningitidis; identical to SEQ ID NO: 19915

SEQ ID NO: 25171 - protein, 321 aa, Neisseria meningitidis; identical to SEQ ID NO: 24871

SEQ ID NO: 25172 - protein, 868 aa, Neisseria meningitidis; identical to SEQ ID NO: 19076

SEQ ID NO: 25173 - protein, 289 aa, Neisseria meningitidis
LTKQILMNTISSIMSLENFQLIKTQLGVPSYENDRVAIYQGDCIQLMDKISKGSFQMTITSPPYNIGKEYESILDLEHYLEWCERWMQSIHHLTEDSGCFWLNLGYLHVEKKGLAVPIPYLLWDKTNFFLLQEVVWNYAAGVACRNRFSPRNEKLLWYVKNPAKYTFNLDAVRDPNVKYPNQKKNGKLKCNPLGKNPTDVWQIAKVTSGRNRSSRERTAHPAQFPLELIERIIRASSNQNDVILDPFIGSGTTALAGLKNNRFVIGFEINDEYIDIIKERFKEYDLQNT

SEQ ID NO: 25174 - protein, 336 aa, Neisseria meningitidis
MHIGGYFIDNPIALAPMAGITDKPFRRLCRDFGAGWAVCEMLTSDPTLRNTKKTLHRSDFADEGGIVAVQIAGSDPQQMADAARYNVSLGAQVIDINMGCPAKKVCNAQAGSALMQNEPLVAAILEAVVRAVDVPVTLKTRLGWHDDHKNLPAVARIAEDCGIAALAVHGRTRTQMYKGEAAYDLIAETKCRLNIPVWVNGDITSPQKAQAVLKQTAADGIMIGRGAQGRPWFFRDLKHYAEHGVLPPALSLAECSAAILNHVRAMHAFYGETAGVRIARKHIGWYIDEMPDGEQTRREINRLDSAAAQYDMLAGYLERLAGKTDRWACAYRQNAV

SEQ ID NO: 25175 - protein, 45 aa, Neisseria meningitidis; identical to SEQ ID NO: 645

SEQ ID NO: 25176 - protein, 852 aa, Neisseria meningitidis; identical to SEQ ID NO: 18475

SEQ ID NO: 25177 - protein, 74 aa, Neisseria meningitidis; identical to SEQ ID NO: 444

SEQ ID NO: 25178 - protein, 160 aa, Neisseria meningitidis; identical to SEQ ID NO: 236

SEQ ID NO: 25179 - protein, 436 aa, Neisseria meningitidis
MNTPHPRPKIAVIGAGWAGLSAAVTLARHADVTLFEAGRQAGGRARTLAGNTDGFGFLDNGQHILLGAYRGVLRLMKTIGSDPRAAFLRVPLHWHMHGGLQFRALPLPAPLHILGGVLLARRAPTAFKAKLLADMSDLQKSARLGQPDTTVAQWLKQRNVPRAAVMQFWQPLVWGALNTPLETASLRVLCNVLSDGVLTKKSGSDYLLPKQDLGAIVAEPALADLQRLGADIRLETRVCRLNTLPDGKVLVNGEAFDAAVPATAPYHAAALLPEGTPEHVQTAYQNLRYHAITTVYLRYAEPVRLPAPLTGLADGTVQWLLCRGRLGLPENEVSAVISVSDRVGAFTNRAWADKVHADLKRILPHLGEPEAVRVITEKRATTAADAPPPDLSWLHRHRIFPAGDYLHPDYPATLEAAVQSGFAAAETCLQSLSDAV

SEQ ID NO: 25180 - protein, 123 aa, Neisseria meningitidis; identical to SEQ ID NO: 3099

SEQ ID NO: 25181 - protein, 318 aa, Neisseria meningitidis; identical to SEQ ID NO: 18259

SEQ ID NO: 25182 - protein, 206 aa, Neisseria meningitidis
MTKLYAEIAKMETQDDDTVKVWGYASSEEIDSDGEVIAAAAMKAAIPDYMKFGAGREMHGSNAAGTAIEINVEDDGITFFGAHIIDPVVVSKVKTGVYKGFSIGGSVTARDDLNKSQITGLKLTEISLVERPANPDAVSTCFKADKGAEAVNNDTEHNATYFSHFPSKQKSTDGGRCPFPYRFPYFFTAVVAGLAGPFGAGAPTEA

SEQ ID NO: 25183 - protein, 257 aa, Neisseria meningitidis
MNTIADVQSSRDLRNLPINQVGIKDLRFPITLQTAEGIQSTVARLTMTVYLPAEQKGTHMSRFVALMEQHTEALDFAQLRRLTAEMVALLDSRAGKISVSFPFFRKKTAPVSGIRSLLDYDVSLTGEIKDGAYGHSMKVMIPVTSLCPCSKEISQYGAHNQRSHVTVSLTADAEVGIEEVIDYVEAQASCQLYGLLKRPDEKYVTEKAYENPKFVEDMVRDVATSLIADKRIKSFVVESENFESIHNHSAYAYIAYP

SEQ ID NO: 25184 - protein, 60 aa, Neisseria meningitidis; identical to SEQ ID NO: 2489

SEQ ID NO: 25185 - protein, 234 aa, Neisseria meningitidis; identical to SEQ ID NO: 6533

SEQ ID NO: 25186 - protein, 55 aa, Neisseria meningitidis; identical to SEQ ID NO: 7238

SEQ ID NO: 25187 - protein, 678 aa, Neisseria meningitidis
MTDNALLHLGEEPRFDQIKTEDIKPALQTAIAEAREQIAAIKAQTHTGWANTVEPLTGITERVGRIWGVVSHLNSVADTPELRAVYNELMPEITVFFTEIGQDIELYNRFKTIKNSPEFDTLSPAQKTKLNHDLRDFVLSGAELPPEQQAELAKLQTEGAQLSAKFSQNVLDATDAFGIYFDDAAPLAGIPEDALAMFAAAAQSEGKTGYKIGLQIPHYLAVIQYADNRELREQIYRAYVTRASELSDGGKFDNTANIDRTLANALQTAKLLGFKNYAELSLATKMADTPEQVLNFLHDLARRAKPYAEKDLAEVKAFARESLNLADLQPWDLGYASEKLREAKYAFSETEVKKYFPVGKVLNGLFAQIKKLYGIGFTEKTVPVWHKDVRYFELQQNGETIGGVYMDLYAREGKRGGAWMNDYKGRRRFSDGTLQLPTAYLVCNFAPPVGGREARLSHDEILILFHETGHGLHHLLTQVDELGVSGINGVEWDAVELPSQFMENFVWEYNVLAQMSTHEETGEPLPKELFDKMLAAKNFQRGMFLVRQMEFALFDMMIYSEDDEGRLKNWQQVLDSVRKEVAVIQPPEYNRFALSFGHIFAGGYSAGYYSYAWAEVLSADAYAAFEESDDVAATGKRFWQEILAVGGSRSAAESFKAFRGREPSIDALLRHSGFDNAA

SEQ ID NO: 25188 - protein, 492 aa, Neisseria meningitidis
MKYKDLRDFIAMLEQQGKLKRIAHPVSPHLEMTEIADRVLRAEGPALLFENPVKPDGTRYGYPVLANLFGTPERVAMGMGADSVSKLREIGQTLAYLKEPEPPKGIKDAFSKLPLLKDIWSMAPNVVKNAPCQEIVWEGENVDLYKLPIQHCWPEDVAPLVTWGLTVTRGPHKKRQNLGIYRQQLIGKNKLIMRWLSHRGGALDYQEFRKLNPDTPYPVAVVLGCDPATILGAVTPVPDTLSEYQFAGLLRGSRTELVKCIGNDLQVPARAEIVLEGVIHPNETALEGPYGDHTGYYNEQDYFPVFTVERITMRENPIYHSTYTGKPPDEPAVLGVALNEVFVPLLQKQFPEITDFYLPPEGCSYRMAVVSMKKQYAGHAKRVMMGCWSFLRQFMYTKFIIVVDDDVNVRDWKEVIWAVTTRMDPVRDTVLVENTPIDYLDFASPVSGLGGKMGLDATNKWPGETDREWGRVIKKDPAVTAKIDGIWEELGL

SEQ ID NO: 25189 - protein, 136 aa, Neisseria meningitidis
MIEFVRAKKRLLWAFVLLLVWTCGYRYAADKAEAKQTALIATYRHSSMVAAEQYALQLKKAQDERQRWYDFSQKQGRKPVKKQYPPQTKKAGYLKTKEELLAELACLKAEMAALKKLDALIYGKEVRQKERNSSQG

SEQ ID NO: 25190 - protein, 259 aa, Neisseria meningitidis
MSATIPPKIIRYDSNPTDVYFFGTCVLDLFMPEAGMDAIALIEQQGIRVHFPMAQSCCGQPAYSSGHPTEAFDVARAQLDLFPEEWPIVVPSGSCGGMMKHHWPTLFKGSEYEERAVDCAGRIIEFTHFLLAIGFKPEDKGEPLKVAVHTSCAARREMNVHLSGWQLIDGMENVERIVHDHESECCGFGGTFSVKQADISGAMVTDKVAALKETGATEIISADCGCMMNIGGKIAKDEPDMPRPKHIASFLLERTGGKA

SEQ ID NO: 25191 - protein, 338 aa, Neisseria meningitidis; identical to SEQ ID NO: 19647

SEQ ID NO: 25192 - protein, 178 aa, Neisseria meningitidis; identical to SEQ ID NO: 1654

SEQ ID NO: 25193 - protein, 250 aa, Neisseria meningitidis
MITLPSLNNLPSKWDEIRYWLETRVCECGVMPHPNLTECEAGQFDRDFWDNIGCAPEEYVRIRRAIRLLEARYPDSLNELVCAAIATPLGEMLAVFGNKGLCLLEFVGQKHMEQEIAAVQKALRGRFVFREDERTQLLRQELDLYFKGRLKTFATPLEQIGTEFQKQAWDALLAIPYGETRSYKEQAQRLGNPNAVRAVAAANGQNKVSILIPCHRVIGSDGKLTGYAGGLNRKQFLLALERGEVQTALF

SEQ ID NO: 25194 - protein, 319 aa, Neisseria meningitidis
MKPVFLDFEQPIAELTNKIDELRFVQDESAVDISDEIHRLQKKSNDLTKSIFSKLTPAQISQVSRHPQRPYTLDYIEALFTDFEELHGDRHFADDYAIVGGLARFNGQSVMVVGHQKGRDTKEKIRRNFGMPRPEGYRKALRLMKTAEKFGLPVMTFIDTPGAYPGIGAEERGQSEAIGKNLYELTRLHVPVLCTVIGEGGSGGALAVAVGDYVNMLQYSTYSVISPEGCASILWKTAEKAADAAQALGITADRLQKLDLVDTVIKEPLGGAHRDFGQTMKNVKAVLEKQLHEAQSIPLADLLSRRFDRIMAYGKFSEQ

SEQ ID NO: 25195 - protein, 94 aa, Neisseria meningitidis; identical to SEQ ID NO: 11561

SEQ ID NO: 25196 - protein, 431 aa, Neisseria meningitidis
MPAPDLGFALSLPPKKAIEWLESKKVTAESYRNLTASEIAKVYTIARMTDLDMLNDIKTSMVESAKSGQSFDDWRKGILNLLSNKGWLHPNGHNGKDIIDPATGEVFGSPRRLETIYRTNMQTAYNAGQYQGYMANIDARPYWMYDAVGDSRTRPAHSAIDGLVYRYDDPFWATFYPPNGYNCRCSVIALSERDVERQGRIVGQSTADNLVETHKIYNKKGDSYPTTAYKAPDGSLYTADKGFGYNAGRMNYRPDLDKYDRALAHQFAKAEMGGADFKTSFKQLEKEFYEVKQRLDIDGKPDKEQKIKIRNALSRQLKFAAGVLSKETQELAGMTRATVWLSDDTLVKQVDSREGQNFDDSYYAFLPDMLQNPEHVIRDNRELIFTARYKGSALWAVLKYIKEVDEIYLQSYRISNDKEIAKFMAKKKVLK

SEQ ID NO: 25197 - protein, 159 aa, Neisseria meningitidis; identical to SEQ ID NO: 19574

SEQ ID NO: 25198 - protein, 282 aa, Neisseria meningitidis; identical to SEQ ID NO: 1327

SEQ ID NO: 25199 - protein, 215 aa, Neisseria meningitidis; identical to SEQ ID NO: 19614

SEQ ID NO: 25200 - protein, 359 aa, Neisseria meningitidis
MNIQNIRTLLDTVAVPNTARTLGGEKAVRSVEQRSDGIHIALHFGFPVAHIASETADRIQEILMPLTGDTHIHLSMDTEIGTHKVQPGVTTIKGVKNIIAVASGKGGVGKSTTTANLAAAMARMGARVGVLDADLYGPSQPTMLGVDDRKPDQKNQKLIPVESSDGIQVMSIGFLVDTDQAVVWRGPMVSQALQQLMFQSEWDEVDYLFIDLPPGTGDIQLTLSQRIPVTGSVIVTTPQDIALIDARKAVDMFRKVNIPILGVLENMSVHICSNCGHSEALFGTDGGKDLAARLNVPLLGQLPLSLPVREAMDGGTPAQLFDEHPAIAKIYTDAAFQIALSIADKGKDFSSRFPKIVVE

SEQ ID NO: 25201 - protein, 375 aa, Neisseria meningitidis; identical to SEQ ID NO: 777

SEQ ID NO: 25202 - protein, 93 aa, Neisseria meningitidis; identical to SEQ ID NO: 17115

SEQ ID NO: 25203 - protein, 100 aa, Neisseria meningitidis; identical to SEQ ID NO: 20013

SEQ ID NO: 25204 - protein, 111 aa, Neisseria meningitidis; identical to SEQ ID NO: 8680

SEQ ID NO: 25205 - protein, 636 aa, Neisseria meningitidis
MNILSVENASFAVGHVALLDKTSFQLDSGEKIGLIGRNGAGKSSFLKILAGLQKLDDGQIIVQNNLKIVYVPQESFFDKDATVFDTVAEGLGKIRDLLRRYHRVGHELENGSGEALLKELNELQLEIEAKDGWKLDAAVKQTLGELGLPENEKIGNLSGGQKKRVALAQAWVQKPDVLLLDEPTNHLDIDAIIWLENLLKAFEGSLVVITHDRRFLDNIATRIVELDRGILRSYPGSFSKYSEKKAQELAVEAEHNRLFDKFHAQEEAWIRKGIEARRTRNEGRVRRLEELRRQRAERRNVQGQVNFKLDSGEKSGKIIAELEHTSFAYGGKVIMDKFSAILQRGDKIGLIGPNGIGKTTFLKLILGELQPTYGRIRIGSKQEVAYFDQFRSALNENETVFYTLGQGNDYVEVGGKKKHVMSYLEDFLFPPARAQSPVSSLSGGERNRLLLAKLFTRPANILVLDEPTNDLDIDTQELLEDLLRDYQGTVFLVSHDRMFLDNVITQSLVFEGNGRLKEYIGGYQDYIDAKSREAKIQTESAPKTADAEPVKEKPKANRTVKLSYKEQRELDALPDEIAALEAEQAEINAQLSDPEIFKDYEKAGALQSRAEEIEMLLLEKLERWELLETKQNGNAV

SEQ ID NO: 25206 - protein, 418 aa, Neisseria meningitidis; identical to SEQ ID NO: 19761

SEQ ID NO: 25207 - protein, 250 aa, Neisseria meningitidis; identical to SEQ ID NO: 18054

SEQ ID NO: 25208 - protein, 302 aa, Neisseria meningitidis; identical to SEQ ID NO: 1790

SEQ ID NO: 25209 - protein, 254 aa, Neisseria meningitidis
MCSCLVVKNTVIGSGRTKIAVPLVARDAAELSAVLEQIKNMPFDIAEFRADFLECAGSIGEVLRHTQTVRDALPDKPLLFTFRRHGEGGSFPCSDDYYFELLDALIESRLPDIIDIELFSGETAVRRAVANAQKNGIAALLCNHEFHRTPPQEEIVCRLKQMEDCGADICKIAVMPQSAEDVLTLLSATLEAKRLAAKPIVTMSMGQTGTVSRLAGQVFGSSITFGSGTQNSAPGQIGVSALRAALDCLESGAD

SEQ ID NO: 25210 - protein, 122 aa, Neisseria meningitidis; identical to SEQ ID NO: 6208

SEQ ID NO: 25211 - protein, 473 aa, Neisseria meningitidis; identical to SEQ ID NO: 19022

SEQ ID NO: 25212 - protein, 251 aa, Neisseria meningitidis; identical to SEQ ID NO: 15704

SEQ ID NO: 25213 - protein, 197 aa, Neisseria meningitidis; identical to SEQ ID NO: 6180

SEQ ID NO: 25214 - protein, 604 aa, Neisseria meningitidis
MSEHDMQNTNPPLPPLPPEITQLLSGLDAAQWAWLSGYAWAKAGNGASAGLPALQTALPTAEPFSVTVLSASQTGNAKSVADKAADSLEAAGIQVSRAELKDYKAKNIAGERRLLLVTSTQGEGEPPEEAVVLHKLLNGKKAPKLDKLQFAVLGLGDSSYPNFCRAGKDFDKRFEELGAKRLLERVDADLDFTASANAWTDNIAALLKEEAAKNRATPAPQATPPADLQTASEGRYCKAAPFPAALLANQKITARQSDKDVRHIEIDLSGSDLHYLPGDALGVWFDNDPALVREILDLLGIDQATEIQAGGKTLPVASALLSHFELTQNTPAFVKGYASFADDDELDRIAADNAVLQGFVQSTPIADVLHRFPAKLTAEQFAGLLRPLAPRLYSISSSQAEVGDEVHLTVGAVRFEHEGRARAGGASGFLADRLEEDGTVRVFVERNDGFRLPEDSRKPIVMIGSGTGVAPFRAFVQQRAAENAEGKNWLIFGNPHFAADFLYQTEWQQFAKDGFLHRYDFAWSRDQEEKIYVQDKIREQAEGLWQWLQEGAHIYVCGDAAKMAKDVEAALLDVIIGAGHLDEEGAEEYLDMLREEKRYQRDVY

SEQ ID NO: 25215 - protein, 517 aa, Neisseria meningitidis; identical to SEQ ID NO: 3152

SEQ ID NO: 25216 - protein, 416 aa, Neisseria meningitidis; identical to SEQ ID NO: 19980

SEQ ID NO: 25217 - protein, 614 aa, Neisseria meningitidis
MLPNRFKMLTVLTAALIAGQVSAAGSGAGDMKQPKEVGKVLRKHQRYSEEEIKNERARLAAVGERVNQIFTLLGGETALQKGQAGTALATYMLMLERTKSPEVAERALEMAVSLNAFEQAEMIYQKWRQIEPIPGKAQKRAGWLRNVLRERGNQHLDGLEEVLAQADEGQNRRVFLLLAQAAVQQDGLAQKASKAVRRAALKYEHLPEAAVADVVFSVQGREKEKAIGALQRLAKLDTEILPPTLMTLRLTARKYPEILDGFFEQTDTQNLSAVWQEMEIMNLVSLHRLDDAYARLNVLLERNPNADLYIQAAILAANRKEGASVIDGYAEKAYGRGTEEQRSRAALTAAMIYADRRDYAKVRQWLKKVSAPEYLFDKGVLAAAAAVELDGGRAALRQIGRVRKLPEQQGRYFTADNLSKIQMLALSKLPDKREALRGLDKIIEKPPAGSNTELQAEALVQRSVVYDRLGKRKKMISDLERAFRFAPDNAQIMNNLGYSLLSDSKRLDEGFALLQTAYQINPDDTAVNDSIGWAYYLKGDAESALPYLRYSFENDPEPEVAAHLGEVLWALGERDQAVDVWTQAAHLTGDKKIWRETLKRHGIALPQPSRKPRK

SEQ ID NO: 25218 - protein, 344 aa, Neisseria meningitidis; identical to SEQ ID NO: 19131

SEQ ID NO: 25219 - protein, 522 aa, Neisseria meningitidis; identical to SEQ ID NO: 14570

SEQ ID NO: 25220 - protein, 308 aa, Neisseria meningitidis; identical to SEQ ID NO: 18204

SEQ ID NO: 25221 - protein, 119 aa, Neisseria meningitidis; identical to SEQ ID NO: 16438

SEQ ID NO: 25222 - protein, 288 aa, Neisseria meningitidis; identical to SEQ ID NO: 2832

SEQ ID NO: 25223 - protein, 364 aa, Neisseria meningitidis; identical to SEQ ID NO: 6346

SEQ ID NO: 25224 - protein, 144 aa, Neisseria meningitidis; identical to SEQ ID NO: 3188

SEQ ID NO: 25225 - protein, 262 aa, Neisseria meningitidis; identical to SEQ ID NO: 19454

SEQ ID NO: 25226 - protein, 119 aa, Neisseria meningitidis; identical to SEQ ID NO: 6447

SEQ ID NO: 25227 - protein, 233 aa, Neisseria meningitidis; identical to SEQ ID NO: 8818

SEQ ID NO: 25228 - protein, 273 aa, Neisseria meningitidis; identical to SEQ ID NO: 221

SEQ ID NO: 25229 - protein, 274 aa, Neisseria meningitidis
VNRTAFCCLSLTAALILTACSSGGGGVAADIGAGLADALTAPLDHKDKSLQSLTLDQSVRKNEKLKLAAQGAEKTYGNGDSLNTGKLKNDKVSRFDFIRQIEVDGQLITLESGEFQVYKQSHSALTALQTEQVQDSEHSGKMVAKRQFRIGDIAGEHTSFDKLPEGGRATYRGTAFGSDDASGKLTYTIDFAAKQGHGKIEHLKSPELNVDLAASDIKPDKKRHAVISGSVLYNQAEKGSYSLGIFGGQAQEVAGSAEVETANGIRHIGLAAKQ

SEQ ID NO: 25230 - protein, 130 aa, Neisseria meningitidis; identical to SEQ ID NO: 4345

SEQ ID NO: 25231 - protein, 153 aa, Neisseria meningitidis
VSGEQTLETAALMCEIPQTTARAWKRADKEKGDDWDKMRAAYTLAGGGIEDLSRAMLAGFMVQYNSTMTMLQDSSTEDLPPSDRAKLLASLADAFTKTVSANARVMPETSKLATALELIEFLMAFVQEKHPKHLPAFVEVLEPFGAEVEKKFG

SEQ ID NO: 25232 - protein, 301 aa, Neisseria meningitidis; identical to SEQ ID NO: 1112

SEQ ID NO: 25233 - protein, 317 aa, Neisseria meningitidis; identical to SEQ ID NO: 11285

SEQ ID NO: 25234 - protein, 346 aa, Neisseria meningitidis; identical to SEQ ID NO: 8941

SEQ ID NO: 25235 - protein, 601 aa, Neisseria meningitidis
MRKVCASARTRSMIYGSMPSEKLTIFQTAFVMQVNIQIPYILPRCVRAEDTPYACYLKQLQVTKDVNWNQVQLAYDKWDYKQEGLTGAGAAIIALAVTVVTAGAGAGAALGLNGAAAAATDAAFASLASQASVSLINNKGNIGNTLKELGRSSTVKNLMVAVATAGVADKIGASALNNVSDKQWINNLTVNLANAGSAALINTAVNGGSLKDNLEANILAALVNTAHGEAASKIKQLDQHYITHKIAHAIAGCAAAAANKGKCQDGAIGAAVGEIVGEALVKNTDFSRMSATEIEKAKAKITAYSKLVAGTASAVVGGDVNTAANAATVAVENNTLYPRCVGAKCDEFQKEQQKWIRENPEEYREVLLLQTGFIPIIGDIQSFVQAQTAADHLFALLGVVPGIGESIQAYKVAKAAKNLQGMKKALDKAATVATAQGYVSKTKIKIGQTELRVTAATDKQLLKAIGEGRDTTGKMTEQLFDSLAKQNGFRVLSGGKYGGNNGFDHVWQAADGSVVLIVESKQIRNGTVQLNPNGAGGYTQMSREWIKQVVKSLPDGSPAKAVVLKANQNGKLKTAIAGVDRQTGKAVILSVKVPSKTNIRR

SEQ ID NO: 25236 - protein, 436 aa, Neisseria meningitidis; identical to SEQ ID NO: 1523

SEQ ID NO: 25237 - protein, 188 aa, Neisseria meningitidis; identical to SEQ ID NO: 2794

SEQ ID NO: 25238 - protein, 379 aa, Neisseria meningitidis
MSQNASVGIVMPQKIPFEVPLVLENGKTLPRFDLMIETYGELNAEKNNAVLICHALSGNHHVAGRHSAEDKYTGWWDNMVGPGKPIDTERFFVVGLNNLGGCDGSSGPLSINPETGREYGADFPLVTVKDWVKSQAALADYLSIGQWAAVVGGSLGGMQALQWAISYPERVRHALVIASAPKLSTQNIAFNDVARQAILTDPDFNEGHYRSRNTVPARGLRIARMMGHITYLAEDGLGKKFGRDLRSNGYQYGYGVEFEVESYLRYQGDKFVGRFDANTYLLMTKALDYFDPAADFGDSLTRALQNVKAKFFVASFSTDWRFAPERSHELVKALIAAQKSVQYIEVKSAHGHDAFLMEDEAYMRAVAAYMNNVYKGCQQ

SEQ ID NO: 25239 - protein, 176 aa, Neisseria meningitidis
MNAIRTFQNRTPEIHESCMIDEACVVIGEVSLAEDVSVWPCAVLRGDVNSITVGARSNIQDGSVLHVSHKTAAKPEGSPLVIGEDVTVGHKVMLHGCRIGNRVLVGMGSTVLDDAVIEDEVMIGAGSLVPPRKRLAGGYLYVGSPVRQVRVLTDEEKAFLKYSAAHYVKLSKQYGM

SEQ ID NO: 25240 - protein, 367 aa, Neisseria meningitidis; identical to SEQ ID NO: 1944

SEQ ID NO: 25241 - protein, 217 aa, Neisseria meningitidis; identical to SEQ ID NO: 19279

SEQ ID NO: 25242 - protein, 333 aa, Neisseria meningitidis; identical to SEQ ID NO: 24741

SEQ ID NO: 25243 - protein, 239 aa, Neisseria meningitidis; identical to SEQ ID NO: 1086

SEQ ID NO: 25244 - protein, 591 aa, Neisseria meningitidis; identical to SEQ ID NO: 18870

SEQ ID NO: 25245 - protein, 204 aa, Neisseria meningitidis
MKNNDCFRLKNPQSGMALIEVLVAMLVLTIGILALLSVQLRTVASVREAETQTIVSQITQNLMEGMLMNPTIDSDSNKKNYNLYMGNHHTLSAVDGDFAVDAVKSKKDLAKAQLDRFGYELKNALQDAAAIYYAVCKDSSGAAPTLSAGSTFSSNCDNKANGDTLIKVLWVNDSAGDSDIARTNLETNGNNIVYTYQARVGGRE

SEQ ID NO: 25246 - protein, 76 aa, Neisseria meningitidis; identical to SEQ ID NO: 19491

SEQ ID NO: 25247 - protein, 133 aa, Neisseria meningitidis
MVAPVYAQGQPDAINAYIQKKKVIVDTSKAELCFADDRQCHPVLIGVATPKGTFGLTLNSTDKPGYGGEVIGFKQEGDFLFALHRVWNQIPSERRNERIASPSVSDRIMTNGCINVSDAVYEKLRHYFVLEVI

SEQ ID NO: 25248 - protein, 133 aa, Neisseria meningitidis; identical to SEQ ID NO: 15506

SEQ ID NO: 25249 - protein, 383 aa, Neisseria meningitidis; identical to SEQ ID NO: 19587

SEQ ID NO: 25250 - protein, 136 aa, Neisseria meningitidis
MEIRAIKYTAMAALLAFTVAGCRLAGWYECSSLSGWCKPRKPAAIDFWDIGGESPPSLEGYEIPLSDGNRSVRANEYESAQQSYFYRKIGKFEACGLDWRRRDGKPLIDETFKQEGFDCLKKQGLRRNGLSERVRW

SEQ ID NO: 25251 - protein, 178 aa, Neisseria meningitidis
MSATVRILGIDPGSRVTGFGIIDVRGRDHFYVASGCIKTPADASLADRIAVIVRHIGEVVAVYKPQQAAVEQVFVNVNPASTLMLGQARGAALAALVSHKLPVSEYTALQVKQAVVGKGKAAKEQVQHMVVQMLGLSGTPQADAADGLAVALTHALRNHGLAAKLNPSGMQVKRGRFQ

SEQ ID NO: 25252 - protein, 433 aa, Neisseria meningitidis
MPSETARPLYADTRAAHTLVWFRQNLRIRDNAALCAAVAEGLPVIGIWIDDAETDNPRRAAFYRQSAAELAQGLAGRGIPLYTAASPAELVRLAVRLNIRAVIADESHTFADKLADNALWHELDKHGIALTFVNDRAVFGKTDLIPDGGTAHTDFDRYREVWLDRFSKQPPAGPNLFAAYRQPFPENLSAPPPAALSDGIFLPQNSGETAAWRQWRRFLEQADSYSVLKDFPSRKHTSLMGAYLSAGCISPRLLARESLERRLNAWADNIIRRDFFLQLALQHTDDSPSDGNPEHTLRLTLWQQGQTGIPIIDAAMRCLHKTGSLHPALRRLSADFFCHVLNLPRREGEIWFARQLTDFDAAINQGNWWLAASRHTCPDIAAASYRTDPDGTFIKRHIPELAHLSADTVHTPWRFACSVDTHGYPAYPVAGIP

SEQ ID NO: 25253 - protein, 590 aa, Neisseria meningitidis
MILPARFSDGISLSLRLKLLTGVWVGLAALSVVLTLLLSLRLENAASVIEEAGNLRMQAYRLAYMAGEGSPRSQIDNQVDEFEKSLNRISQSDAIHPLIPSDTPLAYDLIQSMLIIDWQAHILPPLQSYRRPTQVDLYRFAGNIELFLQALENANEKNTWWLRRFQWAIMLMTLVSSVLMLFWHQIWVIRPLQALREGAERIGRRCFDIPVPEGGTPEFKQVGRCFNQMGGRLKILYDDLEGQVAEQTRSLEKQNQNLTLLYQTTRDLHQSYIPQQAAEHFLNRILPAVGADSGRVCLDGGSDVYVSIHHADCGTAASDLGKYHEEIFPIEYQNETLGRLLLSFSDGISLTGDDRTLLQTLIRQLGVSLASAKQEEEKRLLAVLQERNLIAQGLHDSIAQALTFLNLQVQMLETAFAENKREEAAENISFIKTGVQECYEDVRELLLNFRTKISNKEFPEAVADLFARFTQQTGITVETAWENGSFLPPQEAQLQMIFILQESLSNIRKHARATHVKFTLSEHGGRFTMTIQDNGQGFDTEKIGEPTGSHVGLHIMQERAKRIHAVLEIRSQAQQGTTVSLTVASEESLK

SEQ ID NO: 25254 - protein, 334 aa, Neisseria meningitidis; identical to SEQ ID NO: 18693

SEQ ID NO: 25255 - protein, 359 aa, Neisseria meningitidis
MIAKHIDRFPLLKLDQVIDWQPIEQYLNRQRTRYLRDHRGRPAYPLLSMFKAVLLGQWHSLSDPELEHSLITRIDFNLFCRFDELSIPDYSTLCRYRNWLAQDDTLSELLELINCQLTEKGLKIEKASAAVVDATIIQTADSTQRQAIEVDEEGQINGQTTPSKDKDARWIKKNGLYKLGYKQHTRTDGEGYIEKLHITPANAHECKHLSPLLEGLPKGTTVYADKGYDSKENRQHLKEHRLQNGIMRKACRNRPLTETQTKRNRYLSKTRYSGLNLNQDKATKPQTVQIVRQGEATPYWFKFNPLYVVEQSFGTLHRKFRYARAAYFGLSKVSAQSHLKAMCLNLLKAANRLSAPAAA

SEQ ID NO: 25256 - protein, 459 aa, Neisseria meningitidis
MLLDLNRFSFSVFLKEVRLLTALALPMLLAQVAQVGIGFVDTVMAGGAGKEDLAAVALGSSAFATVYITFMGIMAALNPMIAQLYGAGKTDEVGETGRQGIWFGLFLGVFGMVLMWAAITPFRNWLTLSDYVEGTMAQYMLFTSLAMPAAMVHRALHAYASSLNRPRLIMLVSFAAFVLNVPLNYIFVYGKFGMPALGGAGCGLATMAVFWFSALALWIYIAKENFFRPFGLTAKFGKPDWAVFKQIWKIGAPIGLSYFLEASAFSFIVFLIAPFGEDYVAAQQVGISLSGILYMIPQSVGSAGTVRIGFSLGRREFSRARYISGVSLVSGWMLAVITVLSLVLFRSPLVSMYNNDPAVLSIAATVLLFAGLFQPADFTQCIASYALRGYKVTKVPMFIHAAAFWGCGLLPGYLLAYRFDMGIYGFWTALIASLTIAAIALVWCLELCSREMVRSHKAV

SEQ ID NO: 25257 - protein, 133 aa, Neisseria meningitidis; identical to SEQ ID NO: 2156

SEQ ID NO: 25258 - protein, 135 aa, Neisseria meningitidis; identical to SEQ ID NO: 18606

SEQ ID NO: 25259 - protein, 426 aa, Neisseria meningitidis
LKDCFPQGLNGKKTAVALSGGLDSVVLLHLLVRAGKKGGFIPDALHIHHGLSPRADDWADFCQNYCDMLGVGLETVKICVEKNGLGIEAAARQKRYAAFAEKGFDVLALAHHRDDQIETFMLAVARGGGLRALAAMPAVRPFGEKGIIWRPLLPFSRQDIWDYAQKHGLPNIEDESNSDTAYLRNRFRHRILPELSAQIPHFGRHLLNNVRALQEDLALLDEVVVQDCRWVCGAGYFDTARWLTFSPRRKTHILRYFLKENGIPMPNQNALADIARVLTEAKTGRWNLQGFELHHYAGRLFVFRLEKTDKLRFLKDRQISGNLREILTGQGFVLKRHPFGLPEHLLEQDGILRTVAVSDTLAVGGIHKDVKKILQGKRVLPVLRPIWPLVADSGNRPLALANCCADFQYSVSDGILPVHPDFPILF

SEQ ID NO: 25260 - protein, 384 aa, Neisseria meningitidis; identical to SEQ ID NO: 4520

SEQ ID NO: 25261 - protein, 332 aa, Neisseria meningitidis; identical to SEQ ID NO: 19103

SEQ ID NO: 25262 - protein, 59 aa, Neisseria meningitidis; identical to SEQ ID NO: 642

SEQ ID NO: 25263 - protein, 171 aa, Neisseria meningitidis; identical to SEQ ID NO: 18950

SEQ ID NO: 25264 - protein, 289 aa, Neisseria meningitidis; identical to SEQ ID NO: 2681

SEQ ID NO: 25265 - protein, 367 aa, Neisseria meningitidis; identical to SEQ ID NO: 3396

SEQ ID NO: 25266 - protein, 193 aa, Neisseria meningitidis; identical to SEQ ID NO: 1378

SEQ ID NO: 25267 - protein, 59 aa, Neisseria meningitidis
LAEGYTYFFNENTDDCYVLKEDFINNERYEKTELYPQKDKVILFPKFGEYDLVLNPDII

SEQ ID NO: 25268 - protein, 229 aa, Neisseria meningitidis; identical to SEQ ID NO: 18452

SEQ ID NO: 25269 - protein, 341 aa, Neisseria meningitidis; identical to SEQ ID NO: 3492

SEQ ID NO: 25270 - protein, 198 aa, Neisseria meningitidis
MNINTSENKDAVAEHTGQWLEKAVIGLNLCPFAKAPHVKNLVRIAISEAKHLDSFLEDLDEELQRLGNTPATELETTLLVHPTLFPDFDVFNDMLDIADAAVIENGLEGIVQIAPFHPQFRFQNTEPDDIGNYTNRSPYPTLHLIREDSIAKAAQAFPDTSAIFERNIALLEKMGHEGWAKLGITSCPYPHNKKNISK

SEQ ID NO: 25271 - protein, 324 aa, Neisseria meningitidis
MPSEKNIGFMAGSSRPLWVAFALLLVSCVLFLTLNVKGDWDFVLHLRLTKLAALLMVAYAVGVSTQLFQTLTNNPILTPSILGFDSLYVFLQTLLVFTFGGVGYTSLPAVGKFGFELVVMMGGSLLLFYTLVKQGGRDLSRMILIGVIFGILFRSLSSLLSRMIDPEEFMAAQANMFAGFNTVHSELLGIGALILLVSAAVVWRERYRLDVHLLGRDQAVNLGISYTRNTLWILLWIAALVATATAVVGPVSFFGLLAASLANHFSPSVRHSVRLPMTVCVGGILLVGGQTVFEHFLGMKAVLSVVVEFAGGLVFLYLVLKHKK

SEQ ID NO: 25272 - protein, 420 aa, Neisseria meningitidis
MSNTQKQLALAKAAKKSVNTADTEEKNRALLAMADSLEAAAADILAANRLDLEAAAGKIPESMTDRLLLDGKRICAMADGIRAVAALPDPVGEILETSTLPNGLEIVKKRVAMGVIGIIYESRPNVTSDAAALALKSGSAVVLRSGKDAFQSARAIVAALKAGLAQTRIDPDALQLIEDTGREGSYEMMRAKDYLDLLIPRGGAGLIRAVVENAVVPVIETGTGIVHIYIDKDADWDKALRIVYNAKTSRPSVCNSMEVLLVHEDIAADFLPKLERLLVRDRIKAGLPPVRFRLDPQAARHIGGEAAGADDFDTEFLDYILAVKTVASVEEAVGHIETHGTHHSDGIVTENRHAADYFTTHIDSAAVYVNASTRFTDGGEFGLGCEMGISTQKLHARGPMGLKELTSYKYIIRGVGQVRE

SEQ ID NO: 25273 - protein, 69 aa, Neisseria meningitidis; identical to SEQ ID NO: 3128

SEQ ID NO: 25274 - protein, 144 aa, Neisseria meningitidis
MNFALSVITFTLASFLPVPPAGAAVFTWKDGGGNSYSDVPKQLHPDQSQILNLRTRQTKPAVKPAQADAGKRTDGAAQENNPDTAEKNRQLEEEKKRIAETERQNKEENCRISKMNLKAVGNSNAKNKDDLIRKYNNAVNKYCR

SEQ ID NO: 25275 - protein, 904 aa, Neisseria meningitidis
MLYHHSYAEDAGRAGSEAQIQVLEDVHVKAKRVPKDKKVFTDARAVSTRQDIFKSSENLDNIVRSIPGAFTQQDKSSGIVSLNIRGDSGFGRVNTMVDGITQTFYSTSTDAGRAGGSSQFGASVDSNFIAGLDVVKGSFSGSAGINSLAGSANLRTLGVDDVVQGNNTYGLLLKGLTGTNSTKGNAMAAIGARKWLESGASVGVLYGHSRRSVAQNYRVGGGGQHIGNFGAEYLERRKQRYFVQDGQLKFNSDSGKWERDLQRQQWKYPWYKKYENPQELQKYIEEHDKSWRENLAPQYDITPIDPSSLKQQSAGNLFKLEYDGVFNKYTAQFRDLNTKIGSRKIINRNYQFNYGLSLNSYANLNLTAAYNSGRQKYPKGSKFTGWGLLKDFETYNNAKILDLNNTATFRLPRETELQTTLGFNYFHNEYGKNRFPEELGLFFDGPDQDNGLYSYLGRFKGDKGLLPQKSTIVQPAGSQYFNTFYFDAALKKDIYRLNYSTNTVGYRFGGEYTGYYGSDDEFKRAFGENSPTYREHCNQSCGIYEPVLKKYGKKRANNHSVSISADFGDYFMPFASYSRTHRMPNIQEMYFSQIGDSGVHTALKPERANTWQFGFNTYKKGLLKQDDTLGLKLVGYRSRIDNYIHNVYGKWWDLNGNIPSWVSSTGLAYTIQHRNFKDKVHKHGFELELNYDYGRFFTNLSYAYQKSTQPTNFSDASESPNNASKEDQLKQGYGLSRVSALPRDYGRLEVGTRWLGNKLTLGGAMRYFGKSIRATAEERYIDGTNGGNTSNVRQLGKRSIKQTETLARQPLIFDFYAAYEPKKNLIFRAEVKNLFDRRYIDPLDAGNDAATQRYYSSFDPKDKDEDVTCNADGLCNGKYGGTSKSVLTNFARGRTFLITMSYKF

SEQ ID NO: 25276 - protein, 335 aa, Neisseria meningitidis
MSTFFRQTAQAMIAKHIDRFPLLKLDQVIDWQPIEQYLNRQRTRYLRDHRGRPAYPLLSMFKAVLLGQWHSLSDPELEHSLITRIDFNLFCCFDELSIPDYSTLCRYRNWLAQDDTLSELLKLINRQLTEKGLKVEKASAAVIDATIIQTAGSKQRQAIEVDEEGQISGQTTPSKDSDARWIKKNGLYKLGYKQHTRTDAEGYIEKLHITPANAHECKHLSPLLEGLPKGTTVYADKGYDSAENRQHLEEHQLLDGIMRKACRNRPLSEVQTKRNRYLSKTRYVVEQSFGTLHRKFRYARAAYFGLIKVSAQSHLKAMCLNLLKAANRLSAPAAA

SEQ ID NO: 25277 - protein, 159 aa, Neisseria meningitidis; identical to SEQ ID NO: 6605

SEQ ID NO: 25278 - protein, 81 aa, Neisseria meningitidis; identical to SEQ ID NO: 7714

SEQ ID NO: 25279 - protein, 289 aa, Neisseria meningitidis
MKFIFFVLYVLQFLPFALLHKLADLTGLLAYLLVKPRRRIGEINLAKCFPEWSEEKRKTVLKQHFKHMAKLMLEYGLYWYAPAGRLKSLVRYRNKHYLDDALAAGEKVIILYPHFTAFEMAVYALNQDVPLISMYSHQKNKILDAQILKGRNRYDNVFLIGRTEGLRALVKQFRKSSAPFLYLPDQDFGRNDSVFVDFFGIRTATITGLSRIAALANAKVIPAIPVREADNTVTLQFYPAWKSFPGEDAQADAQRMNRFIEERVREHPEQYFWLHKRFKTRPEGSPDFY

SEQ ID NO: 25280 - protein, 447 aa, Neisseria meningitidis
MIKIKKGLNLPIAGRPEQVIYDGPVITEVALLGEEYAGMRPSMKVKEGDAVKKGQVLFEDKKNPGVVFTAPVSGKIAAIHRGEKRVLQSVVIAVEGNDEIEFERYAPEALANLSGEEVRRNLIQSGLWTALRTRPFSKIPAVDAEPFAIFVNAMDTNPLAADPVVVIKEAAEDFRRGLLVLSRLTERKIHVCKAAGADVPSENAANIETHEFGGPHPAGLSGTHIHFIEPVGANKTVWTINYQDVIAIGRLFATGRLNTERVIALGGSQVNKPRLLRTVLGAKVSQITAGELVDADNRVISGSVLNGAITQGAHDYLGRYHNQISVIEEGRSKELFGWVAPQPDKYSITRTTLGHFLKNKLFKFTTAVNGGDRAMVPIGTYERVMPLDILPTLLLRDLIVGDTDSAQALGCLELDEEDLALCSFVCPGKYEYGPLLRKVLETIEKEG

SEQ ID NO: 25281 - protein, 210 aa, Neisseria meningitidis; identical to SEQ ID NO: 5679

SEQ ID NO: 25282 - protein, 275 aa, Neisseria meningitidis
MQNHVISLASAAERRAHIADTFGRHDIPFQFFDALMPSEELNRVMAELVPGLAKQHLLSEVEKACFMSHAVLWKQALDEGLPYIAVFEDDVLLGEGAEKFLAEDAWLKERFDPDSAFIVRLETMFMHVLTSPSGVADYCGRAFPLLESEHWGTAGYIISKKAIRFFLQHFVMLQPEQIKPIDLMMFSDFFDKEGMPVYQVSPALCAQELHYAKFHDQNSALGSLIEHDRLLNRKQQRRDSPANTFKRRLIRALTKISREREKRRQRREQFIVPFQ

SEQ ID NO: 25283 - protein, 304 aa, Neisseria meningitidis; identical to SEQ ID NO: 3720

SEQ ID NO: 25284 - protein, 377 aa, Neisseria meningitidis; identical to SEQ ID NO: 10962

SEQ ID NO: 25285 - protein, 106 aa, Neisseria meningitidis
MFGKQLFEEVGSKISETIVNSPAKDVEKNIKAMLGGAFNRMDLVTREEFDIQQQVLIKTRTKLAALEARLAKLEAAQNPERAALEAAEAAAEEAVAEIRQQTEAGE

SEQ ID NO: 25286 - protein, 468 aa, Neisseria meningitidis
VEFSTKTEILQEQQAGAQLFVCTEEAQLNHPTALALLSSLEEGQNFADTKIPTGNGLQAVAVCCLKSTGRAALNKAAAEAAKWAQNQETVNVDIHAFDEAQAAAVAEAFAIAFGNAAYRFDRYKKEAKPAKFETAVFHSAHEAVVKEALRVAEAQVYGQSLCRDLGNAAPNECTPEFLARTAKAEAEKLGAHAKIIEKDYIKENMGSFWSVAKGSAEAPYLVELSYFGAADKEAAPVVLVGKGITFDTGGISLKPGLNMDEMKFDMCGAATVISTFCAAVKLQLPINLIAVVATCENMPSGAANKPGDVVKSMKGLTIEVLNTDAEGRLILCDALTYAEQFKPKAVIDVATLTGACIVALGHDVSGVMGNNQDLIDSLLAASYNVDDKAWQLPLFETYKDQLKSNFADIPNIGTPGAGTITAATFLSYFTEGYPWAHLDIAGTAWKSGAEKGATGRPVPLLLNYLRNL

SEQ ID NO: 25287 - protein, 245 aa, Neisseria meningitidis
MLLIPAIDLKEGRCVRLKQGLMEEATVFSDSPAETALHWFKQGARRLHLVDLNGAFAGVPQNLPAIKDILAAVAKDIPVQLGGGIRDLKTIGQYLDLGLNDVIIGTAAVKNPDFVREACKAFPGRIIVGLDAKDGMAAIDGWATVTGHHVIDLAKRFEDDGVNSIIYTDIGRDGMMSGVNIDATVKLAQAVRIPVIASGGLTGLDDIRALCAAEKHGVAGAITGRAIYEGSIDFAQAQQLADSLD

SEQ ID NO: 25288 - protein, 249 aa, Neisseria meningitidis
MPSVELLLVIVGLPRGTFYYQLAVQSAEDKYADLKRHIHDIYRRHKGRYGYRRIAAAIRHAGTPVNHKKVSRLMAKTGLKAVIRRRKYRSFKGEVGKIAPNILRRCFHAEKPNEKWVTDVTEFNVGGEKIYLSPIMDLFNGEIVSYRIQTRPTFDLADEILKGAPEKPGSSEKPILHSDQGWQYQMFFYSGLNLNQDKAMKPQTVQIVRQGEATPYWFKFNPLYNNDRIKLKLKGLSLVQYRIQSLKAA

SEQ ID NO: 25289 - protein, 115 aa, Neisseria meningitidis; identical to SEQ ID NO: 19291

SEQ ID NO: 25290 - protein, 281 aa, Neisseria meningitidis
MLSYRHAFHAGNHADMLKHFTLFLVLQYFNRKDKPYWYIDTHGGAGVYNLEGSEAQKVGEYRQGIALLRQAKNLPTELNGFIAHIQKILPSPELYCGSPWLAQSLTRVGDKLRLFELHPTDFVHLQNNMGEAGLGKRGQVLREDGYKGLISLLPPPPRRATVLIDPPYEEKQDYRHVTETLKAALKRFESGCYLIWYPCLSREESRKLPEELKKLLPDNYLHAELHVHAPKADGFGMHGSGMFVINPPYLLAEQLAANLPALTRLLAQDEGARYLLDSKIR

SEQ ID NO: 25291 - protein, 397 aa, Neisseria meningitidis
MNPKHLIAFSALFAATQAEALPVASVSLDTVTVSPSAPYTDTNGLLTDYGNAAASPWMKKIRSVAQGSGETFRILQIGDSHTAGDFFTDSLRKRLQKTWGDGGIGWVYPANVKGQRMAAVRHNGNWQSLTSRNNSGDFPLGGILAHTGSGGSMTLTASDGKTGKQRISLFAKPLLAEQTLTVNGNTVSANGGGWQVLDTRAALPLTIQTEMPWDIGFINIENPAGGITVSAMGINGAQLTHWSKWRADRMNDLAQTGADLVILSYGTNEAFGDNIDIADTEQKWLDTVRQIRDSLPAAGILIIGAPESLKNTLGVCGTRPVRLTEVQQMQRRVARQGQTMFWSWQNAMGGICSMKNWLNQGWAAKDGVHFSAKGYRRAAEMLADSLEELVRAAAIRQ

SEQ ID NO: 25292 - protein, 307 aa, Neisseria meningitidis; identical to SEQ ID NO: 19720

SEQ ID NO: 25293 - protein, 469 aa, Neisseria meningitidis; identical to SEQ ID NO: 18465

SEQ ID NO: 25294 - protein, 280 aa, Neisseria meningitidis
MQNHVISLASAAERRAHIADTFGRHDIPFQFFDALMPSEELNRVMAELVPGLAKQHLLSEVEKACFMSHAVLWKQALDEGLPYVAVFEDDVLLGKDAEKFLAEDTWLEERFDKDSAFIVRLETMFAKVIVRPDKVLNYENRSFPLLESEHWGTAGYIISREAMRFFLERFAVLPAEWIKAVDWMMFTYFFDKEGMPVYQVNPALCTQELHYAKFLSKNSMLGSDLEKDREQERRHRRSLKVMFDLKRALGKFGREKKKRMERQRQAELEKAYGRRVISFK

SEQ ID NO: 25295 - protein, 123 aa, Neisseria meningitidis
MNNSSFFGNRLKEERKKLKMTQAEIAEKCGVSGRMWGDYERGISQPKAELFFQFEKVGIDVQYVMHGRRGETAVMPSETLNAEEQELLALFREAAAADREMILMVARRAEKKAQTALGKVSNG

SEQ ID NO: 25296 - protein, 315 aa, Neisseria meningitidis; identical to SEQ ID NO: 5319

SEQ ID NO: 25297 - protein, 89 aa, Neisseria meningitidis; identical to SEQ ID NO: 19926

SEQ ID NO: 25298 - protein, 275 aa, Neisseria meningitidis; identical to SEQ ID NO: 22228

SEQ ID NO: 25299 - protein, 172 aa, Neisseria meningitidis
VFQNWAACRAVYRYAEEHLPRYSKVVLAMRWGSQMPENSRSLAYDAGFFQKFDRMLHKLSSEKQAVYLMADNLASSYNVQRAYILSSRIPGYRQTLRPDDESTLKANARIRELAAKYPNVYIIDAAAYIPADFQIGGLPVYSDTDHINPYGGTELAKRFSEKQRFLNTRHNH

SEQ ID NO: 25300 - protein, 158 aa, Neisseria meningitidis; identical to SEQ ID NO: 2965

SEQ ID NO: 25301 - protein, 264 aa, Neisseria meningitidis
MNTILAFDIETVPDVQGIRTLYELPSSLPDDEVVLFAQQKRRAQTGGDFMQHHLHQIVAISCCMRWGQDKVHVGTIGEMDDGEEVVIAKFFELIEKHTPQLVSWNGGGFDLPVLHYRSLIYGINAARYWDMGDGDFGDSRDFKWNNYISRYHQRHCDLMDLLALYQPRANVPLDDMAKLCGFPGKLGMDGSKVWDAFHAGRLKEIRNYCETDAVNTYLMYLRFCLVSGRFDADEYEMEIKRIRNYLSAQTEDKPHWSEFAQAWK

SEQ ID NO: 25302 - protein, 322 aa, Neisseria meningitidis
MTAKPFSLNLTNLLLLAVLFAVSLSVGVADFRWSDVFSLSDSQQVMFISRLPRTFAIVLTGASMAVAGMIMQILMRNRFVEPSMAGAGQSAALGLLLMSLLLPAAPLPVKMSVAAVAALIGMLVFMMLIRRLPPTAQLMVPLVGIIFGGVVEAVATFIAYENEMLQMLGVWQQGDFSSVLLGRYELLWITGGLAVFAYLIADRLTILGLGETVSVNLGLNRTAVLWSGLIIVALITSLVIVTVGNIPFVGLVVPNIISRLIGDRLRQSLPAVALLGASLVLLCDIIGRVIVFPFEIPVSTVFGVLGTALFLWLLLRKPAHAV

SEQ ID NO: 25303 - protein, 297 aa, Neisseria meningitidis
MIIVMSRRAAEADIAGVVAFIRSRGLREHISHGDERTVIGAIGDDRVLSVREVQTLPEVEKAVRILDTWKTVSRENRAEDSRVAAKGVAFGGGETVCIAAEPSVWRNADAVFLDPFFTSANLYDTSSADEGRGRCRRLAEQTASAHGAGKPVLVRVRNVRHVEAALNAGADILYLGGGLMSDLAVLNEAGSLNIPLVLCKDKHHSAEDWLNAAEYVVSRGNRHLILGESGVLSHTKDHPYRLDVESIVKVRQISHLPVIANITGLWNRDMPQEILYGLAKAAGACGIVGTCFEKSGG

SEQ ID NO: 25304 - protein, 52 aa, Neisseria meningitidis; identical to SEQ ID NO: 7295

SEQ ID NO: 25305 - protein, 351 aa, Neisseria meningitidis
VFETPTFEQIRERILRDTKSLWPDADISPDSDHYVHASRLASCAEGQYAHQSWIVRQIFPDTADREYLERHASMRGLRRRNPTTASGTLTVSGIAQSMLSDGLQVRIGQRFYRTTARAVIGSGGTAEIPAIADELGAAANVRDGEAQLMAAPAGVSTECRLTVQGGTDRESDASLLARLLEIIRRPPAGGNRYDYKNWALSVDGVTSAYVYPLRRGLGTVDIAITSADGVPSEETVRRVQAYIDEMRPVTAKNALVLKPTVTAVPVTVQVKLDGIDLDDAKRRIRTALKEYFDTLIPGDGLTVSQIEAAISNVDGVIDRRLTAPTANRAADTVNRIEWFKAGAINVTEMPS

SEQ ID NO: 25306 - protein, 159 aa, Neisseria meningitidis; identical to SEQ ID NO: 3392

SEQ ID NO: 25307 - protein, 205 aa, Neisseria meningitidis
MTFPPLKSPLKFYAVVPTADWVGRMVKAGADTVQLRCKALHGDELKREIARCVAACQGSHTQLFINDHWREAIEAGAYGVHLGQEDMDTADLAAIAAAGLRLGLSTHSVAELDRALSVHPSYVASGAIFPTTTKQMPTAPQGLDKLCEYVKQAGGTPVVAIGGIDLNNARAVLATGVSSLAAVRAVTEAANPEAVVKAFQALWDG

SEQ ID NO: 25308 - protein, 54 aa, Neisseria meningitidis; identical to SEQ ID NO: 18285

SEQ ID NO: 25309 - protein, 180 aa, Neisseria meningitidis; identical to SEQ ID NO: 5949

SEQ ID NO: 25310 - protein, 111 aa, Neisseria meningitidis; identical to SEQ ID NO: 233

SEQ ID NO: 25311 - protein, 90 aa, Neisseria meningitidis; identical to SEQ ID NO: 311

SEQ ID NO: 25312 - protein, 796 aa, Neisseria meningitidis
MTEQKHEEYGADSIQVLEGLEAVRKRPGMYIGDTQDGSGLHHMVFEVLDNAIDEALAGHCDKITVTIHADHSVSVADNGRGMPTGIHPKEGRSAAEVIMTVLHAGGKFDNNSYKISGGLHGVGVSVVNALSDWVTLTIYRDGKEHFVRFVRGETEEPLKVVGDSDKKGTTVRFLASTETFGNVEYSFDILAKRIRELSFLNNGVDIELTDERDGKHESFALSGGVAGFVQYMNRKKTPLHEKIFYAFGEKDGMSVECAMQWNDSYQESVQCFTNNIPQRDGGTHLTALRQVMTRTINSYIEANEVAKKAKVETAGDDMREGLTCVLSVKLPDPKFSSQTKDKLVSSEIGPVVNEVINQALTDFLEENPNEAKIITGKIVDAARAREAARKAREITRRKGVMDGLGLPGKLADCQEKDPALSELYLVEGDSAGGSAMQGRDRKFQAILPLKGKILNVEKARFEKMLASQEVAALITALGAGIGKEEFNAEKLRYHRIIIMTDADVDGAHIRTLLLTFFYRQMPELVERGYIYIAQPPLYKAKYGKQERYLKDELEKDQWLLGLALEKAKIVSDSRTIEGEELANTAKQFLLAKTVIEQESRIIDELVLHAMLHASPVDLSTAESADRSVAELNGLLDEKEVALERIEGHEGHQFIKITRKLHGNVVVSYLEPKFLNSKAYQTLTQTAAALKGMVGKGAKLYKGDNEYDIDSFEGALDILMSVAQKGMSIQRYKGLGEMNPEQLWETTMDPAVRRLLKVRIEDAIAADEVFVTLMGDEVEPRRAFIENNALIAQNIDA

SEQ ID NO: 25313 - protein, 238 aa, Neisseria meningitidis; identical to SEQ ID NO: 18492

SEQ ID NO: 25314 - protein, 752 aa, Neisseria meningitidis
MYTRIMEISPWTLRSAKLEKEHKRLQESLTSLGNGYMGMRGSFEETYSADSHLGTYIAGVWFPDKTRVGWWKNGYPKYFGKAINALNFSKVKIFVDGQEVDLAKNDVAGFSVELDMQHGVLRRSFTVFGVRFDVCKFLSVAQKELAVIRWEAVSVDGKTHQVRIDSIIDADVKNEDSNYEEKFWQVLDKGVSDSLSYIAAQTVANPFGVEQFIVNAEQTFAGSFKALGGSQTDWQVSNSFESEVGGTPKTFEKRVIVTTSRDYQGLEAVKAAGRALSEKVAGVAFETLLDAHKAGWLHRWEIADVVIEGSDEAQQGIRFNLFQLFSTYYGEDARLNIGPKGFTGEKYGGATYWDTEAYAVPLYLALAEPEVTRNLLQYRRNQLPQAQHNAREQGLAGALYPMVTFTGIECHNEWEITFEEIHRNGAIPYAIYNYTNYTGDESYLAKEGLEVLVEVSRFWADRVHFSKRSGKYMIHGVTGPNEYENNINNNWYTNTLAAWVLDYTREALAKYPRPDLNVSAAELEKWADISANMYRPHDEELGVFVQHDGFLDKDIRPVSALSPDDLPLNQKWSWDKILRSPFIKQADVLQGIYFFGDRFNIDEKRRNFDFYEPMTVHESSLSPCIHSILAAELGKEEKAVEMYRRTARLDLDNYNNDTEDGLHITSMTGSWLAIVQGFAQMKTWGGKLSFAPFLPSAWTGYTFHINYRGRLIKVAVGKENVVFTLLKGEPLDLQVYGKDITLNGSHTAALEK

SEQ ID NO: 25315 - protein, 297 aa, Neisseria meningitidis
MVTFSKIRPLLAIAAAALLAACGTAGNNAARKPVQTAKPAAVVGLALGGGASKGFAHVGIVKVLKENGIPVKVVTGTSAGSIVGSLFASGMSPDRLELEAEILGKTDLVDLTLSTSGFIKGEKLQNYINRKVGGRQIQQFPIKFAAVATDFETGKAVAFNQGNAGQAVRASAAIPNVFQPVIIGRHTYVDGGLSQPVPVSAARRQGANFVIAVDISARPGKNISQGFFSYLDQTLNVMSVSALQNELGQADVVIKPQVLDLGAVGGFDQKKRAIQLGEEAARAALPEIKRKLAAYRY

SEQ ID NO: 25316 - protein, 155 aa, Neisseria meningitidis; identical to SEQ ID NO: 17558

SEQ ID NO: 25317 - protein, 310 aa, Neisseria meningitidis; identical to SEQ ID NO: 2585

SEQ ID NO: 25318 - protein, 160 aa, Neisseria meningitidis; identical to SEQ ID NO: 1377

SEQ ID NO: 25319 - protein, 505 aa, Neisseria meningitidis; identical to SEQ ID NO: 2655

SEQ ID NO: 25320 - protein, 209 aa, Neisseria meningitidis; identical to SEQ ID NO: 18646

SEQ ID NO: 25321 - protein, 391 aa, Neisseria meningitidis
MLNTSLSPWPCFTQEEADAVSKVLLSNKVNYWTGSECREFEKEFAAFAGTRYAVALSNGTLALDAALKAIGIGEGDDVVVTSRTFLASASCIVNAGANPVFADVDLNSQNISAETVKAVLTPNTKAIIVVHLAGMPAEMDDIMALAKEHDLWVIEDCAQAHGAKYKGKSVGSIGHVGAWSFCQDKIMTTGGEGGMVTTNDKTLWEKMWSYKDHGKSYDAVYHREHAPGFRWLHESFGTNWRMMEMQAAIGRIQLKRLPEWTACRQAHAAKLAESLGKFKSIRLVEVADYIGHAQYKFYAFVKPEHLKDGWTRDRIVSELNARKVPCYQGSCSEVYLEKSFDDTPWRPKERLKNAVELGDTSLMFLVHPTLTDDEIAFCKEHIEAVLVEATR

SEQ ID NO: 25322 - protein, 505 aa, Neisseria meningitidis
MLYFRYGFLVVWCAAGVSAAYGADAPAILDDKALLQVQRLVSDKWAESDWKVENDAPRVVDGDFLLAHPKMLEHSLRDALNGNQADLIASLADLYAKLPDYDAVLYGRARALLAKLAGRPAEAVARYRELHGENAADERILLDLAAAEFDDFRLKSAERHFAEAAKLDLPAPVLENVGRFRKKTEGLTGWRFSGGISPAVNQNANNAAPQYCRQNGGRQICSVSRAERAAGLNYEIEAEKLTALADNHYLLFRSNIGGTSYYFSKKSAYDDGFGRAYLGWQYKNARQTAGILPFYQVQLSGSDGFDAKTKRVNNRRLPPYMLAHGVGVQLSHTYRPNPGWQFSVALEHYRQRYREQDRAEYNNGRQDGFYVSSAKRLGESATVFGGWQFVRFVPKRETVGGAVNNAAYRRNGVYAGWAQEWRQLGGLNSRVSASYARRNYKGVAAFSTEAQRNREWNVSLALSHDKLSYKGIVPALNYRFGRTESNVPYAKRRNSEVFVSADWRF

SEQ ID NO: 25323 - protein, 70 aa, Neisseria meningitidis; identical to SEQ ID NO: 5197

SEQ ID NO: 25324 - protein, 193 aa, Neisseria meningitidis
MKHTVSASVILLLTACAQLPQNNENLWQPSEHTRSFTAEGRLAVKAEGKGSYANFDWTYQPPVETININTPLGSTLGQLCQDRDGALAVDGKGNVYQAESAEELSRQLVGFKLPIQYLHIWADGRRVAGAPYRILPDGILEQYGWTVGRTADSGGQVRTLQLNNGNLNIRLVFTEIGMPSETETLERCAARTR

SEQ ID NO: 25325 - protein, 41 aa, Neisseria meningitidis; identical to SEQ ID NO: 9208

SEQ ID NO: 25326 - protein, 470 aa, Neisseria meningitidis; identical to SEQ ID NO: 18520

SEQ ID NO: 25327 - protein, 146 aa, Neisseria meningitidis; identical to SEQ ID NO: 5620

SEQ ID NO: 25328 - protein, 219 aa, Neisseria meningitidis; identical to SEQ ID NO: 18394

SEQ ID NO: 25329 - protein, 59 aa, Neisseria meningitidis; identical to SEQ ID NO: 7121

SEQ ID NO: 25330 - protein, 65 aa, Neisseria meningitidis
MTAMPSEPPFRRHSTHQNRKTAPKIIITRHNGKPDTKPNTAAKMPSEAVGATILIWGITFLNHPF

SEQ ID NO: 25331 - protein, 64 aa, Neisseria meningitidis; identical to SEQ ID NO: 6143

SEQ ID NO: 25332 - protein, 287 aa, Neisseria meningitidis; identical to SEQ ID NO: 17134

SEQ ID NO: 25333 - protein, 162 aa, Neisseria meningitidis; identical to SEQ ID NO: 911

SEQ ID NO: 25334 - protein, 179 aa, Neisseria meningitidis; identical to SEQ ID NO: 403

SEQ ID NO: 25335 - protein, 357 aa, Neisseria meningitidis
MSITIQNLNKHFGNFHALKNINLNVPTGKLVSLLGPSGCGKTTLLRIIAGLENADGGKILFDGQDVTAKHVRERKVGFVFQHYALFRHMNVFDNVAFGLTVLPKSERPSKGQIRAKVEELLKLVQLSHLAKSYPHQLSGGQRQRIALARALAVEPKLLLLDEPFGALDAKVRKELRTWLRDIHHNLGVTSILVTHDQEEALEVSDEIVVMNHGKIEQTGSAEAIYRKPENAFVTEFLGETDAFEGRIEKGFWHYNGFAWKLDAQYKWQEQTATGYIRPHEWQIAAEHETPMICAEIEKVHAVGALTHILVKHGKQDVHITLAGSDAARYPIAEGKELKLIPKQVYVFSQNELIEYSI

SEQ ID NO: 25336 - protein, 900 aa, Neisseria meningitidis
MQLHILNNPKDAALAADAEFLKQSLFNLLHEEASPLVVETVKLLSTSDDSAALIEKVLPQLDEQQTHDLTLACGLFAQILNIAEDVHHERRRQIHEEAGRGGAEGSLTETVRRLKAGKADGKSVQRQLDNTSVTAVLTAHPTEVQRQTVLSFNRRIRALLPQRERCTNADALARLRREIDTILLGLWQTSETRRHKLSVNDEINNGVSIFPMSFFEALPKLYRNMEHDFQMVYPDVCVPNILKIGGWIGGDRDGNPFVSAETLRFAFRRHADAVFRFYRGELDKLYRELPLSIRRVKVNDDVMALAALSPDEELARTEEPYRRAIAYIMARAMGKARALGLGMGCKFGFLEPYASAQEFLDDLKKLQRSLIDNGSRLLAEGRLADLIRSVSVFGFHMMPLDLRQHAGKHADVVAELFQHAGLEDYNSLNEEQKQAALLRELSHQRPLYSPFITYSDHTRHELAIFNEARKIKDEFGEDAVTQSIISNCEQPSDLLALALLLKESGLLAVENGKPQSRINIVPLFETIEALENACPVMETMFRLDWYDALLESRGNIQEIMLGYSDSNKDGGYVTSSWCLYQAELGLVELFKKYDVRMRLFHGRGGSVGRGGGPSYQAILAQPAGSVAGQIRITEQGEVITAKYADPGNAQRNLETLVAATLEASILPDKKDPDAKLMQALSDVSFKYYRELITHPDFIDYFLQTSPIQEIATLNLGSRPASRKTLARIQDLRAIPWVFSWMQNRLMLPAWYGFGSAVETLCEDKPETLAALREHAQSNPFFQAMLSNMEQVMAKTDITLAENYAGLSESPEKAAVIFGMIKEEYQRSRKALLDLLQTEELLRDNRSLARSLALRIPYLNALNGLQVAMLKRLRKEPDNPHALLMVHLTINGVAQGLRNTG

SEQ ID NO: 25337 - protein, 451 aa, Neisseria meningitidis; identical to SEQ ID NO: 5920

SEQ ID NO: 25338 - protein, 444 aa, Neisseria meningitidis
MAKKYFGTDGVRGEVGQFPITPDFVLKLGYAAGQVLVQHDTDQKPTVLIGKDTRISGYMLEAALVAGFTAAGVNVIQTGPLPTPGVAYLTRALRLSAGVMISASHNAYSDNGIKFFAEGGVKLSDEIELEIEAKIDEEMKTQPSARLGRARRISGADDRYIEFCKSTFPSHSDLRGLKLVIDTANGAGYGVAPKVFHELGAQVVSIGDEPNGYNINEKCGATYTKTLQAAVLQHEADYGIALDGDGDRLMMVDKNGKVYDGDSLIYVIAKARAREGINIGGVVGTVMTNMAMEIALKEQGVDFCRAKVGDRYVLEQLNQRGWLVGGEASGHILCMDKHNTGDGIISALQVLAALQTLNQDLAAVCADWQPYPQTMINVRIGKGQNWQEASKDVLAEVEKELEGKGRVVLRASGTEPVVRVMVEARQADWARDGAERIASAIGSL

SEQ ID NO: 25339 - protein, 307 aa, Neisseria meningitidis; identical to SEQ ID NO: 2891

SEQ ID NO: 25340 - protein, 113 aa, Neisseria meningitidis; identical to SEQ ID NO: 6827

SEQ ID NO: 25341 - protein, 148 aa, Neisseria meningitidis; identical to SEQ ID NO: 1300

SEQ ID NO: 25342 - protein, 472 aa, Neisseria meningitidis
MDTKEILGYAAGSIGSAVLAVIILPLLSWYFPADDIGRIVLMQTAAGLTVSVLCLGLDQAYVREYYAAADKDILFKTLFLPPLLSAAAIAALLLSRPSLPSEILFSLDDAAAGIGLVLFELSFLPIRFLLLVLRMEGRALAFSSAQLVPKLAILLLLLTVGLLHFPANTAVLTAVYALANLAAAAFLLFQNRCRLKAVRRAPFSSAVLHRGLRYGIPIALSSIAYWGLASADRLFLKKYAGLEQLGVYSMGISFGGAALLFQSIFSTVWTPYIFRAIEANAPPARLSATAESAAALLASALCLTGIFSPLASLLLPENYAAVRFIVVSCMLPPLFCTLVEISGIGLNVVRKTRPIALATLGALAANLLLLGLAVPSGGARGAAVACAASFWLFFVFKTESSCRLWQPLKRLPLYMHTLFCLASSAAYTCFGTPANYPLFAGVWAVYLAGCILRHRKDLHKLFHYLKKQGFPL

SEQ ID NO: 25343 - protein, 91 aa, Neisseria meningitidis
MNEGEVVLTPEQIQTLYGYASRGDTYGGWRYLANLGDRYADDAAAIVGKDANLNGLNLWMKKGVENLWDDTVGKKIRLMCISVFWIVVFNL

SEQ ID NO: 25344 - protein, 356 aa, Neisseria meningitidis; identical to SEQ ID NO: 19837

SEQ ID NO: 25345 - protein, 618 aa, Neisseria meningitidis; identical to SEQ ID NO: 19908

SEQ ID NO: 25346 - protein, 366 aa, Neisseria meningitidis
MAGNTFGQLFTVTTFGESHGAGLGCIIDGCPPGLELSEADIQFDLDRRKPGTSRHVTQRREADQVEILSGVFEGKTTGTPIALLIRNTDQRSKDYGNIATSFRPGHADYTYWHKYGTRDYRGGGRSSARETAARVAAGAVAKKWLKEKFGTEITAYVTQVGEKEIRFEGCEHISQNPFFAANHSQIAELENYMDGVRKSLDSVGAKLHIEAANVPVGLGEPVFDRLDAEIAYAMMGINAVKGVEIGAGFDSVTQRGSEHGDELTPQGFLSNHSGGILGGISTGQDIRVNIAIKPTSSIATPRRSIDINGNPIELATHGRHDPCVGLRSAPIAEAMLALVLIDHALRHRAQNADVQVNTPDITLSNK

SEQ ID NO: 25347 - protein, 179 aa, Neisseria meningitidis; identical to SEQ ID NO: 18824

SEQ ID NO: 25348 - protein, 188 aa, Neisseria meningitidis; identical to SEQ ID NO: 1721

SEQ ID NO: 25349 - protein, 153 aa, Neisseria meningitidis; identical to SEQ ID NO: 750

SEQ ID NO: 25350 - protein, 658 aa, Neisseria meningitidis
MSKLKTIALTASGLSVCPGFLYAQNTSSHQIGLAIMRLNSSILDLPPTKQYFQSGSLWSELRQGFRMGEVNPELVRRHESKFIASHSYFNRVINRSRPYMYHIANEVKKRNMPAEAALLPFIESAFVTKAKSHVGASGLWQFMPATGRHYGLEKTPVYDGRHDIYAATDAALNYLQYLYGLFGDWPLAFAAYNWGEGNVGRAINRARAQGLEPTYENLRMPNETRNYVPKLLAVRNIIATPQSFGMNISDIDNKPYFQAVEPDRPLDNEAIVRLAGITQSELLALNPAFNVPAFIPKSKRKLLLPVASVQTFQSNYLNAAPDSLFSWEVYTPAAKTSLSDISTATGMSIADIKRLNNLNGNLVNAGRSILVAKNGKTLQTASESVVSIDIDNTPDTYRSNMPAGTVNVGIARIRPAAAQTADITVAPLPQKTVRTEPDPLVRIAEPALATAAAQPQTEKQTAMPSETQTATLAQIIPQNDMQAADELMQLVARNNLRRQAEETISAVIGTPDTVAEHNISSSPQHTVAADGKRRARLETRVAKAADGEAEISPLHASIHRVVEGDTLFNIAKRYNVSVADLIVANNIKGNTIQKGQVLRLAQAAPAQTRIEKVSYTARKGDTFKSIAARFNIHIDDIRRLNPNLNTINPGQRVKLIGS

SEQ ID NO: 25351 - protein, 236 aa, Neisseria meningitidis
MNAAIEHVQAVAFDLDGTLCDSVPDLAAAAEAMLEQLGMKPLPAKVVESYVGDGIGKLVHRVLTNDRDREADSELWEKGFVSYMKYYRDHLSVFTRPYPETEAGLALLKSLGIPLAVITNKNEILAVELLKQLGLADYFSLILGGDSLPEKKPSPLPLRHAAEVLGIDVANMVMVGDSRNDIIAAKAAGCLSVGVTFGYGDMTLLSQDDATRPDWIIGSLPEIYENLQPQKNKDEE

SEQ ID NO: 25352 - protein, 118 aa, Neisseria meningitidis; identical to SEQ ID NO: 423

SEQ ID NO: 25353 - protein, 123 aa, Neisseria meningitidis; identical to SEQ ID NO: 616

SEQ ID NO: 25354 - protein, 131 aa, Neisseria meningitidis; identical to SEQ ID NO: 3391

SEQ ID NO: 25355 - protein, 135 aa, Neisseria meningitidis; identical to SEQ ID NO: 803

SEQ ID NO: 25356 - protein, 428 aa, Neisseria meningitidis; identical to SEQ ID NO: 18332

SEQ ID NO: 25357 - protein, 187 aa, Neisseria meningitidis
VQDKNNLCWLDMEMTGLNPETDRIIEVAMIITDSDLNVLAQSEVYAVHQSDELLDNMDEWNTATHGRTGLTQRVRESSHTEAEVEQKLLDFMSEWVPGRATPMCGNSIHQDRRFMVKYMPKLENYFHYRNLDVSTLKELAKRWNPPVAKSVVKRGSHKALDDILESIEEMRHYREHFLISAPRAEAQ

SEQ ID NO: 25358 - protein, 190 aa, Neisseria meningitidis; identical to SEQ ID NO: 12790

SEQ ID NO: 25359 - protein, 421 aa, Neisseria meningitidis
MSEALAKETLNPFEIARKQVKTACDRLKTDPAVYEILKSPTRVLEVNFPVKLDDGTVKTFTGYRSQHNNAVGPYKGGVRFHPGVNLDEVKALSIWMTIKCCVAGIPYGGGKGGVTLDPRDYSEAELERIARAYSEAISPLIGEKIDIPAPDVNTNGKIMSWMVDAYENVVKHSAPGVFTGKPVEFGGSLARTEATGYGVNLAAVQALEKLGKDVKGATYAIQGFGNVGYHTGYYAHQSGAKVVAVSTVDVAIYNENGLDMEALFKEFQEKGFITNEASYGKEITNAELLALDVDVLAPCALENQLTSENAGKVRAKIVVEGANGPTTPEADVILRQNGVLVVPDILANCGGVVVSYFEWVQNLQGYYWEFDEVQEKETVVLRRAFRDIWNLAQEYDVDLRTASYMMSIRRVEKAMKLRGWY

SEQ ID NO: 25360 - protein, 331 aa, Neisseria meningitidis; identical to SEQ ID NO: 1014

SEQ ID NO: 25361 - protein, 1204 aa, Neisseria meningitidis
MSAPIQAFDPLTVPIAGTNLIEASAGTGKTYGIAALFTRLIVLEQKNVERVLVVTFTKAATAELKTRLRARLDDVLQVLESKEIAKLGDDTLSDGIAAYCAEHHKGDTFLPALLKQALQKEGRTRLIVRLKAAIGQFDNAAIYTIHGFCQRILRDYAFLCQAPFDVELTEEDGDRLLIPAQDFWRERVSNDPVLAALAFKRKAVPQTVLAQISRYLSRPYLNFRRPQADLKQAQRNAETSWQTICRLLPELEAGFWRIHPDLNGNSYRKNSFGNLFKELAQKSAAGQLPFLDKDTHDRLLKLASDKLEAALKKGKTPDAAAFAELQKLADFGRDLNALEEAEEATMIRLQLDLIGYLNRSLAEMKKSRRERGFDDLLLDVHTALTDNPHAETLARAVAENWETALIDEFQDTDPLQYEIFQKIFIAQNRPLFLVGDPKQAIYSFRGADIYAYLQAAGDARHRYTLATNYRSHAALIGSIGALFRLKERPFVLENIGYSEVGAARAESRLSPERPAVQVRWLHENDNEKANKDVLRRRAADYCADEIAHALNEAAGGRLNFKGCPLQSGDIAVLVRTHNEAVMVSAALKKRQVQSVLLSRESVFASPEAAALSALIGFWLEPRRAGTLRFVLTSGIFGYDAQQLHDFNQNESEILHWAESARTALDNWNQYGIFAAMQQFSQTHGIETRLLSRNNGRSLTNYFQLLELLAAEDAQNRNPAALHKWLRDQISLAGNNSGDNRAIRLESDEDLVKIVTMHASKGLQYPLVYCPFAWDAQDTGPSDWQILHQSANRTELLAKAQLSEDEQKQYADEEMAERLRLLYVALTRAEEQLNIYAAYSTNTADNPLAYLIEGSPQDSRETVRRAYACEKDGIAMLKRNWRRVADNAPSGTNFAFTENAPPPAAYRSNAGQTAEFAANSIPERGFRFVRHTSFTALSRHTQTPDGGEEDACPSLDAAETSVPAMPSETPTASDGISIHDFPKGTQAGLCLHEILEDFKFGQAAAGQETLIADKLKKYGFEEIWLPAVAEMAEACRKTPLTGAYDLSDISPECRCPEMGFTLHTEDFSLKRLRDWFARDDIRLPEVCRAAAETLDFHTVNGFLNGFVDMVCQDPDGNICVIDYKSNHLGTDASAYTQQAMDEAVAHHHYYLQALIYAVAAARYFKLRGQPPAAVSVRYLFLRGLDGKGGGVWRWDIDAAALEQIK

SEQ ID NO: 25362 - protein, 160 aa, Neisseria meningitidis; identical to SEQ ID NO: 6404

SEQ ID NO: 25363 - protein, 398 aa, Neisseria meningitidis
MQNYLTPNFAFAPMIPERASGSRVWDTEGREYIDFSGGIAVNALGHCHPALADALNAQMHKLWHISNIYTTRPAQELAQKLVANSFADKVFFCNSGAEANEAALKLARKYARDRFGGGKSEIVACINSFHGRTLFTVSVGGQPKYSKDYAPLPQGITHVPFNDIAALEAAVGEQTCAVIIEPIQGESGILPATAEYLQTARRLCDRHNALLILDEVQTGMGHTGRLFAYEHYGVVPDILSSAKALGCGFPIGAMLATEKIAAAFQPGTHGSTFGGNPMACAVGSRAFDIINTPETLNHVREQGQKLQTALLDLCRKTGLFSQVRGMGLLLGCVLDEAYRGRASEITAAALKHGVMILVAGADVLRFAPSLLLNDEDMAEGLRRLEHALTEFAATSDNP

SEQ ID NO: 25364 - protein, 191 aa, Neisseria meningitidis
LLCTQTDGDNAQKKTTTYKEQDPAKVTHYLTQPAEFSDYQRVYLDETGFDRHLFRPYARSLKGQIVKAQISGKRYRRLSLVSAQVGNRLIAPMVYQNTMTGVFFEAWFQQCLLPALTQKSVIILDNARFHRMGVLREMAEKLGHKVLPLAPYSPELNPIEKVWANIKRYLRTVLSDYARFDDALLSYFDFN

SEQ ID NO: 25365 - protein, 248 aa, Neisseria meningitidis
MSTQDLSGKIALVTGASRGIGAAIADTLAAAGAKVIGTATSESGAAAISERLAQWGGEGRVLNSAEPETVENLIADIEKTFGKLDILVNNAGITRDNLLMRMKEEEWDDIMQVNLKSVFRASKAVLRGMMKQRSGRIINITSVVGVMGNAGQTNYAAAKAGLIGFSKSMVREVGSRGITVNCVAPGFIDTDMTRALPEETRQTFTAQTALGRFGDAQDIADAVLFLASDQAKYITGQTLHVNGGMLMP

SEQ ID NO: 25366 - protein, 134 aa, Neisseria meningitidis; identical to SEQ ID NO: 2143

SEQ ID NO: 25367 - protein, 768 aa, Neisseria meningitidis; identical to SEQ ID NO: 19576

SEQ ID NO: 25368 - protein, 281 aa, Neisseria meningitidis; identical to SEQ ID NO: 19438

SEQ ID NO: 25369 - protein, 307 aa, Neisseria meningitidis
MKTIAPSHIKPLMPELNQSQRNRIIFIDFYLCFLGKINRKDLMQAFQISPAVATRDFALYCSSFSKNLRFDTKSKFYLSTEDFEPQFPHSFENAIKILNGSLIFDIDSQHQPLLPFDLPPVLINPDVLIFSKISKALSLKKPLKISYHSISSGLSEKVIVPLALVNDGFRWHLRAFDRTKNRFADFVLTRIIQANILLAENIEENETINNDIDWNRIVKIELVPHPNHDEAKKVIEMDFGMTNGKLELALRASNIGYVLQQWRVDCSSDHHIDDPAFRLWLLDNLVLYGINNAEHLAPAFDKKRSKP

SEQ ID NO: 25370 - protein, 1227 aa, Neisseria meningitidis
MTYPIPKPREKSRWLNLSQGSLPLALARYLPHRRLKVVLTQDAEQALRLQTAWRFFRPHDTAVFLPDWETLPYERFSPHQDLVSERLSALWQIKSGAADVLFVPVATAMQKLPPVPFLAGRTFWLKTGQTLDIGRLKSDLVDAGYNHVSHVVAAGEFAVRGGIVDLFPMGSEMPYRIDLFDDEIDSIKTFDTETQRTISPVSEIRLLPAHEFPTDNEAQKIFRSRFREEVDGNPNDAAVYKAVSNGHFGAGVEYYLPLFFENELETLFDYIGEDALFVSLGDVHAEANRFWSDVKSRYAMAQGDETYPPLLPQYLYLSADVFAGRLKNYGQVLPDVSGKEYTLPDLAVNRQADEPLQALKDFQTAFDGRILLCAESLGRRETMLGFLQQNGLKAKPVSDWQGFLSAHEPLMITVAPLAYGFKLGGLQSPSQQQAAPASEGEGDAITDQTEFSASATNPLPSPLPQEREQSTAAISDSLKTKSSLYPIENSLHGQIQQQPAPSPVGEGWGEGKAVAAQSAIAVITESDLYQYVARSRIHNRRKKHAAVSDDLLRDLAEINIGDPVVHEEHGIGRYMGLITMNLGGETNEMMLLEYAGEAQLYVPVSQLHLISRYSGQAHENIALHKLGSGAWNKAKRKAAEKARDTAAELLNLYARRAAQSGHKFEINELDYQAFADGFGYEETEDQAAAIAAVIKDLTQAKPMDRLVCGDVGFGKTEVALRAAFVAVMGGKQVAVLAPTTLLVEQHAQNFADRFADFPVKVASLSRFNNSKATKAALEGMADGTVDIVIGTHKLVQDDIKFKNLGLVIIDEEHRFGVRQKEQLKRLRANVDILTMTATPIPRTLSMALEGLRDFSLITTAPSRRLAVKTFVKPFSEGSVREAVLRELKRGGQVFFLHNEVDTIENMRERLETLLPEARIGVAHGQLRERELEQVMRDFLQQRFNVLLCSTIIETGIDIPNANTIIINRADKFGLAQLHQLRGRVGRSHHQAYAYLLTPEYITKDAEKRLDAIAAADELGAGFTLAMQDLEIRGAGEILGEGQSGEMMQVGFTLYTEMLKQAVRDLKKGRQPDLDAPLGITTEIKLHSPALLPESYCPDIHERLVLYKRLAVCETVQQINAIHEELVDRFGLPEQPVKTLIESHHLRLMAKELGINAIDAAGEAVTVTFGKNNNIDPTEIILLIQNDKKYRLAGADKLRFTAEMENIEVRINTVKNVLKTLQNRCLPK

SEQ ID NO: 25371 - protein, 221 aa, Neisseria meningitidis
MDAWFEDTAMGRYVAKLEQDFFGRNLDSYRFSGMCAVQVGGPWLSLSEDVVCVPRDMSMSAENMAVADVSADMLLFPHTLEGGVPSQILSEAHRILKPCGRLMLTGFNPYSLWGFGRWFDGERLPEKRFCLPLPELKRQLADVGFDIEFGKFMVYLPPVSSIGQIRFWRFMEKAGDRWWPQCAAVYGLVLVKRAAGVTPLPAWDGYLGGKALAAGAARVAD

SEQ ID NO: 25372 - protein, 242 aa, Neisseria meningitidis; identical to SEQ ID NO: 201

SEQ ID NO: 25373 - protein, 248 aa, Neisseria meningitidis; identical to SEQ ID NO: 3755

SEQ ID NO: 25374 - protein, 99 aa, Neisseria meningitidis; identical to SEQ ID NO: 1110

SEQ ID NO: 25375 - protein, 91 aa, Neisseria meningitidis; identical to SEQ ID NO: 9295

SEQ ID NO: 25376 - protein, 259 aa, Neisseria meningitidis; identical to SEQ ID NO: 18496

SEQ ID NO: 25377 - protein, 113 aa, Neisseria meningitidis
MPSEPLKGLPEQNVVRLTGKHPNDLEAVVGKCMETDGKGAPSGWAANGVCHTLFAKLVGNIAEDGGKLTDYLISHSALQPYQAGKSGYAAVQNGRYVLEIDSEGAFYFRRRHY

SEQ ID NO: 25378 - protein, 374 aa, Neisseria meningitidis
MTATTASSAKPYLKIQGLVKKFGDNYAVDNIDLDIYQHEIFALLGSSGSGKSTLLRMLAGMESPNQGKIILDGQDITKLAPYDRPINMMFQSYALFPHMTVEQNIAFGLKQDKMPKGEIAARVEEMLRLVQMTKFAKRKPHQLSGGQQQRIALARSLAKRPKILLLDEPLGALDKKLRQQTQLELVNTLEQVGVTCIMVTHDQEEAMTMATRIAIMSDGQLQQVGTPSDVYDYPNSRFTAEFIGETNIFDGVVIEDHADYAVIECEGLENHVRIDHGLGGPSEQDLWVSIRPEDIDLYKEKPEYLGDYNWAKGTVKEIAYLGSFAIYHIKLANGRVVKSQVPAPYWYVRNITPPTWDETVYISWPENQPTPLFR

SEQ ID NO: 25379 - protein, 353 aa, Neisseria meningitidis; identical to SEQ ID NO: 19269

SEQ ID NO: 25380 - protein, 40 aa, Neisseria meningitidis; identical to SEQ ID NO: 14736

SEQ ID NO: 25381 - protein, 321 aa, Neisseria meningitidis; identical to SEQ ID NO: 6649

SEQ ID NO: 25382 - protein, 462 aa, Neisseria meningitidis; identical to SEQ ID NO: 19162

SEQ ID NO: 25383 - protein, 263 aa, Neisseria meningitidis
MSEHRVNHEPVFLLASSPWRESSLRVEAFSRRYGRVALLARSARKRQSELRGVLVSFVPVSASWYGSQELKTLHRAEWVGGWRQPQGRALFSGLYVNELVLKLTAREDPMPELYDALAKVMEAVCREANHIADLRRFEWKLLNALGVAPDLHADGTGGDILADKTYRLMPEEAVMPVCRDTDALSHEAGAIVEGQSLIDLREGSFRTAESLQQALKITRLFIRHLLPEGLKSRQVLEQIRQFDRKETARETVPTSDGTASNAV

SEQ ID NO: 25384 - protein, 389 aa, Neisseria meningitidis; identical to SEQ ID NO: 3056

SEQ ID NO: 25385 - protein, 155 aa, Neisseria meningitidis; identical to SEQ ID NO: 3828

SEQ ID NO: 25386 - protein, 265 aa, Neisseria meningitidis
MLKQRVITAMWLLPLMLGMLFYAPQWLWAAFCGLIALIALWEYARMSGLCKIKTNHYLAATLVFGVVAYAGGWMLPNLVWYVVLAFWLAIMPLWLRFKWRLNGGWQVYAVGWLLVMPFWFALVSLRPHPDDALPLLAVIGLVWVADVCAYFSGKAFGKHKIAPAISPGKSWEGAIGGAVCVAVYMTAVRSAGWLAFDTGWFDTVLIGLVLTVVSVCGDLLESWLKRAAGIKDSSNLLPGHGGVFDRTDSLIAVISVYAAMMSVLN

SEQ ID NO: 25387 - protein, 295 aa, Neisseria meningitidis
MYTGRFAPSPTGLLHIGSLLTAVASYADARSNGGKWLVRMEDLDPPREMPGAASHILHTLEAFGFEWDGEVAYQSRRYALYEETLCRLKTAGLVYPCHCSRKDWQTGARRGADGFVYNGRCRNPQQRPALQGKQPAWRIRVPDRDIGFSDGIVGGYAQNLARDIGDFVLLRADGYWAYQLAVVADDAEQGVTHIVRGQDLLVSTPRQIYLQQCLDVPTPQYAHLPLLTNAQGQKWSKQTLAPALDLNRREQLLRQVFRYLNLPEAPEADRPAELLDWAVAHWDMGKVPKHAITAP

SEQ ID NO: 25388 - protein, 96 aa, Neisseria meningitidis; identical to SEQ ID NO: 2317

SEQ ID NO: 25389 - protein, 400 aa, Neisseria meningitidis; identical to SEQ ID NO: 19188

SEQ ID NO: 25390 - protein, 143 aa, Neisseria meningitidis
MGSNAWLFWALASAGFASLTAIFAKMGLQGIDSDFATFIRTLVILAALLLFLTYTGKWQGVNGFTGHNWTFLILSGLATGASWLAYFKALQLGNASQVAPVDKFSLVLVALMAVVFLNERPSTQEWIGLGLVTAGVLVLALKR

SEQ ID NO: 25391 - protein, 199 aa, Neisseria meningitidis; identical to SEQ ID NO: 3649

SEQ ID NO: 25392 - protein, 311 aa, Neisseria meningitidis
MNPKKLVIASRESLLAMWQAKHIQGRLKALYPDCEVEILGMTTRGDQILDKTLSKVGGKGLFVKELEQALYDGRADLAVHSIKDVPMDLPEGFALAAIGERANPFDAFVSNQYARLEEMPKGVVVGTSSLRREAQLRARYPHLLIKPLRGNVQTRLSKLDNGEYDAIILAAAGLQRLELDGRIRMILSESDSLPAAGQGALGIEIAAHREDLYEVLKPLNHDTTHACVTAERALARALGGSCQVPLAAYCTEENGLLTLRGLVGHPDGSVILQADAQAPAEYADALGRAVAKKLADDGARELIGAVLNTEN

SEQ ID NO: 25393 - protein, 451 aa, Neisseria meningitidis
MKAPELLLPAGGLERMRAAYDYGADAVYAGSPRYSLRARNNEFAKLDILEQGIKEAHERNKKFFLTVNTLPHNSKLKTFVSDMEPLIAMKPDALIMADPGLIMTVREKWPEMPIHLSVQANTTNYWGVKFWQNIGVERIILSRELSMEEIAEIRQQCPDIELEVFIHGALCIAYSGRCLLSGYFNHRDPNQGTCTNSCRWDYKVHNATESDAGDAQLLQGFNFEKAQEEANQNFEGINGQKRHPYADKVFLIEESNRPGEMMPIMEDEHGTYIMNSKDLRGIEVVEKLAKIGVDSLKVEGRTKSLYYVARVAQSYRKAIDDAVAGRPFDYSLLSELEGLANRGYTSGFLERHHTQDYQNYLTGHSTAKQSQYVGHVTEIDENGWATVEVKNRFAVGDSLEIIHPNGNQTIKLEQMTRKGQPVDVAPGNGIQVKIPDMQGKEKALIARVLNP

SEQ ID NO: 25394 - protein, 335 aa, Neisseria meningitidis
MSTFFQQTSQAMIAKHIDRFPLLKLDQVIDWQPIEQYLNRQKTRYLRDHRGRPAYPLLSMFKAVLLGQWHSLSDPELEHSLITRIDFNLFCRFDELSIPDYSTLCRYRNWLAQDNTLSELLELINRQLTEKGLKVEKASAAVIDATIIQTAGSKQRQAIEVDEEGQVSGQTTLSKDKNARWTKKNGLYKLGYKQHTRTDAEGYIEKLHITPANAHECKHLSPLLEGLPKGTTVYADKGYDSAENRQHLEEHQLLDGIMRKACRNRPLSEVQTKRNRYLSKTRYVVEQSFGTLHRKFRYARAAYFGLLKVSAQSHLKAMCLNLLKAANRLSAPAAA

SEQ ID NO: 25395 - protein, 500 aa, Neisseria meningitidis
MAKVLIVPVSAGLDASAAAQAFAKALDAQIFQAVDATAETLLAQGKSDDWFDALVGKVAALDAANLVIEGIAPDADKIYLAGKNVELALSLDAAAVFAVRSDNADADELANRLNLAKQFFAAAPGVLEGFVVDGAAASVAEAAAEKTGLTFFGSSDALKDVSVLAGREAKRLSPAQFRYNLIDFARQADKRIVLPEGAEPRTVQAAAICHEKGIARCVLLAKREEVEAVAKERGISLPDSLEIIDPASLVEQYVEPMCELRKSKGLTPEDARKQLQDTVVLGTMMMAQNDVDGLVSGAVHTTANTIRPALQLIKTAPGASLVSSVFFMLLPNQVLVFGDCAVNPNPTAQQLADIAIQSADSAKAFGIDPKVAMISYSTVNSGSGPDVDTVIEATKLAREKRPDLAIDGPLQYDAATVPGVGKSKAPGSPVAGQATVLVFPDLNTGNCTYKAVQRNANVLSVGPLLQGLRKPVNDLSRGALVEDIVFTIALTAVQAKQMEG

SEQ ID NO: 25396 - protein, 512 aa, Neisseria meningitidis
MNMLGALAKVGSLTMVSRVLGFVRDTVIARAFGAGMATDAFFVAFKLPNLLRRVFAEGAFAQAFVPILAEYKETRSKEAAEAFIRHVAGMLSFVLVIVTALGILAAPWVIYVSAPGFAQDADKFQLSIDLLRITFPYILLISLSSFVGSVLNSYHKFGIPAFTPTFLNVSFIVFALFFVPYFDPPVTALAWAVFVGGILQLGFQLPWLAKLGFLKLPKLNFKDAAVNRVMKQMAPAILGVSVAQVSLVINTIFASYLQSGSVSWMYYADRMMELPGGVLGAALGTILLPTLSKHSANQDTEQFSALLDWGLRLCMLLTLPAAVGLAVLSFPLVATLFMYREFTLFDAQMTQHALIAYSFGLIGLIMIKVLAPGFYARQNIKTPVKIAIFTLICTQLMNLAFIGPLKHVGLSLAIGLGACINAGLLFYLLRKHGIYRPGKGWAAFLAKMLLALAVMGGGLYAAQIWLPFDWTHTGGMQKAARLFILIVIGGCLYFASLAALGFRPRHFKRVES

SEQ ID NO: 25397 - protein, 129 aa, Neisseria meningitidis; identical to SEQ ID NO: 2209

SEQ ID NO: 25398 - protein, 88 aa, Neisseria meningitidis; identical to SEQ ID NO: 6869

SEQ ID NO: 25399 - protein, 363 aa, Neisseria meningitidis; identical to SEQ ID NO: 19294

SEQ ID NO: 25400 - protein, 154 aa, Neisseria meningitidis; identical to SEQ ID NO: 4442

SEQ ID NO: 25401 - protein, 492 aa, Neisseria meningitidis; identical to SEQ ID NO: 18142

SEQ ID NO: 25402 - protein, 311 aa, Neisseria meningitidis
MGHNMMTTQKWYEHITNVIIGNTANFNSGCPESIDYVDEKKGVPLAAMKYILMYTEAAASHAYLFEHDLKKFKQYAYVAGKLGILQSVDDEDPEPFFFPCDMLNIQDPMFLMLMSDSPQLREFLVRNIDNIANDTEAFVNRYDLNRHMIYNTLLMVEGKQLDRLKQRSEKVLAHPTPSKWLQKRLYDYRFFLAFAEQDAEAMKAALEPLFDKKTARMAAKETLSYFDFYLQPQIVTYAKIASMHGFDLGIDHEIAPRDLTVYDPLPADEYQDIFDFMKQYDLSYPYEYLQDWIDYYTFKTDKLVFGNAKRE

SEQ ID NO: 25403 - protein, 256 aa, Neisseria meningitidis; identical to SEQ ID NO: 19257

SEQ ID NO: 25404 - protein, 962 aa, Neisseria meningitidis
MSNTTVEQFAAELKRPVEDLLKQLKEAGVSKNSGSDSLTLDDKQLLNAYLTKKNGSNGGTISIRRTKTEVSTVDGVKVETRKRGRTVNIPSAEELAAQVKAAQTQAAPVRPEQTAEDAAKARAEAAARAEARAKAEAEAAKLKAAKAGNKAKPAAQKPTEAKAETAPVAAETKPAEESKAEKAQADKMPSKKPAEPKEKAAKPKHERNGKGKDAKKPAKPAAPAVPQPVVSAEEQAQRDEEARRAAALRAHQEALLKEKQERQARREAMKQQAEQQAKTAQEAKTGRQRPAKPAEKPQAAAPAVENKPVNPAKAKKEDRRNRDDEGQGRNAKGKGGKGGRDRNNARNGDDERVRGSKKGKKLKLEPNQHAFQAPTEPVVHEVLVPETITVADLAHKMAVKGVEVVKALMKMGMMVTINQSIDQDTALIVVEELGHIGKPAAADDPEAFLDEGAEAVEAEALPRPPVVTVMGHVDHGKTSLLDYIRRTKVVQGEAGGITQHIGAYHVETPRGVITFLDTPGHEAFTAMRARGAKATDIVILVVAADDGVMPQTIEAIAHAKAAGVPMVVAVNKIDKEAANPERIRQELTAHEVVPDEWGGDVQFIDVSAKKGLNIDALLEAVLLEAEVLELTAPVDAPAKGIIVEARLDKGRGAVATLLVQSGTLKKGDMLLAGTAFGKIRAMVDENGKSITEAGPSIPVEILGLSDVPNAGEDAMVLADEKKAREIALFRQGKYRDVRLAKQQAAKLENMFNNMGETQAQSLSVIIKADVQGSYEALAGSLKKLSTDEVKVNVLHSGVGGITESDVNLAIASGAFIIGFNVRADASSRKLAENENVEIRYYNIIYDAIDDVKAAMSGMLSPEEKEQITGTVEIRQVISVSKVGNIAGCMVTDGVVKRDSHARLIRNNVVIHTGELSSLKRYKDDVKEVRMGFECGLMIKGFNEIMEGDQLECFDIVEVARTL

SEQ ID NO: 25405 - protein, 215 aa, Neisseria meningitidis; identical to SEQ ID NO: 2727

SEQ ID NO: 25406 - protein, 499 aa, Neisseria meningitidis; identical to SEQ ID NO: 18894

SEQ ID NO: 25407 - protein, 177 aa, Neisseria meningitidis; identical to SEQ ID NO: 1513

SEQ ID NO: 25408 - protein, 170 aa, Neisseria meningitidis; identical to SEQ ID NO: 8813

SEQ ID NO: 25409 - protein, 464 aa, Neisseria meningitidis; identical to SEQ ID NO: 4310

SEQ ID NO: 25410 - protein, 183 aa, Neisseria meningitidis; identical to SEQ ID NO: 18479

SEQ ID NO: 25411 - protein, 481 aa, Neisseria meningitidis
MNWSDLNLMPAMPEIVLLALLVLLLLADLWVSDDKRRWTHYGALATVAVTAVVQLAVWEQGSTSSFNGMYIADGMSRLAKMVLYALMFTLFVYAKPYNQVRGIFKGEFYTLSLFALLGMGVMVSAGHFLTAYIGLELLSLALYALIALRRDSGFAAEAALKYFVLGALASGLLLYGISMVYGATGSLEFAGVLASSFNEEANEWLLKLGLVFIVVAVAFKLGAVPFHMWVPDVYHGAPTSVTALVGTAPKIAAVVFAFRILVTGLGTVHHDWSLMFALLAAASLLVGNLAAIMQTNIKRMLAYSTVSHMGFILLAFMAGAVGFAAGLYYAITYALMAAAGFGVLMVLSDGDNECENISDLAGLNQHRVWLAFLMLLVMFSMAGIPPLMGFYAKFGVIMALLKQGYVWLSVFAVVMSLIGAFYYLRVVKVMYFDESGRARPAAGGNNAAKFLLSINALLLVLWGIMPQTVIDWCAKALENTL

SEQ ID NO: 25412 - protein, 190 aa, Neisseria meningitidis; identical to SEQ ID NO: 917

SEQ ID NO: 25413 - protein, 294 aa, Neisseria meningitidis; identical to SEQ ID NO: 19197

SEQ ID NO: 25414 - protein, 187 aa, Neisseria meningitidis
MRHLENNGYANVAGLERILAVKTDNYKEKENLLHEIFSKSRIGDTELFAVDENLVKRLFLSLRGEIVFPKNETAESEFEKSVHERRQEGNAESGRKQLLDLVRRGHREYPYALPRLLAGAASYKPKKSKIRLFKEAYFRKNGRRLTDEIADGIHIYTCFSRADLEKAYSEYLELFKSESDAESRKPR

SEQ ID NO: 25415 - protein, 544 aa, Neisseria meningitidis; identical to SEQ ID NO: 2758

SEQ ID NO: 25416 - protein, 212 aa, Neisseria meningitidis; identical to SEQ ID NO: 324

SEQ ID NO: 25417 - protein, 621 aa, Neisseria meningitidis; identical to SEQ ID NO: 18904

SEQ ID NO: 25418 - protein, 177 aa, Neisseria meningitidis; identical to SEQ ID NO: 3295

SEQ ID NO: 25419 - protein, 382 aa, Neisseria meningitidis
MPLPLPSPEARQFSLKLQTLIAEKIGKHGNWIPFSRFMELVLYAPQYGYYTGGSHKIGNTGDFITAPTLTSLFAQTLARQLQELLSQTAGNIYEFGAGTGQLAADLLGSISDGISRYYIIEISPELAARQKNLIQARAPEASQKVVHLTALPEAFDGIIIGNEVLDAMPVEIVRKNEGGSFEHVGVCLDNDRFTYSARPLHDLQLSALASLYFPQTDYPYTSELHPQQYAFIRTLASRLERGGMIFIDYGFDAAQYYHPQRNQGTLIGHYRHHVIHNPFDFIGLADLTAHVNFTDIAQAGTDAGLDLIGYLPQSHFLLNLGITELLAQTGKTDSAAYIREAAAVQKLIDQHEMGELFKVIAFGKNIGVDWAGFRFGDICHKL

SEQ ID NO: 25420 - protein, 99 aa, Neisseria meningitidis; identical to SEQ ID NO: 4147

SEQ ID NO: 25421 - protein, 671 aa, Neisseria meningitidis
MMKLNPQQLEAVRYLGGPLLVLAGAGSGKTGVITQKIKHLIVNVGYLPHTVAAITFTNKAAAEMQERVAEMLPKSQTRGLTICTFHSLGMKILREEANHIGYKKNFSILDSTDSAKIIGELLGGTGKEAVFKAQHQISLWKNDLKTPEDVVQTASNAWEQQTARVYASYQETLQSYQAVDFDDLIRLPAVLLQQNSEVRNKWQRRLRYLLVDECQDTNTCQFALMKLLTGAEGMFTAVGDDDQSIYAWRGANMENLRKMQENYPQMKVVKLEQNYRSTARILKIANKVIENNPKLFTKKLWSQLGEGEPVKVVACQNEQHEADWVVSQIIKQKLIGGDKTQYADFAVLYRGKHQARIFEEALRGVRIPYRLSGGQSFFDKAEIKDVLSYVRLLANPNDDPAFLRAVTTPKRGIGDVTLGKLNAYAHEHECSLYEAAQTEEALATLNNTNRQHLQAFMDMFGSYRAKAETGEAGEFINSLLEEIDYENHLLASEEGKAGEIKWRNVGDLVSWFARKGGEDGKNIIELAQTVALMTLLEGKDEEETDAVSLSTLHAAKGLEYPYVFLVGCEEGVLPHNDSIEEGNVEEERRLMYVGITRAKRQLTLTHCVKRKKQGIWQFPEPSRFIDEMPQEDLKILGRKGGEPIVSKEEGRRNLADIIGRLDSMKKGGPED

SEQ ID NO: 25422 - protein, 250 aa, Neisseria meningitidis; identical to SEQ ID NO: 2214

SEQ ID NO: 25423 - protein, 484 aa, Neisseria meningitidis; identical to SEQ ID NO: 18202

SEQ ID NO: 25424 - protein, 294 aa, Neisseria meningitidis; identical to SEQ ID NO: 19808

SEQ ID NO: 25425 - protein, 186 aa, Neisseria meningitidis; identical to SEQ ID NO: 1480

SEQ ID NO: 25426 - protein, 149 aa, Neisseria meningitidis; identical to SEQ ID NO: 2323

SEQ ID NO: 25427 - protein, 60 aa, Neisseria meningitidis; identical to SEQ ID NO: 3237

SEQ ID NO: 25428 - protein, 225 aa, Neisseria meningitidis
MSIKQWPEGERPREKLLERGAAALSDAELLAILLRVGTRGMSAVDLARYLLQEFGSLGRLMSAEVGKLSAYKGMGTASFTQFAVVREIGRRILAEELQESIVLSDPDTVADYLRFHLGQEKVEVSVALLLNRQNQLIAVRELSRGTVAENTIYIREIVKLALDEYADSLIIAHNHPGGSPEPSQEDIMFTRRLAQAMSLVDVSLLDHFIVTSQSVCSFRQLGLMP

SEQ ID NO: 25429 - protein, 626 aa, Neisseria meningitidis
MNIFYEESGQFKIAAIIQKNDATYQVDTPHGKRTKVKANNVFAEFDGDMAAFLENAQAQAADIDTDLLWEVCGEEEFTAEAIAEEYYGHAPTKTELAATLIALYAAPMYFYKKAKGVFKAAPEETLKQALAAIERKKQQDAQIDAWAEALKRGEMPSEIAADLKTILHAPDKQSLTYKAFTKAADALKTSAYELGKKTGGITSIPQYLQDGFEIKYFPKGTGFPDLPLPEMPDLPKADVTAFSIDDESTTEVDDALSLTDLGNGTKRVGIHIAAPSLAVKPSDKMEKNIMERLSTVYFPGGKITMLPENWIAAFSLDAGAHRPAVSIYFDVDSKFNVGAPTCKIEAVNISENLRIQAIEPHFNAEAGLDEAGEMMFAHHQDLIWFYQFAITLQKARGKYEPNRAPQYDYSIELDKEDNVSVVRRERGSPIDTLVSEMMILANSTWAQMLHDNDLPGLFRVQPTGKVRMSTKSEPHIGMGVQHYGWFTSPLRRAADYINQKQLISLIDDTAEPLYQNSDAELFAALRDFDAAYTAYADFQRQMEAYWSLVYLQQQGTSELTATILKEDLVRIEGLPLVTRATGIPFDALPKSQALFKITELDAEKQFVSLNYIKAVALAGKTAGNAV

SEQ ID NO: 25430 - protein, 485 aa, Neisseria meningitidis; identical to SEQ ID NO: 22659

SEQ ID NO: 25431 - protein, 259 aa, Neisseria meningitidis; identical to SEQ ID NO: 14490

SEQ ID NO: 25432 - protein, 370 aa, Neisseria meningitidis
MDLSIVVPIYNVESYLEACLSSIEPILSNENVELILVNDGSKDGSEDICYKYIDKTTNNKQQTTNNKQQTTNNKQQTTNNKQQTTNNKQQTTNNKQQTTNNTRYRTPNIKYIYQDNQGTAEARNTGIKNSNGKYIVFIDSDDFINCQVLLDFLSKDDIDMPDVVFLNAVKYDKGSVSHFGEDYQPEKILNQSKVEVLKGLCRFRKFPGSACNKIIKRELIIKEKLFFEKEVYAEDIEWSMRLFNAATTFSYLDGCYYYYRQGRKDSKTGTVSEKSIKSLLYILEKNAEMEFDRDISSYLYSFLSYEYLVLLFIMTSKNIECDADIKRRAYHLRFMLLKSNKLIYKLIFPIITLFGVDITGRILKAIRGNI

SEQ ID NO: 25433 - protein, 352 aa, Neisseria meningitidis
MKNKLTLRYFKITRCGYWSGSSKEPNHYEDLLKTLTHLETYVKGKTIEETGISRDDKEPSTFLLDICKKNGLWLLAFWNPAAESSSDEIVSLNMKSKLGQVDSSPVTAGNGKTFGFVSYFLIWPEHNFYSTILSPNATLAGRTEFEEYMLNFLWIDPNFIEKTTYEETSTDGIIHTMERTNFKLPLKINGTPVPRFAGKLAKSPSEKEYVISNYDQVTQVHNQCTVKVTSGQSSSGILKKMLPSFFGSTELFAPLKTIRVNHSVSAAFENKSNLKDWIEDWEKNSFDLDKDDCGFKLKNDDKIYWIRGNVIKCELDVNLHKENGIYPAAKILDIIDQRKDYVLNEFKLSDDS

SEQ ID NO: 25434 - protein, 751 aa, Neisseria meningitidis
MKTDIQTELTQALLPHEKVWANEEKTILAKNILLDLVEKTDPTIIGLLLNNDELKRHFFVEVNGVLVFKLQDLRFFLDKHSVNNSYTKYANRIGLTDGNRFLKDNSDIVLDFPFKDCVLNGGQSTEEGEEIYFKRSNSQPASQPASQPASQPASQPASQPASQPASQPASQPASQPASQPASQLYTKLTRKRQEIFFNQTLAFDEIDRLFDAKAFSKFSRYTADGKQAVGEIKRHSDGTPAENLIIKGNNLIALHSLAKQFKGKVKLIYIDPPYYFVKKKQQDSFGYNTNFKLSTWLTFMKNRLSIAKELLTDDGIIVISIDDDGNAYLKILLDEIFGFENFIGNLPTIMNLKGNNDEYAFAGTHEYTLVFAKNKDKSTFYEFPIDEDNFLEKWEEDEIGFYKKGAPMRATGTEDKREDRPEMFYPFLVKNNTVSTITDEEFSQIYNKDLEVFNDDFIQKLKEKYENLGYNFILPIADKQWGRWRWGYSIKNKARLQTDIIVSQSKNGISLYKKQRPELDDLPTKKPKTIFYKPEYSSGNGTEQMKNLFGEKAFKNPKPEELIQDFITITTNESDIVLDYHLGSGTTAAVAHKMNRQYIGIEQMDYIETLAVERLKKVIDGEQGGISKAVNWQGGGEFVYAELAPFNETAKQQILACEDSDGIKTLFEGLCERYFLKYNVSVNEFSQIIQEPEFQSLPLDEQKQMVLEMLDLNQMYVSLSEMDDEQFADCLNDDDKAVSRAFYQAEKKNGE

SEQ ID NO: 25435 - protein, 758 aa, Neisseria meningitidis
MTTLHFSGFPRVGAFRELKFAQEKYWRKEISEQELLAVAKDLREKNWKHQVAANADFVAVGDFTFYDHILDLQVATGAIPARFGFDSQNLSLEQFFQLARGNKDQFAIEMTKWFDTNYHYLVPEFHADTEFKANAKHYVQQLQEAQALGLKAKPTVVGPLTFLWVGKEKGAVEFDRLSLLPKLLPVYVEILTALVEAGAEWIQIDEPALAVDLPKEWVEAYKDVYATLSKVSAKILLSTYFGSVAEHAALLKALPVDGLHIDLVRAPEQLDAFADYDKVLSAGVIDGRNIWRANLNKVLETVEPLQAKLGDRLWISSSCSLLHTPFDLSVEEKLKANKPDLYSWLAFTLQKTQELRVLKAALNEGRDSVAEELAASQAAADSRANSSEIHRADVAKRLADLPANADQRKSPFADRIKAQQAWLNLPLLPTTNIGSFPQTTEIRQARSAFKKGELSAADYEAAMKKEIALVVEEQEKLDLDVLVHGEAERNDMVEYFGELLSGFAFTQYGWVQSYGSRCVKPPIIFGDVSRPEAMTVAWSTYAQSLTKRPMKGMLTGPVTILQWSFVRNDIPRSTVCKQIALALNDEVLDLEKAGIKVIQIDEPAIREGLPLKRADWDAYLNWAGESFRLSSAGCEDSTQIHTHMCYSEFNDILPAIAAMDADVITIETSRSDMELLTAFGEFQYPNDIGPGVYDIHSPRVPTEAEVEHLLRKAIEVVPVERLWVNPDCGLKTRGWKETLEQLQVMMNVTHKLRAELAK

SEQ ID NO: 25436 - protein, 299 aa, Neisseria meningitidis; identical to SEQ ID NO: 167

SEQ ID NO: 25437 - protein, 197 aa, Neisseria meningitidis; identical to SEQ ID NO: 5504

SEQ ID NO: 25438 - protein, 231 aa, Neisseria meningitidis; identical to SEQ ID NO: 10637

SEQ ID NO: 25439 - protein, 185 aa, Neisseria meningitidis; identical to SEQ ID NO: 5793

SEQ ID NO: 25440 - protein, 508 aa, Neisseria meningitidis
MNPMYITFAIYLVAVLLIGLAAYFSTRNFDDYILGGRSLGPFVTAMSAGASDMSGWLLMGLPGAIYLSGLNEAWIAIGLLVGAYFNWLLVAGRLRVHTEYANNALTLPDYFFHRFGAGGHLMKVVSALIILFFFTIYCASGIVAGATLFQSLFEGMTYNQAMWLGAGATIAYTFLGGFLAVSWTDTLQASLMIFALILTPVMVYLGLGGAEQMSAAIQSVAAGTGKEYGSLFAGTTVIGIISTAAWGLGYFGQPHILARFMAAESAKSLVSARRIGMTWMALCLAGAVAVGYFGIAYFGANPDKVSSMSGNHERIFIALSTLLFNPWIAGIILSAILAAVMSTLSCQLLVCSSAITEDFYKGFLRKNAQQSELVWVGRLMVLAIAVISILIASDPNSKVLGLVSYAWAGFGAAFGPIVILSVLWKRITAYGALSGMVAGALTVVVWAEWIKKPAQAAGESGLLTMYEIVPGFIVCLIIAVLVSLFNKEPSREIQKRFEKADADYRAAR

SEQ ID NO: 25441 - protein, 371 aa, Neisseria meningitidis; identical to SEQ ID NO: 849

SEQ ID NO: 25442 - protein, 105 aa, Neisseria meningitidis; identical to SEQ ID NO: 895

SEQ ID NO: 25443 - protein, 483 aa, Neisseria meningitidis; identical to SEQ ID NO: 19390

SEQ ID NO: 25444 - protein, 163 aa, Neisseria meningitidis
MAGPIFVVIASVAMFFVAQQHATDLVTDDYYKDGKHIDIQLHRDEEAVRRHIGVQVLISPDMNAAKVFVGGEFDGKQPLNLLLMHPTRKADDQTVALKPVGSAQNGRAEYEAVFKTLSPTNHWYVRVEDAAGVWRVENKWITSQGNAVDLTPMDKLFNNAGSK

SEQ ID NO: 25445 - protein, 66 aa, Neisseria meningitidis
LKYSAILPQKAAAVKKSGNYWQFMRNFDKLAEEAAEHAAEGAVKFIDGKPAKKIIAVPGRLANIVV

SEQ ID NO: 25446 - protein, 592 aa, Neisseria meningitidis
MTVLKPSHWRVLAELADGLPQHVSQLARMADMKPQQLNGFWQQMPAHIRGLLRQHDGYWRLVRPLAVFDAEGLRALGERSGFQTALKHECASSNDEILELARIAPDKAHKTICVTHLQSKGRGRQGRKWSHRLGECLMFSFGWVFDRPQYELGSLSPVAAVACRRALSRLGLDVQIKWPNDLVVGRDKLGGILIETVRTGGKTVAVVGIGINFVLPKEVENAASVQSLFQTASRRGNADAAVLLETLLVELDAVLLQYARDGFAPFVAEYQAANRDHGKAVLLLRDGETVFEGTVKGVDGQGVLHLETAEGKQTVVSGEISLRSDDRPVSVPKRRDSERFLLLDGGNSRLKWAWVENGTFATVGSAPYRDLSPLGAEWAEKADGNVRIVGCAVCGEFKKAQVQEQLARKIEWLPSSAQALGIRNHYRHPEEHGSDRWFNALGSRRFSRNACVVVSCGTAVTVDALTDDGHYLGGTIMPGFHLMKESLAVRTANLNRHAGKRYPFPTTTGNAVASGMMDAVCGSVMMMHGRLKEKTGAGKPVDVIITGGGAAKVAEALPPAFLAENTVRVADNLVIHGLLNLIAAEGGESEHT

SEQ ID NO: 25447 - protein, 384 aa, Neisseria meningitidis; identical to SEQ ID NO: 19277

SEQ ID NO: 25448 - protein, 281 aa, Neisseria meningitidis; identical to SEQ ID NO: 49

SEQ ID NO: 25449 - protein, 312 aa, Neisseria meningitidis; identical to SEQ ID NO: 1570

SEQ ID NO: 25450 - protein, 81 aa, Neisseria meningitidis; identical to SEQ ID NO: 1361

SEQ ID NO: 25451 - protein, 289 aa, Neisseria meningitidis
MKRIFLPALPAILPLSAYADLPLTIEDIMTDKGKWKLETSLTYLNSENNRAELAALVYIQTGATSFIPIPTEIQENGSNTDMLVGTLGLRYGLTGNTDIYGSGSYLWHEERKLDGNSKTRNKRMSDVSLGISHTFLKDDKNPALISFLESTVYEKSRNKASSGKSWLIGATTYKAIDPIVLSLTAAYRINGSKTLSDGIRYKSGNYLLLNPNISFAANDRISLTGGIQWLGKQPDRIDGKKESARNTSTYAHFGAGFGFTKTTALNASARFNVSGQSSSELKLGVQHTF

SEQ ID NO: 25452 - protein, 143 aa, Neisseria meningitidis; identical to SEQ ID NO: 28

SEQ ID NO: 25453 - protein, 126 aa, Neisseria meningitidis
LAEGQKSAVTEYYLNHGIWPGGNSDAGVASSSTIKGKYVQKVEVKNGVVTATMLSSGVNKEIKGKKLSLWAKRQNGSVKWFCGLPVERTAPTTTNDDVKADTAANGKQIDTKHLPSTASTRKSTPN

SEQ ID NO: 25454 - protein, 227 aa, Neisseria meningitidis; identical to SEQ ID NO: 2905

SEQ ID NO: 25455 - protein, 1144 aa, Neisseria meningitidis
MTEPTYIPLRLHTEFSITDGMVRIKKLVAKAQEYGLPALGISDLMNEFGLVKFYKACRGAGIKPIGAADVWIGNPNAPDKPFRAMLIIRNDAGYLRLSELLTAAYVGKDRNIHHAELNPEWLENGDNSGLICLSGAHYGEVGVNLLNGNEDAARAAALKYAAWFPDAFYLELQRLPERPEWEACVSGSVKLAEELGLPVVATHPTQFMSSDDFNAHEARVCIAGGWVLTDKKRPRDFTPGQFFIPPETMLERFADLPEALENTVEIAKRCNLHITLGKNFLPLFPTPDGLSRDDYLIKLSNKGLQERMVQLYPDEAERAAKMPEYQERLDFELNIIIQMKFPGYFLIVQDFINWAKTHGCPVGPGRGSGAGSLVAYSLKITDLDPLKYALLFERFLNPERVSMPDFDVDFCQANRGRVIEYVRDKYGAQAVSQIVTFGTMSSKAVIRDVGRVLELPFMLCDKLSKLIPLEANKPLGLDDAMKAEPQIQELIEAEEADELITLAKKLEDLTRGLGMHAGGVLIAPGKISDYSPVYQADESASPVSMYDKGDVEDVGLVKFDFLGLRNLTIIEMAQNNIKNTTGDIIDVGKIPLDDQAAYQIFRDANTTAVFQFESTGMKKMLKTAHTTKFEELIAFVSLYRPGPMDNIPDFVARMKGQEFQYIHPLLEGILAPTYGIMVYQEQVMQAAQIIGGYSLGGADLLRRAMGKKKPEEMVKHREIFAEGAAKQGISREKSDEIFNYMEKFAGYGFNKSHAAAYALISYQTAWLKAHYPAEFMAATMSSELDNTDQLKHFYDDCRANGIEFLPPDINESDYRFTPYPDMKIRYALGAIKGTGEAAVESIIAARQSGGKFTGLLDFCERVGKEHMNRRTLEALIRGGAFDSIEPNRAMLLANIDLAMDNADQKAANANQGGLFDMMEDAIEPVRLIDAPMWSESEKLAEEKTVIGFYLSGHPFGPYAQEVRQIAPQKLSKLKPQDSVRLAGFVTAVRTMMGKRGKIAFVSLEDLSGQVEIMVGGQTLENCADCLKADQVLIIESKVSRDDYGGGDGLRILANQVMTLQMARERYARSLSLALAPHHDIGKLVQLLAAHQLPDTPRIPLQLSYANEKASGRLQVPPKWTVTPSSALFGELETLLGSRSVRVNW

SEQ ID NO: 25456 - protein, 149 aa, Neisseria meningitidis
MPACFCPHCKTRLWVKETQLNVAQGFVVCQKCEGLFKAKDHLASTKEPIFNDLPEAVSDVKLVHRIGTRAIGKKQISRDEIAGILNGGTTLHDTPPATAATPAAATPAAAPQVAVPPAAPARQEGFNWTIATLFALIVLIMQLSYLVIL

SEQ ID NO: 25457 - protein, 228 aa, Neisseria meningitidis; identical to SEQ ID NO: 5838

SEQ ID NO: 25458 - protein, 1161 aa, Neisseria meningitidis
MRLTHIKLSGFKSFTDPTTIHVPGQLVAVIGPNGCGKSNVIDAVRWVLGEASAKQLRGESMQDVIFNGAATRRPAPRASVELVFDNSDHSLQGAWGQYAEVSIKRQLTRQGESTYFINNQTVRRRDITDLFLGTGVGARGYAVIEQGMISRIIEARPEELRAYIEEAAGVSKYKERRKETEGRLKDTREHLQRLGDLQNELARQVEKLEKQAETAERYKSLTAQLNRQQDLLDYAQWQQSLAAADKATEQHQSLQAQQDETAAQVQALNDEVHALQTAEQSQQQAVHELSNKRGVLREQIARLEEQIRHQQNLHQRIERDKQAAQAQLQRIHQEQQQIRVQLEENELYVEEKQTELAEWAMQVAEHEERLPELEETQTALNAAFQTQQDEANRIRRELALKQQQLAHAEQTVAKHEERKGRLKQENQALNLPDEAETAAAQEAAALLQSRQEHYEEQIIAAEEALHAAREAFQTASNRFQSLKQQHITLQAQQQALSQILSQQQEAADFWQATGHAAAPQLWQHITAPAEWQHALSVILAERLHARDVPQGFVPPEPLPQGQAAWLSDGLSGGIKKSLPVQALLNQIQAQPPFQTALHHWLDGVLCAPDLSYALAHQNDLGAHQIWLTPEGHQVDKVSVLLYAKPAQESLIAQKARLDGIASELENLSPELSAAEAAFKQAEAAVRSSEVQHKNLMQQQQQHTRQYSQAQQRAAELLARTNQGQIRREHIERELAQLAEEQTVLQHASDGLSDDIATLQEAAAELEHQQQTAAHSRQEQQGRLKQAQLALLEANRQYGLAEVAVHKLNQQKQNYQQQIARLEQQTLDWQERQQELVLAYETEFQNDEQHIKLDELTESVHTLDEEYIAVQEKLTQIQEQGREQYARVQTLQTQLPQLQAATQTALLQQQEALINAKRYHQNLTERAADLDALEALAKESPKVLNSSIGSLSQQIEALGAVNLAALQELEEARERDGYYRSQSEDVQTAITLLEEAIAQIDDKTKARFKETFDAVNGKVQTFFPTLFGGGEATLKMIGDDLLTAGVSIMVRPPGKKNSTIHLLSGGEKALTAMSLVFALFSLNPAPFCLLDEVDAPLDDANTSRFCNLVKEMSAQTQFLYISHNRLTMEMAEQLVGVTMQEKGVSRVVAVDIKQALEMAESV

SEQ ID NO: 25459 - protein, 73 aa, Neisseria meningitidis; identical to SEQ ID NO: 3916

SEQ ID NO: 25460 - protein, 867 aa, Neisseria meningitidis
MSKTVRYLKDYQTPAYRILETDLHFDIAEPQTVVKSRLTVEPQRVGEPLVLDGSAKLLFVKINGAAADYVLEGEMLTIAGVPSERFTVEVETEILPAENKSLMGLYASGGNLFTQCEPEGFRKITFYIDRPDVMSKFTTTIVADKKRYPVLLSNGNKIDGGECSDGRHWVKWEDPFAKPSYLFALVAGDLAVTEDRFTTMSGRNVKIEFYTTEADKPKVGFAVESLKNAMKWDETRFGLEYDLDIFMVVAVGDFNMGAMENKGLNIFNTKFVLADSRTATDTDFEGIESVIGHEYFHNWTGNRVTCRDWFQLSLKEGLTVFRDQEFSGDRASRAVRRIENIRLLRQHQFPEDAGPTAHPVRPASYEEMNNFYTMTVYEKGAEVVRMYHTLLGEEGFQKGMKLYFQRHDGQAVTCDDFRATMADANGINLDQFALWYSQAGTPVLEAEGRLKNNVFELTIKQTVPPTPDMADKQPMMIPVKIGLLNRNGEAVAFDYQGKRATEAVLLLAEAEQTFPLEGVTEAVVPSLLRGFSAPVHLNYPYSDDDLLLLLAHDSDAFTRWEAAQTLYRRAVAANLAALSDGVELPKHEKLLAAVEKVISDDLLDNAFKALLLGVPSEAELWDGAENIDPLRYHQAREALLDTLAVRFLPKWHELNRQAAKQENQSYEYSPEAAGWRTLRNVCRAFVLCADPAHIETVAEKYGEMAQNMTHEWGILSAVNGNESDTRNRLLAQFADKFSDDALVMDKYFALVGSSRRSDTLQQVQTALQHPKFSLENPNKARSLIGSFSRNVPHFHAEDGSGYRFIADKVIEIDRFNPQVAARLVQAFNLCNKLEPHRKNLVKQALQRIRAQEGLSKDVGEIVGKILD

SEQ ID NO: 25461 - protein, 346 aa, Neisseria meningitidis
MQAVVVNKNVAGDVEIVEREVRPLEYGEALVEVEYCGVCHTDLHVAAGDYGEKPGRVLGHEGIGLVKEVADGVKNLKVGDRVSIAWLFQSCGSCEYCNTGRETLCRSVLNAGYTADGGMATHCIVNADYAVKVPDGLDPAQASSITCAGVTTYKAIKVSSVRPGQWIAIYGAGGLGNLGVQYAKKVFGAHVVAIDINDDKLAFAKESGADLVVNAAKEDAAKVIQEKTGGAHAAVVTAVSAAAFNSAVNCVRAGGRVVAIGLPPESMDLSIPRLVLDGIEVVGSLVGTRKDLEEAFQFGAEGLVVPKVQLRALDEAPAIFQEMREGKITGRMVIDMKKECGCGHHH

SEQ ID NO: 25462 - protein, 227 aa, Neisseria meningitidis
VQADLAYAAERITHDYPQATGANNTSTVSDYFRNIRAHSIHPRVSVGYDFGGWRIAADYARYRKWNNNKYSVNTKNVQKNDNGNRQDLKTENQENGTFHAVSSLGLSAIYDFKLNDKFDKFKPYIGVRVAYGHVRHSIDSTKKTTNVVTVAGAANTAPTIYYAPETQNAYHESHSIRRLGLGVIAGVGFDITPKLTLDTGYRYHNWGRLENTRFKTHEVSLGMRYRF

SEQ ID NO: 25463 - protein, 206 aa, Neisseria meningitidis; identical to SEQ ID NO: 19411

SEQ ID NO: 25464 - protein, 428 aa, Neisseria meningitidis; identical to SEQ ID NO: 18698

SEQ ID NO: 25465 - protein, 166 aa, Neisseria meningitidis; identical to SEQ ID NO: 1240

SEQ ID NO: 25466 - protein, 559 aa, Neisseria meningitidis; identical to SEQ ID NO: 8735

SEQ ID NO: 25467 - protein, 107 aa, Neisseria meningitidis; identical to SEQ ID NO: 875

SEQ ID NO: 25468 - protein, 274 aa, Neisseria meningitidis
MNCNTPTDIMFSFEGFRRRGGITDHHADGFGIGFFEGKGVRLFHDDKPSANSPVADLVRAYQIKSENVVAHIRKASQGQTSLANTHPFMREMWGGYWLFAHNGHLIDFFPEQGEFFHPVGTTDSERAFCHILNRLRTRFAARPDDDTLFDAIAGLTHEIRKFGLFNFMLSDGIALFAHASTLLHYIVRQAPFGKARLLDDDVMVDFAEVTTPSDRVAVIATLPLTRDESWSQLAVDELVMFREGNIVRHDRPENPVYMSVEEGLETARAAGVAV

SEQ ID NO: 25469 - protein, 167 aa, Neisseria meningitidis
MSTKFNQFINRVLSHEGGYVSHPKDPGGETNWGITKRTAQANGYNGSMRAMTREQAIGIYRKAFWERYRADQMPEAVAFQFFDACVNHGYGNAVRMLQRAAGVADDGIIGEISLKAINSLPENDLLLRFNAERLVFYTKLSTFTSFGKGWVRRVAQNLIHASADNTD

SEQ ID NO: 25470 - protein, 344 aa, Neisseria meningitidis; identical to SEQ ID NO: 19264

SEQ ID NO: 25471 - protein, 604 aa, Neisseria meningitidis
MPAETTVSGAHPAAKLPIYILPCFLWIGIIPFTFALRQQPSPDFYHDAAAAAGLIVLLFLTAGKKLFDVKIPAISFLLFAMAAFWYLQARLMNLIYPGMNDIVSWIFILLAVSAWACRSLVAHFGQERIVTLFAWSLLIGSLLQSCIVVIQFAGWEDTPLFQNIIVYSGQGVIGHIGQRNNLGHYLMWGILASAYLNGQRKIPAALGVICLIMQTAVLGLVNSRTILTYIAAIALILPFWYFRSDKSNRRTMLGIAAAVFLTALFQFSMNTILETFTGIRYETAVERVANGGFTDLPRQIEWNKALAAFQSAPIFGHGWNSFAQQTFLINAEQHNIYDNLLSNLFTHSHNIVLQLLAEMGISGTLLVAATLLTGIAGLLKRPLTPASLFLICTLAVSMCHSMLEYPLWYVYFLIPFGLMLFLSPAEASDGIAFKKAANLGILTASAAIFAGLLHLDWTYTRLVNAFSPATDDSAKTLNRKINELRYISANSPMLSFYADFSLVNFALPEYPETQTWAEEATLKSLKYRPHSATYRIALYLMRQGKVAEAKQWMRATQSYYPYLMPRYADEIRKLPVWAPLLPELLKDCKAFAAAPGHPEAKPCK

SEQ ID NO: 25472 - protein, 100 aa, Neisseria meningitidis; identical to SEQ ID NO: 1675

SEQ ID NO: 25473 - protein, 214 aa, Neisseria meningitidis
MKLKHLLPLLLSAALSAQAYALTEGEDYLVLDKPIPQEQSGKIEVLEFFGYFCVHCHHFDPLLLKLGKALPSDAYLRTEHVVWQPEMLGLARMAAAVNLSGLKYQANPAVFKAVYEQKIRLENRAVAGKWALSQKGFDGKKLMRAYDSPEAAAAALKMQKLTEQYRIDSTPTVIVGGKYRVIFNNGFDGGVHTIKELVAKVREERKRQTPAVQK

SEQ ID NO: 25474 - protein, 354 aa, Neisseria meningitidis; identical to SEQ ID NO: 3126

SEQ ID NO: 25475 - protein, 97 aa, Neisseria meningitidis; identical to SEQ ID NO: 4307

SEQ ID NO: 25476 - protein, 216 aa, Neisseria meningitidis; identical to SEQ ID NO: 2506

SEQ ID NO: 25477 - protein, 405 aa, Neisseria meningitidis
MEIILGIVMFTVIVLVLALMILFAKSKLVSEGDITIKVNGEKELTMPAGGKLLGALANEGIFIPSACGGGGSCGQCRVVVKSGGGDILPTELSHISKREAREGCRLSCQVNVKTDMDIEVPEEVFGVKKWECTVISNDNKATFIKELKLAIPEGEEVPFRAGGYIQIEAPSHTVAYKDFDIPKEYHEDWDKYNLWQYVSKVDEPILRAYSMASYPEEKGIIMLNVRIATPPPRVPDAPPGQMSSYIWSLKPGDKVTISGPFGEFFAKDTDAEMVFIGGGAGMAPMRSHIFDQLKRLNSKRKITFWYGARSKREMFYVEDFDQLAAEFPNFTWHVALSDPLPEDNWDGYTGFIHNVVYENHLKNHEAPEDCEFYMCGPPIMNQSVIKMLKDLGVEDENILLDDFGG

SEQ ID NO: 25478 - protein, 617 aa, Neisseria meningitidis
MNRYPLWKYLLIVFTIAVAAVYSLPNLFGETPAVQVSTNRQAIIINEQTQSKVDAALQNAGIQTDGMFVVDNSLKVRFKDTETQLKARDVIENTLGEGYITALNLLADSPEWMAKIKANPMFLGLDLRGGVHFTMQVDMKAAMQKTFERYSGDIRRELRREKIRSGTVRQAGNSLTVPLQDAGDVQKALPQLRKLFPEATLNSDGSNIVLTLSEEAVNKVRSDAVKQNITTLHNRVNELGVAEPVIQQSGADRIVVQLPGVQDTAKAKDIIGRTATLELRMVEDDPAKLREALEGNVPSGYELLSSGGDRPETLLISKQVELTGDNINDAQPSFDQMGAPAVSLSLDSAGGSIFGELTAANVGKRMAMVLIDQGKSEVVTAPVIRTAITGGRVEISGSMTTAEANDTSLLLRAGSLAAPMQIVEERTIGPSLGKENIEKGFHSTLWGFAIVAAFMVVYYRLMGFFSTIALSANILFLIGILSAMQATLTLPGMAALALTLGMAIDSNVLINERIREELRAGVPPQQAINLGFQHAWATIVDSNLTSLIAGIALLVFGSGPVRGFAVVHCLGILTSMYSSVVVFRALVNLWYGRRRKLQNISIGAVWKPEAETAAGKE

SEQ ID NO: 25479 - protein, 384 aa, Neisseria meningitidis; identical to SEQ ID NO: 19784

SEQ ID NO: 25480 - protein, 59 aa, Neisseria meningitidis; identical to SEQ ID NO: 5877

SEQ ID NO: 25481 - protein, 388 aa, Neisseria meningitidis
MIIDVKVPMLSESVSEGTLLEWKKKVGEAVARDEILIDIETDKVVLEVPSPQAGVLVEIVAQDGETVVADQVLARIDTAATAAAEAPVAAPAEAAPAAAPAAAQNNAAMPAAAKLAAETGVDVNALQGSGRDGRVLKEDVQNAAAKPAAAAAPAGARPEERVPMSRLRARVAERLLASQQENAILTTFNEVNMKPIMDLRAKYKEKFEKEHGVKLGFMSFFVKAAVAALKKYPVVNASVDGKDIVYHGYFDIGIAIGSPRGLVVPILRDADQMSIADIEQAIVDYAKKAKDGKIAIEDLTGGTFSITNGGTFGSMMSTPIINPPQSAILGMHATKERAVVENGQVVVRPMMYLALSYDHRIIDGREAVLTLVAIKDALEDPARLLLDL

SEQ ID NO: 25482 - protein, 134 aa, Neisseria meningitidis; identical to SEQ ID NO: 6040

SEQ ID NO: 25483 - protein, 264 aa, Neisseria meningitidis; identical to SEQ ID NO: 19309

SEQ ID NO: 25484 - protein, 461 aa, Neisseria meningitidis; identical to SEQ ID NO: 19333

SEQ ID NO: 25485 - protein, 117 aa, Neisseria meningitidis; identical to SEQ ID NO: 1331

SEQ ID NO: 25486 - protein, 158 aa, Neisseria meningitidis; identical to SEQ ID NO: 9372

SEQ ID NO: 25487 - protein, 164 aa, Neisseria meningitidis; identical to SEQ ID NO: 7379

SEQ ID NO: 25488 - protein, 151 aa, Neisseria meningitidis; identical to SEQ ID NO: 3388

SEQ ID NO: 25489 - protein, 388 aa, Neisseria meningitidis; identical to SEQ ID NO: 22125

SEQ ID NO: 25490 - protein, 58 aa, Neisseria meningitidis; identical to SEQ ID NO: 2174

SEQ ID NO: 25491 - protein, 520 aa, Neisseria meningitidis
LFEVMKKPLISVAAALLGVALGTPYYLGVKAEESLTQQQKILQETGFLTVESHQYERGWFTSMETTVIRLKPELLNNAQKYLPDNLKTVLEQPVTLVNHITHGPFAGGFGTQAHIETEFKYAPETEKVLERFFGKQAPVSLANTVYFNGSGKMEVSVPAFDYEELSGIRLHWEGLTGKTVYQKGFKSYRNSYDAPLFKIKLADKGDAAFEKAHFDSETSDGINPLALGSSNLTLEKFSLEWKEGVDYNVKLNELVNLVTDLQIGAFINPNGSIAPSKIEVGKLAFSTKTGESGSFINSEGQFRFDTLVYGNEKYGPLDIHIAAEHLDASALTVLKRKFAQISAKKMTEEQIRNDLIAAVKGEASGLFTNNPVLDIKTFRFTQPSGKIDVGGKIMFKDMKKEDLNQLGLMLKKTEADIRMSIPQKMLEDLAVSQAGNIFSVNAEDEAEGRASLDDINETLRLMVDSTVQSMAREKYLTLNGDQIDTAISLKNNQLKLNGKTLQNEPEPDFDEGGMVSEPQQ

SEQ ID NO: 25492 - protein, 179 aa, Neisseria meningitidis; identical to SEQ ID NO: 25135

SEQ ID NO: 25493 - protein, 307 aa, Neisseria meningitidis; identical to SEQ ID NO: 19660

SEQ ID NO: 25494 - protein, 115 aa, Neisseria meningitidis; identical to SEQ ID NO: 18517

SEQ ID NO: 25495 - protein, 181 aa, Neisseria meningitidis; identical to SEQ ID NO: 19925

SEQ ID NO: 25496 - protein, 377 aa, Neisseria meningitidis
MFKKFKPVLLSFFALVFAFWLGTGIAYEINPRWFLSDTATEIPENPNAFVAKLARLFRNADRAVVIVKESIRTEENLAETVDDGPLQSEKDYLALAIRLSRLKEKAKWFHVTEQEHGEEVWLDYHIGEGGLVAVSLLQRSPEAFVNAEYLYRNDRPFSVNVYGGTAHGENYETTGEYRVVWQPDGSVFDASGRGKIGEDVYEHCLGCYQMAQVYLAKYRDVANDEQKVWDFREESNRIASDSRDSVFYQNMRELMPRGMKANSLVVGYDADGLPQKVYWSFDNGKKRQSFEYYLKNGNLFIAQSSTVALKADGVTADMQTYHAQQTWYLDGGRIIREEKQGDRLPDFPLNLEDLEKEVSRYAEAAARRSGGRRDLSH

SEQ ID NO: 25497 - protein, 370 aa, Neisseria meningitidis; identical to SEQ ID NO: 1989

SEQ ID NO: 25498 - protein, 242 aa, Neisseria meningitidis
MTKQLKLSALFVALLASGTAVAGEVSVQGYTVSGQSNEIVRNNYGECWKNAYFDKASQGRVECGDAVAAPEPEPEPEPAPAPVVVVEQAPQYVDETISLSAKTLFGFDKDSLRAEAQDNLKVLAQRLGQTNIQSVRVEGHTDFMGSDKYNQALSERRAYVVANNLVSNGVPVSRISAVGLGESQAQMTQVCEAEVAKLGAKVSKAKKREALIACIEPDRRVDVKIRSIVTRQVVPAHNHHQH

SEQ ID NO: 25499 - protein, 557 aa, Neisseria meningitidis
MLLTLSLRDFVIVENLNLDFQSGFTVLTGETGAGKSITLDAIGLLLGDKADYSQVRSGAKEAQLSALFDISHLPVLKAELYEQGLLNDGEEELSIRRIIDAKGKSRSFINNQAATLAQLKSVGSQLIDIHGQNAHHSLNQEAAQRELLDAFAGSREQAETVRQLYQNWANAKKALQEAQEHADAVIIERERLEWQFNELNQLDIKQGEWEALSQSHDSLAHSAELLQAAEEVGSKIDGDNGIQRHIYQCQKLLANLQNIEPRFAESLNMLASIEAELGEISANMRDVAGRSDINPNELAAQEQRMGELMGMARKYRIEPEELPAKLAEIEERLQSLQAAADLDALEHNVAHNFAEYQEAAHILSAMRHQAAERLSGETTEHMQHLAMKGARFDIVLLPSSPTAHGLEQVQFQVAANKGNPPRPLNKVASGGELARISLALQVVASQYTQVPTLIFDEVDTGIGGGVAEMVGKALRSLGRKHQVLAVTHLPQVASCGENHWRVRKHSEGEQTVSEISILDKIQRVEEVARMLGGEVITDTTRQHAAELLQLASKNSLF

SEQ ID NO: 25500 - protein, 85 aa, Neisseria meningitidis; identical to SEQ ID NO: 19708

SEQ ID NO: 25501 - protein, 157 aa, Neisseria meningitidis; identical to SEQ ID NO: 3112

SEQ ID NO: 25502 - protein, 307 aa, Neisseria meningitidis; identical to SEQ ID NO: 1349

SEQ ID NO: 25503 - protein, 82 aa, Neisseria meningitidis; identical to SEQ ID NO: 2740

SEQ ID NO: 25504 - protein, 206 aa, Neisseria meningitidis; identical to SEQ ID NO: 12065

SEQ ID NO: 25505 - protein, 225 aa, Neisseria meningitidis; identical to SEQ ID NO: 10160

SEQ ID NO: 25506 - protein, 628 aa, Neisseria meningitidis; identical to SEQ ID NO: 19899

SEQ ID NO: 25507 - protein, 230 aa, Neisseria meningitidis; identical to SEQ ID NO: 1058

SEQ ID NO: 25508 - protein, 260 aa, Neisseria meningitidis
MESLTAINKSRIRQAFQKALNDYDRHALIQQKMTINLMAHLQDYLPDMPLENVLELGCGSGMLSALLQKQISANYWLFNDLCDVQPQLAEKLPQSFDFYCGDAENFPFQRQFDLIASASAVQWFHQPDAFITHCKTGLKANGLLAVATFGKDNLKEVRQITNIGLNYPTLSQWQTWLAKDFELLWCEDFKVILDFDTPLDVLKHLKYTGVTATNQKNWTRKNLNGFIGDYLSAFSMPSGKVRLTYHPLFFIARYSAEGRQ

SEQ ID NO: 25509 - protein, 385 aa, Neisseria meningitidis
MKFATKAIHSSYDCDEHNRALMPPIYQNSMFALHEIGENVPYRYSRLSNPTRQILEDTVADLEHGAAGFAFSSGMAGIDAVWRTFLQPGDTIVAVADIYGGAYDLLVDVYQKWGVNVVFADLGNPDNLDELLKAHKVKLVWLETPSNPLLRLVDIKALAAKAKAAGALVGIDNTFATPYLQQPLDMGCDFVFHSATKYLCGHSDVLMGIVVAKTKELAQPLHDMMVHTGAVAGPMDCWLVLRGIKTLALRMNAHYQNALEIARRLEAHPAIEKVFHPGLPSHEHYELAKTQMPKGIGGVVTVYLKNDTREAANSVIKNMKLVKMASSLGGVESLVNHCYSQSHSGVPHNVKMEMGIRVGLLRFSVGIEDVDDIWNDISAALDTTL

SEQ ID NO: 25510 - protein, 193 aa, Neisseria meningitidis; identical to SEQ ID NO: 1322

SEQ ID NO: 25511 - protein, 296 aa, Neisseria meningitidis
VSEIHQIYWEESGNPDGVPVIFLHGGPGAGASPECRGFFNPDVFRIVIIDQRGCGRSRPYACAEDNTTWDLVADIEKVREMLGIRKWLVFGGSWGSTLSLAYAQTHPERVKGLVLRGIFLCRPSETAWLNEAGGVSRIYPEQWQKFVAPIAENRRNRLIEAYHGLLFHQDEEVCLSAAKAWADWESYLIRFEPEEVDEDAYASLAIARLENHYFVNGGWLQGDRAILNNIGKIRNIPTIIVQGRYDLCTPMQSAWALSKAFPEAELRVVQAGHRAFDPPLADALVQAVEDILPRLL

SEQ ID NO: 25512 - protein, 311 aa, Neisseria meningitidis; identical to SEQ ID NO: 18238

SEQ ID NO: 25513 - protein, 210 aa, Neisseria meningitidis; identical to SEQ ID NO: 3262

SEQ ID NO: 25514 - protein, 429 aa, Neisseria meningitidis
MMKSILTVSGNRMRKPRITHLDVWANDERIGTLEKGAMYRFTYDNPGSPLLGLHYQDRGKVYISNNMPHIFAQYFPEGFLDAHITSKYAFHDAPFEDNEMLRLAILGRETLGRIHVRCNDPLFNEWIDGLEMKNPRILTERDLLGINARQVFQQYMAEIFHHGRFVSVSGIQQKMSLDAISRNTKQTASYIAKGFDASEYPCLAANEFLCMQTIKQAGIPVAQTSLSEDSSVLLVRRFDVSEQEYFLGMEDFTSLRQYSAEDKYKGSYAAIAQIIRQISGRPDEDLIHFFNQLAASCILKNGDAHLKNFSVLYHDEYDVRLAPTYDVLDTSIYRVGTQGIFDAYDDTLALNLTNHGKKTYPSKNTLLDFAEKYCDLGREDASFMIDTIVQAKEQVLVKYSDVLRENEWLAQKWHFIPDENEEGLPFTFR

SEQ ID NO: 25515 - protein, 107 aa, Neisseria meningitidis; identical to SEQ ID NO: 19473

SEQ ID NO: 25516 - protein, 321 aa, Neisseria meningitidis; identical to SEQ ID NO: 24628

SEQ ID NO: 25517 - protein, 115 aa, Neisseria meningitidis; identical to SEQ ID NO: 2034

SEQ ID NO: 25518 - protein, 97 aa, Neisseria meningitidis
MNFQEENENIKNDIEINLLHSAEADSVEAMMDLAVYGLAAMVAKHNKTRGEQLVLQAIAGHMRKLLVALPETESLVQTGKVYRRLEDLIFKTYLPEQ

SEQ ID NO: 25519 - protein, 194 aa, Neisseria meningitidis; identical to SEQ ID NO: 6623

SEQ ID NO: 25520 - protein, 291 aa, Neisseria meningitidis; identical to SEQ ID NO: 122

SEQ ID NO: 25521 - protein, 436 aa, Neisseria meningitidis; identical to SEQ ID NO: 19409

SEQ ID NO: 25522 - protein, 404 aa, Neisseria meningitidis
MTVKTPVYLDYAATTTVDKRVAEKMIPYLTETFGNPASNSHAFGWEAEEAVEKARADIAALINADPKEIVFTSGATESDNLAIKGAANFYKTKGKHLITVKTEHKAVLDTMRELERQGFEVTYLGVQENGLIDLEELKAAIRDDTILVSVMWANNEIGVVQDIPAIGEICRERKIVFHVDAAQACGKVPVDVEAAKIDLLSMSAHKVYGPKGIGALYVRRKPRVRLEAQMHGGGHERGFRSGTLPTHQIVGMGEAFRIAKEELAQDTAHYLKLRDIFLKGIEGIEEVYINGDLGHRAPNNLNVSFNFVEGESLIMAVKELAVSSGSACTSASLEPSYVLRALGRNDELAHSSLRITFGRMTTEEEVQFAAELIKSKIGKLRELSPLWEMFKDGIDLNSIEWAAH

SEQ ID NO: 25523 - protein, 146 aa, Neisseria meningitidis
MPKATFYTHVAQVPIFTCRLIARAIRDGGRILVWSDSFGQLQELDKMLWQYEAESFIPHEIWEMEEAMPSETSVLLACGGNPPRIPEGMTVLNLSDGFWNTAPVLPARVLEIVGNSLEDLADARERFTAYRRSGFAIEHHGMEGKA

SEQ ID NO: 25524 - protein, 138 aa, Neisseria meningitidis; identical to SEQ ID NO: 15462

SEQ ID NO: 25525 - protein, 203 aa, Neisseria meningitidis; identical to SEQ ID NO: 19191

SEQ ID NO: 25526 - protein, 213 aa, Neisseria meningitidis; identical to SEQ ID NO: 18560

SEQ ID NO: 25527 - protein, 128 aa, Neisseria meningitidis; identical to SEQ ID NO: 19630

SEQ ID NO: 25528 - protein, 521 aa, Neisseria meningitidis
MTQDKILILDFGSQVTQLIARRVREAHVYCELHSFDMPLDEIKAFNPKGIILSGGPNSVYESDYQADTGIFDLGIPVLGICYGMQFMAHHLGGEVQPGNQREFGYAQVKTIDSELTRGIQDGEPNTLDVWMSHGDKVSKLPDGFAVIGDTPSCPIAMMENAEKQFYGIQFHPEVTHTKQGRALLNRFVLDICGAQPSWTMPNYIEEAVAKIREQVGSDEVILGLSGGVDSSVAAALIHRAIGDQLTCVFVDHGLLRLNEGKMVMDMFARNLGVKVIHVDAEGQFMAKLAGVTDPEKKRKIIGAEFIEVFDAEEKKLTNAKWLAQGTIYPDVIESAGAKTKKAHAIKSHHNVGGLPENMKLKLLEPLRDLFKDEVRELGVALGLPREMVYRHPFPGPGLGVRILGEVKKEYADLLRQADDIFIQELRNTTDENGTSWYDLTSQAFAVFLPVKSVGVMGDGRTYDYVVALRAVITSDFMTAHWAELPYSLLGRVSNRIINEVKGINRVVYDVSGKPPATIEWE

SEQ ID NO: 25529 - protein, 230 aa, Neisseria meningitidis
VQADLAYAAERITHDYPQATGANNTSTVSDYFRNIRAHSIHPRVSVGYDFGGWRIAADYASYRKWSNNKYSVNTKEVQRNNNAGNWQELKTENQENGSFHAVSSLGLSAIYDFKLNDKFDKFKPYIGARVAYGHVKHQVHSVRKETTTTFSKAGAGATEPGKIISGPISKPAYHESHSISSLGLGVIAGVGFDITPKLTLDTGYRYHNWGRLENTRFKTHEVSLGMRYHF

SEQ ID NO: 25530 - protein, 286 aa, Neisseria meningitidis; identical to SEQ ID NO: 19802

SEQ ID NO: 25531 - protein, 310 aa, Neisseria meningitidis
MDIVFAADDNYAAYLCVAAKSVEAAHPDTEIRFHVLDAGISEANRAAVAANLRGGGNIRFIDVNPEDFAGFPLNIRHISITTYARLKLGEYIADCDKVLYLDIDVLVRDSLTPLWDTDLGDNWLGACIDLFVERQEGYKQKIGMADGEYYFNAGVLLINLKKWRRHDIFKMSCEWVEQYKDVMQYQDQDILNGLFKGGVCYANSRFNFMPTNYAFMANRFASRHTDPLYRDRTNTVMPVAVSHYCGPAKPWHRDCTAWGAERFTELAGSLTTVPEEWRGKLAVPHRMFSTKRMLQRWRRKLSARFLRKIY

SEQ ID NO: 25532 - protein, 798 aa, Neisseria meningitidis; identical to SEQ ID NO: 6178

SEQ ID NO: 25533 - protein, 265 aa, Neisseria meningitidis; identical to SEQ ID NO: 2138

SEQ ID NO: 25534 - protein, 132 aa, Neisseria meningitidis
MLGLTRNNCDDLGFAILCYERNAADKKEFLDWLYEIVRTVPAESFPRYLIDLIDCLESDDCSINIYNIIGFVPTTGMTKKEKDAVYGITYIRNQEFYDIPITREKALKALKKHPEIYQKFRHFFPFVELPPL

SEQ ID NO: 25535 - protein, 570 aa, Neisseria meningitidis
MKASQFFISTLKEAPAEAALASHKLMIRAGLIKANASGLYTWMPMGLRVLRKVENVVREEMARAGSVELLMPVVQPAELWQESGRWEFYGKELLRLKDRHDRDFCMGPTCEEVIADIVRKEINSYKQLPKNFYHIQTKFRDEVRPRFGVMRAREFVMKDAYSFHADYASLQTTYDAMYDAYCRIFTRLGLAFRPVAADTGSIGGTGSHEFQVLAESGEDVIAYSDTSDYAANIELAPTLPLKGERTAAQAELTKVHTPNVKTIESLVEFLNIPVEQTLKSIVVEGENEGEIVLLLLRGDHEFNDIKAEKLAGVRSPLTMASPAAIVEQFGANGGSLGPVSFAGKVYADFATEKGADWVIGANEDGYHYTSFNFGRDAAEPEFVDLRNVVEGDESPDGQGRLKLARGIEVGHVFQLRDKYTQAMNVSFLDNNGKSQIMEMGCYGIGITRVVAAAIEQNNDEKGIIWTKAMAPFEVVIVPMNYKKSDTVREAADKIYAELLAAGADVLLDDRDERAGVLLNDSELLGIPHRIVIGDRALKEGNVEYAERRNNEAQAVAIGEIVARVTALLNG

SEQ ID NO: 25536 - protein, 89 aa, Neisseria meningitidis; identical to SEQ ID NO: 1367

SEQ ID NO: 25537 - protein, 212 aa, Neisseria meningitidis; identical to SEQ ID NO: 3536

SEQ ID NO: 25538 - protein, 228 aa, Neisseria meningitidis
MFDFGLGELVFVGIIALIVLGPERLPEAARTAGRLIGRLQRFVGSVKQEFDTQIELEELRKAKQEFEAAAAQVRDSLKETGTDMQNSLHDISDGLKPWEKLPEQRTPADFGVDENGNPFPDAANTLSDGISDVMPSERSYTSAEILGDSGQTGSTAEPAETDQDRAWREYLTASAAAPVVQTVEVSYIDTAVETPVPHTTSLRKQAISRKRDLRPKSRAKPKLRVRKS

SEQ ID NO: 25539 - protein, 195 aa, Neisseria meningitidis; identical to SEQ ID NO: 15117

SEQ ID NO: 25540 - protein, 240 aa, Neisseria meningitidis; identical to SEQ ID NO: 18055

SEQ ID NO: 25541 - protein, 321 aa, Neisseria meningitidis; identical to SEQ ID NO: 24628

SEQ ID NO: 25542 - protein, 118 aa, Neisseria meningitidis; identical to SEQ ID NO: 367

SEQ ID NO: 25543 - protein, 410 aa, Neisseria meningitidis; identical to SEQ ID NO: 446

SEQ ID NO: 25544 - protein, 102 aa, Neisseria meningitidis; identical to SEQ ID NO: 18998

SEQ ID NO: 25545 - protein, 434 aa, Neisseria meningitidis; identical to SEQ ID NO: 19711

SEQ ID NO: 25546 - protein, 501 aa, Neisseria meningitidis; identical to SEQ ID NO: 16540

SEQ ID NO: 25547 - protein, 257 aa, Neisseria meningitidis
MSANILAIANQKGGVGKTTTTVNLAASLASRGKRVLVVDLDPQGNATTGSGIDKAGLQSGVYQVLLGDADVKSAAVRSKEGGYAVLGANRALAGAEIELVQEIAREVRLKNALKAVAEDYDFILIDCPPSLTLLTLNGLVAAGGVIVPMLCEYYALEGISDLIATVRKIRQAVNPDLDITGIVRTMYDSRSRLVAEVSEQLRSHFGDLLFETAIPRNIRLAEAPSHGMPVMAYDAQAKGAKAYLALADELAARVSGK

SEQ ID NO: 25548 - protein, 70 aa, Neisseria meningitidis; identical to SEQ ID NO: 232

SEQ ID NO: 25549 - protein, 307 aa, Neisseria meningitidis
MKGFTIIEFLVAGMLSMIVLMAVGSSYFTSRKLNDAANERLAIQQDLRNAATLIVRDARMAGSFGCFNMSEHTEKDVVSDVPQKNRLFSLKGSSANKLIPNGTDNKLIPITESLDINYQNFFQVGSALIFQYGIDDVNASAATTVVSSCAAISKPGKQILTLENVKKELKISDQDKEQNGNIARQRHVVNAYAVGRIAGEEGLFRFQLDDKGKWGNPQLLAKKIRYMKVRYIYVSDCPEDDDAGKEETFRYTDKFNSAQDAVTPAGVEVLLSSGTDTKIAASSDNHIYAYRIDATIRGGNVCANRTL

SEQ ID NO: 25550 - protein, 658 aa, Neisseria meningitidis; identical to SEQ ID NO: 8975

SEQ ID NO: 25551 - protein, 441 aa, Neisseria meningitidis; identical to SEQ ID NO: 7778

SEQ ID NO: 25552 - protein, 630 aa, Neisseria meningitidis
MRFSRFEPKGRLKQQIRFQTTFLSTSHHGNQTKAAHRHIHVGSTAGTTTIRSGGDTTLKGAQLIGKGIQADTRNLHIESVQDTETYQSKQQNASAQVTVGYGFSASGDYSQSKIRADHASVTEQSGIYAGEDGYQIKVGNHTDLKGGIITSSQSAEDKGKNRFQTATLTASDIQNHSQYKGESFGLGASASISGKTLGQGAQNKPQNKHLTSVADKNGASSSVGYGSDSDSQSSITKSGINTRNIHITDEAGQLARTGRTAKETEARIYTGIDTETADQHTGRLKNSFDKDAVAKEINLQREVTKEFGRNAAQAVAAVADKLGNTQSYERYQEARTLLEAELQNTDSEAEKAAIRASLGQVNAYLAENQSRYDTWKEGGIGRSILHGAAGGLTTGSLGGILAGSGTSLAAPYLDKAAENLGPAGKAAVNALGGAAIGYATGGSGGAVVGANVDWNNRQLHPSEYKLAEQYADIVASRLNISKEEALGRIIRHMQRTVDYATAKADNFRTDDAIISILGANNLPKQDQHYTNPNYNKQYIQNYVRDFNLANKYNYFGKTPTQSRDYKVGVVTDIGKAALNSGIGIFESAANLATGEIDPNSWAYVHMGRIGYTHPEYGNAWIRISSATLVY

SEQ ID NO: 25553 - protein, 498 aa, Neisseria meningitidis
MFSNYLLSLAIWIPIAAGVLVLSTGKDSRAPLARVLAFMGALAGFLVTLPLFTGFDRLSGGYQFTEFHEWIPLLKINYALGVDGISVLFIILNAFITLLVVLAGWEVIQKRPAQYMAAFLMMSGLINGAFAAQDAILFYVFFEGMLIPLYLIIGVWGGPRRVYASVKLFLYTLMGSLLMLVAMVYLYYQTGSFSIVDFQNIKQIPLGVQQLLFAAFFLSFAVKVPMFPVHTWLPDAHVEAPTGGSMVLAAITLKLGAYGFLRFILPIMPDAARYFAPVIIVLSLIAVIYIGMVALVQTDMKKLVAYSSISHMGFVTLGMFLFVNGQLNDWALKGAIIQMISHGFVSAAMFMCIGVMYDRLHTRNIADYGGVVNVMPKFAAFMMLFGMANAGLPATSGFVGEFMVIMGAVKVNFWVGALAAMTLIYGASYTLWMYKRVIFGAIHNPHVAEMKDINCREFTILAVLAVAVLGMGLYPNAFIEVVHQAANDLIAHVAQSKI

SEQ ID NO: 25554 - protein, 242 aa, Neisseria meningitidis; identical to SEQ ID NO: 14445

SEQ ID NO: 25555 - protein, 658 aa, Neisseria meningitidis
MPRIAALPDHLVNQIAAGEVVERPANALKEIVENSIDAGATAIDVELAGGGIRLIRVSDNGSGIHPDDIGLALHRHATSKIKTLNDLEHVASMGFRGEGLASIASVSRLTLTSRQEDSSHATQVKAEDGKLSSPTAAAHPVGTTIEAAELFFNTPARRKFLKSENTEYAHCTTMLERLALAHPHIAFSLKRDGKQVFKLPTQSLPERIAAIVGDDFQTASLEIDSGNGALRLYGAIAKPTFAKGKTDKQYCFVNHRFVRDKVMLHAVKQAYRDVLHNALTPAFVLFLDLPPEAVDVNVHPTKTEIRFRDSRQVHQLVFHTLNKALADTRADLTESVSNAGEVLHDITGVTPAPMPSENDSENLFDSASDYPTGNKPDTRNAFGASGKTAPMPYQAARAPQQHSLSLRESRAAMNTYAELYKKTDDIDLELSRLEQARFGNMPSETPAPQTDTPLSDGIPSQSELPPLGFAIAQLLGIYILAQAEDSLLLIDMHAAAERVNYEKMKRQRQENGKLQSQRLLIPVTFATSHEECAALSDHADALAGFGLELSDMGGNTLAVRAVPAMLGKADVVSLAKDVLSELAQVGSSQTIEEHENRILATMSCHGSIRAGRRLTLPEMNALLRDMENTPRSNQCNHGRPTWVKLTLKELDALFLRGQ

SEQ ID NO: 25556 - protein, 206 aa, Neisseria meningitidis; identical to SEQ ID NO: 18030

SEQ ID NO: 25557 - protein, 274 aa, Neisseria meningitidis
MIKKTIGGIIPIFTAVFIPASAGAADLMLAQEYKDQEIAGWAMSEKLDGVRAYWDGKHLISRQGYAFTPPKGFTAQFPPYPLDGELYSGRGQFEQISATVRSVSSDWRGIRLHVFDVPKAQGNLYQRLAVATQWLKTHPNAPITIIPQTKVRDRQHAMDFLKQIEAQGGEGVMLRQPESRYSGGRSSQLLKLKSQYDDECTVTRHYEGKGRNAGRLGAVGCKNRHGEFRIGSGFKDKDRDNPPKIGTLITYRYRGFTRKGTPKFATFVRVRTDR

SEQ ID NO: 25558 - protein, 96 aa, Neisseria meningitidis; identical to SEQ ID NO: 18842

SEQ ID NO: 25559 - protein, 602 aa, Neisseria meningitidis
MRTNYCGLISEQYLDQTVTVKGWVHRRRDHGGVIFIDLRDREGIVQVVIDPDTPEAFAAADSSRNEYVLSITGRVRNRPEGTTNDKMISGKIEILAKEIEVLNAAATPPFQIDDENISENVRLTNRVIDLRRPVMQRNLRLRYQVAMGVRRYLDAQGFIDIETPMLTRSTPEGARDYLVPSRVHPGEFFALPQSPQLFKQLLMVAGFDRYYQITKCFRDEDLRADRQPEFTQIDLETSFLNEDEIMDITEGMAKQVFKDALGVDLGDFPRMPYSEAMFYYGSDKPDMRINLKFTELTDLMKTEEFKVFRGAADMKGGRVVALRVPNGTKFSRKEIDEYTKFVGIYGAKGLAYIKVNDVGNLSNGEDSGLQSPIVKFLSENALKEIIARTGAQNGDIIFFGADKTKVVNEAIGALRIKVGLEHGKDNGYFTDEWKPLWVVDFPMFEYDEEADRYVAVHHPFTAPKEGHEDLMVSDPANCLARAYDMVLNGWEIGGGSIRIHRADVQEKVFAALKISPEEQQEKFGFLLDNLKFGAPPHGGLAFGLDRLVTLMTGAESIRDVIAFPKTQRAQCLLTNAPNSVDDKQLRELSLRLRQKAAETKEA

SEQ ID NO: 25560 - protein, 380 aa, Neisseria meningitidis
MKKSVLAVLAALSLAACGGSEKNAVQPQADAASAANAEAAATDTLNIYNWSNYVDESTVEDFKKANNLKLTYDLYENNETLEAKMLTGKSGYDLVVPGIAFLPRQIEAGAYQKVNKDLIPNYKNIDPELLKMLETADPGNQYAVPYFSGVNTIAITAKGKELLGGKLPENGWDLLFKPEYTHKLKSCGIALWDTPSEMFPILLNYLGKDPKGSNPEDLKAAAEVLKSIRPDVKRFSPSIIDELARGDVCLAAGNGGDLNLAKARSEEVKNNVGIEVLNPKGMGFWIESWLIPADAKNVANAHKYINYTLDPEIAAKNGIAVTFAPASKPAREKMPAELVNTRSIFPNEQDMKDGFVMPQMSTDAKKLSVSLWQKIKVGTN

SEQ ID NO: 25561 - protein, 105 aa, Neisseria meningitidis; identical to SEQ ID NO: 895

SEQ ID NO: 25562 - protein, 58 aa, Neisseria meningitidis
MFILVPISIILAFVIGWFFWWSGKNGQFDDLEGPAHRILMDDDSTSKLIEKERENDVR

SEQ ID NO: 25563 - protein, 482 aa, Neisseria meningitidis
MKGDIGVIGLAVMGQNLILNMNDCGFKVVAYNRTIGKVDEFLNGAAKGTDIVGAYSLQDLVDKLAKPRKIMMMVRAGSVVDDFIEQLLPLLDEEDIIIDGGNANYPDTTRRTHYLAEKGILFVGAGVSGGEEGARHGPSIMPGGDKRAWEAVKPIFQAIAAKTPLGEPCCDWVGRDGAGHFVKMVHNGIEYGDMQLICEAYQFMKDGLGLSYDEMHRVFAEWNKTELDSYLIEITAAILGYKDEGGEPLVEKILDTAGQKGTGKWTGINALDLGIPLTLISEAVFARCVSSFKEQRVQTGKLFARTVTPVEGGKQEWVEALRQALLASKIISYAQGFMLIREAGESYGWDLDYGNTALLWREGCIIRSAFLSNIRDAYENNPDLVFLGADPYFKNILENCLPAWRKVVAKAVECGIPMPCMASAITFLDGYTTERLPANLLQAQRDYFGAHTYERTDKPRGEFFHTNWTGKGGDTASTTYDI

SEQ ID NO: 25564 - protein, 112 aa, Neisseria meningitidis; identical to SEQ ID NO: 6756

SEQ ID NO: 25565 - protein, 434 aa, Neisseria meningitidis; identical to SEQ ID NO: 2219

SEQ ID NO: 25566 - protein, 403 aa, Neisseria meningitidis
MNQLKLAVSGAQILFVAFGAMVLVPLLTGLNPALALLGAGLGTLLFQITTKRKVPIFLGSSFAFIAPIIYSIGEWGLPSTMFGLFAAGFMYFVFAVLIRWRGLAAVHKLLPPVVIGPVIMVIGLSVAVAASSMAMGQADGKQVIDYTDSLILSGFTFAVTAIVSVFGSRMMKLIPILIGVASGYVLALLMGLVDTASIAHAPWFAVPHFETPQVNWQAALFMLPVAVAPAIEHIGGIMAIGNVTGKDYTKDPGLDKTLAGDGLGVCVAGLIGGPPVTTYGEVTGAVMITKNSNPVIMTWAAVFAVCMAFFGKFNAFLASIPMPVMGGIMLLLFGTIASLGVKTLIDAKVDLMLPKNLVIVSSVLTTGIGGMTLKLGSFSFAGVGLCAVLAIMLNSLLPDPKES

SEQ ID NO: 25567 - protein, 238 aa, Neisseria meningitidis; identical to SEQ ID NO: 3469

SEQ ID NO: 25568 - protein, 339 aa, Neisseria meningitidis
MDAGIYLEETAPHALIEHNNILDNSVGVYLHGSSEAMVRENKIVGDATLRVNERGNGVTVWNAPGAQVVGNDISKGRDGIFSNTSTYNTYKNNRFSDLRFAVHYMYTNDSEISGNISVGNNMGYVLMFSERLKVFDNIAVGSRDQGIMLNYVNYSDIHDNIINKAGKCVFAYNANYDKLFANHFENCQIGIHFTAAIEGTSLHDNSFINNESQVKYVSTRFLDWSEGGHGNYWSDNSAFDLNGDGFGDSAYRPNGIIDQIIWRAPVSRLLMNSPAISIVKWAQAQFPAVLPGGVVDSKPLMKPYAPKIQTRYQAMKDELLKEAETRQSEWGRAENGSLN

SEQ ID NO: 25569 - protein, 222 aa, Neisseria meningitidis; identical to SEQ ID NO: 4261

SEQ ID NO: 25570 - protein, 266 aa, Neisseria meningitidis; identical to SEQ ID NO: 19024

SEQ ID NO: 25571 - protein, 208 aa, Neisseria meningitidis; identical to SEQ ID NO: 18194

SEQ ID NO: 25572 - protein, 256 aa, Neisseria meningitidis
MTTTEHDNDDAFLLRYSRHILLDEIGIEGQQKLSAAHILVVGCGGLGAAALPYLAASGIGTLTIADSDTVELHNLQRQVAFDEGDVGKPKAEALADRLKRINHNVDVRTVNEKLDGCRLTGLVQTADIVLDCCDNYATRQAVNRVCVQTKTPLVSGAAVRFEGQLAVYRPDLPDSPCYACLFDGGSASDGICSLFGVFSPLVGIIGSTQAAEALKILLDAGEPSHGRLAVYRALEGGWQYFDLPRNPECPICGAER

SEQ ID NO: 25573 - protein, 672 aa, Neisseria meningitidis; identical to SEQ ID NO: 18360

SEQ ID NO: 25574 - protein, 252 aa, Neisseria meningitidis; identical to SEQ ID NO: 2885

SEQ ID NO: 25575 - protein, 121 aa, Neisseria meningitidis; identical to SEQ ID NO: 4117

SEQ ID NO: 25576 - protein, 171 aa, Neisseria meningitidis
MYTCTSCGEKHEDMPAIGFTAPDPYNQLSEEERIAYQAECDSDFCIIRYPDQTDRFIRAVLPIPIIGHEETLEYGVWVSVSEKSFNDYQSHFHDNPENVVYFGMICNRLPPYESDTFGMHCNVVTQPDGQRPLLQLHQGSEHPLVRDFYHGIEYAEAQARIGAVSESDCSG

SEQ ID NO: 25577 - protein, 242 aa, Neisseria meningitidis; identical to SEQ ID NO: 2996

SEQ ID NO: 25578 - protein, 211 aa, Neisseria meningitidis; identical to SEQ ID NO: 19275

SEQ ID NO: 25579 - protein, 477 aa, Neisseria meningitidis; identical to SEQ ID NO: 3214

SEQ ID NO: 25580 - protein, 401 aa, Neisseria meningitidis; identical to SEQ ID NO: 2387

SEQ ID NO: 25581 - protein, 104 aa, Neisseria meningitidis
MKLIYTFIKIIILLLFLLLAVINTDAVTFSYLPGQKFDLPLIVVLFGAFVVGIIFGMFALFGRLLSLRGENGRLRAEVKKNARLTGKELTAPPAQNAPESTKQP

SEQ ID NO: 25582 - protein, 241 aa, Neisseria meningitidis; identical to SEQ ID NO: 7122

SEQ ID NO: 25583 - protein, 78 aa, Neisseria meningitidis; identical to SEQ ID NO: 1246

SEQ ID NO: 25584 - protein, 315 aa, Neisseria meningitidis; identical to SEQ ID NO: 18491

SEQ ID NO: 25585 - protein, 415 aa, Neisseria meningitidis; identical to SEQ ID NO: 18235

SEQ ID NO: 25586 - protein, 150 aa, Neisseria meningitidis
MNIEVEMKVLDERMADFIPTYATAGSAGLDLRACLDEEVVLQPGETFLVPTGLAIYLANPSYAAVLLPRSGLGHKHGIVLGNLVGLIDSDYQGELKVSLWNRSSEPFAVKPFERIAQMVIVPIVQARFKRVEEFVGSSRGEGGFGSTGLH

SEQ ID NO: 25587 - protein, 659 aa, Neisseria meningitidis
MSQLANAIRFLSADAVQKANSGHPGAPMGMAEMAETLWTKFLNHNPANPKFYNRDRFVLSNGHASMLLYSLLHLTGYNLSIEDLKNFRQLHSKTPGHPEYGYTDGVETTTGPLGQGIANAVGMALAEKILAAEFNKDGLNIVDHYTYVFMGDGCLMEGVSHEACSLAGTLGLGKLIVLYDDNNISIDGKVDGWFTENIPQRFESYGWHVVPNVNGHDTAAIQAAIEAARAETGKPSIICCKTLIGKGSANKEGSHKTHGAPLGADEIEATRKHLGWTYPAFEIPQEIYDAWNAKEQGAKLEADWNELFAQYQAKYPAEAAEFVRRMDKKLPENFDGYVQTALKEVCAKAETIATRKASQNSIEILAKELPELVGGSADLTPSNLTDWSNSVSVTRDKGGNYIHYGVREFGMGAIMNGLALHGGVKPFGATFLMFSEYERNALRMAALMKINPVFVFTHDSIGLGEDGPTHQPIEQTATLRLIPNMDVWRPCDTAESLVAWAEAVKAADHPSCLIFSRQNLKFQARSEQQLNDIKRGGYIISEAQGNAQAVIIATGSEVELALEAQKALAAQNIAVRVVSMPSTNVFDRQDAAYQATVLPEGLPRIAVEAGHADGWYKYVGLNGAVVGINRFGESAPADLLFKEFGFTVDNVVDTVKSVL

SEQ ID NO: 25588 - protein, 352 aa, Neisseria meningitidis
MTAALHIGHLSKSFQNTPVLNDISLSLDPGEILFIVGASGCGKTTLLRCLAGFEQPDFGEISLSGRTIFSKNTNLPVRERRLGYVVQEGVLFPHLTVYRNTAYGLGNGKGKTAQERQRIEAMLELTGISELAGRYPHELSGGQQQRVALARALAPDPELILLDEPFSALDEQLRRQIREDMIAALRANGKSAVFVSHDREEALQYADRIAVMKQGRILQTASPHELYRQPADLDAALFIGEGIVFPAALNADGTADCGLGRLPVQSDAPAGTRGTLLIRPEQFSLHPHSAPTASIHAVVLKTTPKARHTEISLRVGQTVLTLNLPSAPTLSDGISAVLHLDGPALFFPGNTL

SEQ ID NO: 25589 - protein, 1389 aa, Neisseria meningitidis
MTDTAPTDTDPTENGTRKMPSEHRPTPPAKKRRPLLKLSAALLSVLILAVCFLSWLAGTESGLRFGLYQIPSWFGVNISSQNLKGTLLDGFDGDNWSIETEGADLKISRFRFAWKPSELMRRSLHITEISAGDIAIVTKPTPPKEERPPLSLPDSIDLPAAVYLDRFETGKISAGKAFDKPTVYLERLDASYRYDIKGHRLDLKAADTPWSNSSGSASVGLKKPFALDTAIYTKGGLEGKTIHSTARLSGSLKDVRAELAIDGGNIRLSGKSVIHPFAESLDKTLEEVLVKGFNINPSAFVPSLPDAGLNFDLTAIPSFSDGIALEGSLDLENTKAGFADRNGIPVRQVLGNFVIRQDGTVHIGNTSAALLGRGGIRLSGKIDTEKDILDLNIGINSVGAEDVLQTAFKGRLDGSIGIGGTTASPKISWQLGIGTARTDGSLAIASDPANGQRKLVLDTVNIAAGQGSLTAQGYLELFKDRLLKLDIRSRAFDPSRIDPQLPAGNINGSINLAGELAKEKFTGKMRFLPGTFNGVPIAGSADIVYESRHLPRAAVDLRLGRNIIKTDGGFGKKGDRLNLNITAPDLSRFGFGLAGSLNVRGHLSGDLDGGIRTFETDLSGAARNLHIGKAADIRSLDFTLKGSPDTSRPIRADIKGSRLSLSGGAAVVDTADLMLDGTGVQHRIRTHAAMTLDGKPFKFDLDASGGINRELTRWKGSIGILDIGGAFNLKLQNRMTLEAGAERVAASAANWQAMGGSLNLQHFSWDKKTGISAKGGAHGLHIAELHNFFKPPFEHNLVLNGDWDVAYGRNARGYLNISRQSGDAVLPGGQALGLNAFSLKTRFQNDRIGILLDGGARFGRINADLDIGNAFGGNMANAPLGGRITASLPDLGTLKPFLPAAAQNITGSLNAAAQIGGRVGSPSVNAAVNVSSNYGKINGNITVGQSNSFSTSPLGGKLNLTVADAEVFRNFLPVGQTVKGSLNAAVTLGGSIADPHLGGSINGDKLYYRNQTQGIILDNGSLRSHIAGRKWVIDSLKFRHEGTAELSGTVGIENSGPDVDIGAVFDKYRILSRPNRRLTVSGNTRLRYSPQKGISVTGMIKTDQGLFGSQKSSMPSVGDDVVVLGEVKKEAAAPLPVNMNLTLDLNDGIRFAGYGADVTIGGKLTLTAQSGGSVRGVGTVRVIKGRYKAYGQDLDITKGTVSFVGPLNDPNLNIRAERRLSPVGAGVEILGSLNSPRITLTANEPMSEKDKLSWLILNRAGSGSSGDNAALSAAAGALLAGQINDRIGLVDDLGFTSKRSRNAQTGELNPAEQVLTVGKQLTGKLYIGYEYSISSAEQSVKLIYRLTRAIQAVARIGSRSSGGELTYTIRFDRFSGSDKKDSAGNSKGK

SEQ ID NO: 25590 - protein, 470 aa, Neisseria meningitidis
LLFEFKENKMIVASRWPLLEKVFLRFGMPVAVVDLESTGGNLYEDRVTEVALVKFEQGRVVRHEWLVNPQKPIPQFVAGLTGISDGMVADAPVFAEIAGELFSVLKGCVLVAHNSRFDYTFLKHEFHRVGIGFSSPALCSVQLSRCLYPQFYKHSLDSIIERLGIVVEDRHRAMADVSALCDYLEYSLSEHGVEAWIRQCFRLMNPKPLPAALPERLREQLYGLPDGMGVLACFDGGGKVNYIGTFERVYSEVSALLDSGKAPFDWCNTEEVRFFPALGSLHAYKIKAELVGRYHSGCYVSAKNLLKTFTTVRFEKGSDGMLNAKTAALKNGVTDNPPTGLFANKKAARRALSSWAETYGLCPASAGILPDGYAEDEPCPVYVSGRCDKACGRSDEQVLAFAHKLPILDWGKMHEVEITETDPLTGEKVVLHGMGGALEMGDGLWYFDKDLPDAFKAKFKTDRKNIKEIG

SEQ ID NO: 25591 - protein, 232 aa, Neisseria meningitidis
LVKTADGYKAIAHIQAGDRVLSKDEASGETGYKPVTTRYGNPYQETVYIEVSDGIGNSQTLISNRIHPFYSQGKWIQAGRLKKGDTLLSESGAKQTVQNITLKQQPLKAYNLTVADWHTYFVKGDKAETEGVWVHNSCPPYKRPNNATTKAQRESVQGKPCVECGKLAEKMIADHKKPLVVEYYETGTIDKSKMRAIESVQPQCPTCSAKQGGRLSQYSKEQKRKLSNGNKK

SEQ ID NO: 25592 - protein, 553 aa, Neisseria meningitidis; identical to SEQ ID NO: 19418

SEQ ID NO: 25593 - protein, 160 aa, Neisseria meningitidis; identical to SEQ ID NO: 2526

SEQ ID NO: 25594 - protein, 372 aa, Neisseria meningitidis; identical to SEQ ID NO: 3260

SEQ ID NO: 25595 - protein, 111 aa, Neisseria meningitidis; identical to SEQ ID NO: 7069

SEQ ID NO: 25596 - protein, 493 aa, Neisseria meningitidis; identical to SEQ ID NO: 18563

SEQ ID NO: 25597 - protein, 416 aa, Neisseria meningitidis
MTKLTRRQIIRRTAGTLFALSPIASAVAKTVRAPQFTAARIWPSHTYTRLTLESTAALKYQHFTLDNPGRLVVDIQNANINTVLHGLSQKVAADDPFIRSIRAGQNTPTTVRLVIDLKQPTHAQVFSLPPVGGFKNRLVVDLYPQGMDADDPMMALLNGSLNKTRRGSPEADLAQNTPAQTERGKNGRRPVIMIDPGHGGEDPGAVSPGGLQEKHVVLSIARETKKQLEALGYNVFMTRNEDVFIPLGVRVAKGRARRADVFVSIHADAFTSPSARGTGVYMLNTKGATSSAAKFLEQTQNNADAVGGVPTSGNRNVDTALLDMTQTATLRDSRKLGKLVLEELGRLNHLHKGRVDEANFAVLRAPDMPSILVETAFLSNPAEEKLLGSESFRRQCAQSIASGVQRYLNTSVLKRG

SEQ ID NO: 25598 - protein, 150 aa, Neisseria meningitidis
MAKPLKYPVSALVVLYSGDGGILLIERTHPEGFWQSVTGSLEPGETVAQTARREVWEETGILLADGQLQDWHDSTVYEIYHHWRHRYPKGVFENREHLFSAEIPRDTPIALQPEEHVSYGWFGLEEAAEKVFSPSNRRAILELGRFLGKR

SEQ ID NO: 25599 - protein, 227 aa, Neisseria meningitidis
MELVFIRHGQSEWNAKNLFTGWRDVKLSEQGLAEAAAAGKKLKENGYEFDIAFTSVLTRAIKTCNIVLEESDQLFVPQIKTWRLNERHYGQLQGLDKKQTAEQYGDEQVRIWRRSYDTLPPLLDKDDAFSAHKDRRYAHLPADVIPDGENLKVTLDRVLPFWEDQIAPAILSGKRVLVAAHGNSLRALAKHIEGISDEDIMGLEIPTGQPLVYKLDDNLKVLEKFYL

SEQ ID NO: 25600 - protein, 90 aa, Neisseria meningitidis; identical to SEQ ID NO: 1142

SEQ ID NO: 25601 - protein, 63 aa, Neisseria meningitidis
MNTIPLHTILKLMAHPERMAILLQLLDGDCNIAELSESLSMPATAVSNHLSRLRVEGLVDFTR

SEQ ID NO: 25602 - protein, 156 aa, Neisseria meningitidis; identical to SEQ ID NO: 7655

SEQ ID NO: 25603 - protein, 231 aa, Neisseria meningitidis; identical to SEQ ID NO: 19590

SEQ ID NO: 25604 - protein, 769 aa, Neisseria meningitidis; identical to SEQ ID NO: 8897

SEQ ID NO: 25605 - protein, 119 aa, Neisseria meningitidis; identical to SEQ ID NO: 420

SEQ ID NO: 25606 - protein, 184 aa, Neisseria meningitidis; identical to SEQ ID NO: 3342

SEQ ID NO: 25607 - protein, 361 aa, Neisseria meningitidis
MTVPHIPRGPVMADIAAFRLTGEERQRLLDPAIGGIILFRRNFQNIEQLKTLTAEIKALRTPELIIAVDHEGGRVQRFIESFTRLPAMSTLGEIWDKDGASAAETAAGQVGRVLATELSACGIDLSFTPVLDLDWGNCPVIGNRSFHHNPEAVAHLALALQKGLAKGGMKSCGKHFPGHGFVEGDSHLVLPEDRRSLSELEAADLAPFHIMSREGMAAVMPAHVVYPQVDTKPAGFSEIWLKQILRRDIGFKGVIFSDDLTMEGACGAGGIKERARISFEAGCDIVLVCNRPDLVDELREDFRIPDNPALAQRWQYMANTLGSAAAQAVMQTADFQEAQAFVAGLASPQDTAGGVKVGEAF

SEQ ID NO: 25608 - protein, 502 aa, Neisseria meningitidis
MTTHPANVLASVDLGSNSFRLQICENNNGQLKVIDSFKQMVRFAAGLDEQKNLSAASQEQALDCLAKFGERLRGFRPEQVRAVATNTFRVAKNIADFLPKAEAALGFPIEIIAGREEARLIYTGVIHTLPPGGGKMLVIDIGGGSTEFVIGSTLNPDITESLPLGCVTYSLRFFQNKITAKDFQSAISAARNEIQRISKNMRREGWDFAVGTSGSAKSIRDVLAAEMPQEADITYKGMRALAERIIEAGSVKKAKFENLKPERIEVFAGGLAVMMAAFEEMKLDRMTVTEAALRDGVFYDLIGRGLNEDMRGQTVAEFQHRYHVSLNQAKRTAETAQTFMDSLCHAKNVTVQELALWQQYLGRAAALHEIGLDIAHTGYHKHSAYILENADMPGFSRKEQTILAQLVIGHRGDMKKMSGIIGTNEMLWYAVLSLRLAALFCRSRQDLSFPKNMQLRTDTESCGFILRIDREWLERHPLIADALEYESVQWQKINMPFKVEAV

SEQ ID NO: 25609 - protein, 233 aa, Neisseria meningitidis
MSLKTVAVIGAMEQEIELLREMMENVKAVSFGKFAAYEGELAGKRMVLALSGIGKVNAAVATAWLIHQFAPDCVINTGSAGGLGKGLKVGDVVVGTEIAHHDVDVTAFGYVWGQVPQLPAVFVSDGLLVGKAKQAAEVFEGAAVEQGLIVSGDRFVHSSEGVAEIRKHFPKVKAVEMEAAAIAQTCHQLETPFVIIRAVSDSADEKADISFDEFLKTAAASSAKMVAEIVKSL

SEQ ID NO: 25610 - protein, 405 aa, Neisseria meningitidis
MKTVVWIVVLFAAAVGLALASGIYTGDVYIVLGQTMLRINLHAFVLGSLIAVVVWYFLFKFIIGVFNIPEKMQRFGSARKGRKAALALNKAGLAYFEGRFEKAELEASRVLVNKEAGDNRTLALMLGAHAAGQMENIELRDRYLAEIAKLPEKQQLSRYLLLAESALNRRDYEAAEANLHAAAKMNANLTRLVRLQLRYAFDRGDALQVLAKTEKLSKAGALGKSEMERYQNWAYRRQLADAADAAALKTCLKRIPDSLKNGELSVSVAEKYERLGLYADAVKWVKQHYPHNRRPELLEAFVESVRFLGERDQQKAIDFADAWLKEQPDNALLLMYLGRLAYGRKLWGKAKGYLEASIALKPSISARLVLAKVFDETGEPQKAEAQRNLVLASVAEENRPSAETC

SEQ ID NO: 25611 - protein, 287 aa, Neisseria meningitidis
MNNAFALPAIQSGNGSLEQYIHTVNSIPMLSQEEETRLAERRIKGDLNAAKQLILSHLRVVVSIARGYDGYGLNQADLIQEGNIGLMKAVKRYKPGRGARLFSFAVHWIKAEIHEFILRNWRLVRVATTKPQRKLFFNLRSMRKNLNALSPKEAQDIADDLGVKLSEVLEMEQRMTGHDIAIMADNSDDEDSFAPIDWLADHDSEPSRQLSKQAHYALQTEGLQNALAQLDDRSRRIVESRWLQDDGGLTLHQLAAEYGVSAERIRQIEAKAMQKLRGFLTEEAEAV

SEQ ID NO: 25612 - protein, 336 aa, Neisseria meningitidis
MSIKILIISPSWIGDCVMTQPLFRRLKELHPGCTIDVFAPKWSMAVFERMPEVNEILENPFGHGALELKRRWRVGRDLGRRGYDQVIVLPGSLKSAVIALATGIAKRTGYVGESRYFLLNDIRRLDKERLPLMVDRYTALAHPSQEDFDGHSGFPEFSIDERRREISVETFGLNLGKPVLAFCPGAEFGPAKRWPTRHFAELGKHYLAAGWQVWLFGSQKDDEIAEEINCLSDGMCVNLCGKTDLSQAMDLLSLADTVVCNDSGLMHLAAALGRKVVAVYGSSSPTHTPPLSDKAKIVSLHLECSPCFKRECPLGHTDCLNKLYPEKIVQAVEEAV

SEQ ID NO: 25613 - protein, 186 aa, Neisseria meningitidis
MKILALLIAATCALSACGGQAEEQPASAQPQEQAQSELKTMPVSYTDYQSVANKGLADQKTGLTLPEHVVPADNAEGKNLLHDFSDGLTLTVDTDKADKITAVRVVWNTDAMPQKAEKLSKAAAALIAATAPGDRTLLRDTGDQIKMAIDSHNAQKEPTREWARGGIAYKVTVTNLPSVVLTAKAE

SEQ ID NO: 25614 - protein, 94 aa, Neisseria meningitidis; identical to SEQ ID NO: 11561

SEQ ID NO: 25615 - protein, 340 aa, Neisseria meningitidis; identical to SEQ ID NO: 19658

SEQ ID NO: 25616 - protein, 54 aa, Neisseria meningitidis; identical to SEQ ID NO: 1909

SEQ ID NO: 25617 - protein, 547 aa, Neisseria meningitidis
MNAFTRAWYALERHYQDTRHVLLRDRFACEPDRFERMHERLDGMLFDYSKNRLGEDTLQLLCRLAETADLEGKMRALRTGAKVNGSEGRAALHTALRLPDGADAVYVDGRDVLPEIRRELNRALEFAHSLDDGSYQGITGKRITDFVHIGIGGSDLGPAMCVQALEPFRRHIAVHFAANADPACLDAVLCRLNPETTVFCVASKSFKTPETLLNAQAVKAWYRGAGFSESETACHFCAVSADTAAAAAFGIAAERVFAMYDWVGGRYSVWSSVGLPVMVAVGGARFRELLAGAHAMDSHFFHTPPRRNIPVLMALIAVWYNNFQHADGQTAVPYSHNLRLLPVWLNQLDMESLGKSRASDGSPAVCKTGGIVFGGEGVNCQHAYFQLLHQGTRLIPCDFIVPMTAQGVEDGRSRFTVANAFAQAEALMKGKTLDEARAELADLPEAERERLAPHKEFPGNRPSNSILLDRLTPYNLGMLMAAYEHKTFVQGVIWDINPFDQWGVEYGKQLAKTIIGELEGGTSVHDASTEGLMAFYRECRLKGVGAA

SEQ ID NO: 25618 - protein, 201 aa, Neisseria meningitidis
MTRQSLQQAAESRRSVYLLNKNLPIGKDEIVQIVEHAVLHTPSSFNSQSARVVVLFGEEHDKVWQFVEDALRAVVPADSFEPTAQKLNLFKAGAATILFYEDQNVVKGLQEQFPAYAANFPVWADQANAMVQYAVWTTLAAVGVGANLQHYNPLPDAAIAKAWNIPENWLLRAQMVIGGIEGAAGEKTFEPVAERLKVFGA

SEQ ID NO: 25619 - protein, 348 aa, Neisseria meningitidis
MIPATYTLSQITARLGGEWRGEDISVTAVRPLADAQAEHISFLANPKYKAEVHDSSAGAVIVSAKAADGFEGRNLIVADDPYLYFAKVARLFSPVVKARGGIHPTAVVEPGATVPASCEIGANVYIGANTVLGEGCRILANAVVQHDCKLGDEVVLHPNAVVYYGCTLGRRVEIHSGAVIGADGFGLAFAGDSWFKIPQTGAVTLGNDVEIGSNTNIDRGAMSDTTVGNGTKIDNQVQIGHNCKIGSHTVIAAKTGISGSVTIGSYCIIGGGVGTVGHIEIADKTTIGGGTSVTHSITESGKHLAGIFPMSTHKEWARNAVYIHRLSEMNKRLKTLEQQLSDAGQDSK

SEQ ID NO: 25620 - protein, 81 aa, Neisseria meningitidis; identical to SEQ ID NO: 6740

SEQ ID NO: 25621 - protein, 141 aa, Neisseria meningitidis; identical to SEQ ID NO: 7042

SEQ ID NO: 25622 - protein, 201 aa, Neisseria meningitidis; identical to SEQ ID NO: 15193

SEQ ID NO: 25623 - protein, 395 aa, Neisseria meningitidis; identical to SEQ ID NO: 1105

SEQ ID NO: 25624 - protein, 67 aa, Neisseria meningitidis; identical to SEQ ID NO: 20018

SEQ ID NO: 25625 - protein, 279 aa, Neisseria meningitidis; identical to SEQ ID NO: 8587

SEQ ID NO: 25626 - protein, 363 aa, Neisseria meningitidis; identical to SEQ ID NO: 22177

SEQ ID NO: 25627 - protein, 257 aa, Neisseria meningitidis; identical to SEQ ID NO: 1404

SEQ ID NO: 25628 - protein, 239 aa, Neisseria meningitidis; identical to SEQ ID NO: 19502

SEQ ID NO: 25629 - protein, 482 aa, Neisseria meningitidis
MKLPIQKFMMLFAAAISLLQIPISHANGLDARLRDDMQAKHYEPGGKYHLFGNARGSVKNRVYAVQTFDATAVGPILPITHERTGFEGIIGYETHFSGHGHEVHSPFDNHDSKSTSDFSGGVDGGFTVYQLHRTGSEIHPEDGYDGPQGSDYPPPGGARDIYSYYVKGTSTKTKTNIVPQAPFSDRWLKENAGAASGFFSRADEAGKLIWESDPNKNWWANRMDDIRGIVQGAVNPFLMGFQGLGVGAITDSAVNPVTYAAARKTLQGIHNLGNLSPEAQLAAATALQDSAFAVKDSINSARQWADAHPNITATAQTALSVAEAATTVWGGKKVELNPTKWDWVKNTGYKKPAVRLMQTVDGEMAGGNRPPKSITSNSKADASTQPSLQAQLIGEQISSGHAYNKHVIRQQEFTDLNINSPADFARHIENIVSHPTNMKELPRGRTAYWDDKTGTIVIRDKNSDDGGTAFRPTSGKKYYDDL

SEQ ID NO: 25630 - protein, 207 aa, Neisseria meningitidis; identical to SEQ ID NO: 1132

SEQ ID NO: 25631 - protein, 398 aa, Neisseria meningitidis
MSQKLILVLNCGSSSLKGAVLDNGSGEVLLSCLAEKLNLPDAYITFKVNGEKHKVDLSAHPDHTGAVEALMEELKAHGLDSRIGAIGHRVVSGGELYSESILVDDEVIAGIEKCIPLAPLHNPAHLLGLRAAQSIFKGLPNVVVFDTSFHQTMPEVAYKYAVPQELYEKYGLRRYGAHGTSYRFVADETARFLGKDKKDLRMVIAHLGNGASITAVANGESRDTSMGLTPLEGLVMGTRSGDIDPSVFGFLAENANMTIAQITEMLNKKSGLLGISGLSNDCRTIEEEAAKGHKGAKLALDMFIYRLAKYIGSMAVAAGGLDALVFTGGIGENSDIIRERVIGYLGFLGLNIDQEANLKARFGNAGVITTAGSKAVAVVIPTNEELMIAHDTARLSGL

SEQ ID NO: 25632 - protein, 704 aa, Neisseria meningitidis
MDLLSVFHKYRLKYAVAVLTILLLAAVGLHASVYRTFTPENIRSRLQQSIAHTHRKISFDADIQRRLLPRPTVILKNLTITEPGGDQTAVSVQETKIGLSWKNLWSDQIQIEKWVVSSAELALTRDGKGVWNIQDLIDSQKRQASVNRIIVENSTVRLNFLQEQLILKEINLNLQSPDSSGQPFESSGILVWGKLSVPWKSRGLFLSDGIGTPKISPFHFEASTSLDGHGITISTTGSPSVRFNAGGADAAGLGLRADTSFRNLHLTAQIPTLALRNNSIKIETVNGAFTAGGEYAQWDGSFKLDKANLHSGIANIGNAEISGSFKTPRHQTNFSLNSPLVWTENKGLDAPRLYVSTLQDTVNRLPQPRFISRLDGSLSVPNLQNWNAELNGTFDRQTVAAKFRYTHEDAPHLEAAVALQKLNLTPYLDDVRQQNGKIFPDTLAKLSGDIEAHLKIGKVQLPGLQLDDMETYLHADKGHIALSRFKSGLYGGHTEGGISIANTRPATYRLQQNASNIQIQPLLQDLFGFHSFSGNGDAVIDLTASGETRKELIRSLQGSLSLNISNGAWHGIDMDNILKNGISGKTADNAAPSTPFHRFTLNSEISDGISRHIDTELFSDSLYVTSNGYTNLDTQELSEDVLIRNAVHPKNKPIPLKITGTVDKPSITVDYGRLTGGINSRKEKQKILEDTLLEQWQWLKPKEP

SEQ ID NO: 25633 - protein, 261 aa, Neisseria meningitidis
MGFLQGKKILITGMISERSIAYGIAKACREQGAELAFTYVVDKLEERVRKMAAELDSELVFRCDVASDDEINQVFADLGKHWDGLDGLVHSIGFAPKEALSGDFLDSISREAFNTAHEISAYSLPALAKAARPMMRGRNSAIVALSYLGAVRAIPNYNVMGMAKASLEAGIRFTAACLGKEGIRCNGISAGPIKTLAASGIADFGKLLGHVAAHNPLRRNVTIEEVGNAAAFLLSDLSSGITGEITYVDGGYSINALSTEG

SEQ ID NO: 25634 - protein, 172 aa, Neisseria meningitidis; identical to SEQ ID NO: 3384

SEQ ID NO: 25635 - protein, 92 aa, Neisseria meningitidis; identical to SEQ ID NO: 19825

SEQ ID NO: 25636 - protein, 102 aa, Neisseria meningitidis; identical to SEQ ID NO: 254

SEQ ID NO: 25637 - protein, 384 aa, Neisseria meningitidis; identical to SEQ ID NO: 19375

SEQ ID NO: 25638 - protein, 197 aa, Neisseria meningitidis; identical to SEQ ID NO: 19286

SEQ ID NO: 25639 - protein, 77 aa, Neisseria meningitidis
MNRRKIYLLSVALFTLAFMLLVLLGAYLLTVGSKAFAVASFFFAFGALFGQIGSLALYLRHKSLRAAQSAAKENRYV

SEQ ID NO: 25640 - protein, 321 aa, Neisseria meningitidis
MSYTQLTQGERYHIQYLSRHCTVTEIAKQLNRHKSTISREIRRHRTQGQQYSAEKAQRQSQTIKQRKRQPYKLDSQLIQHIDTLIRRKLSPEQVCAYLCKHHQITLHHSTIYRYLRQDKSNGSTLWQHLRICSKPYRKRYGSTWTRGKVPNRVVIENRPAIVDQKSRIGDWEADTIVGKGQKSALLTLVERVTRYTIICKLDSLKAEDTARAAVRALKAHKDRVHTITMDNGKEFYQHTKITKALKAENYFCRPYHSWEKGLNENTNGLIRQYFPKQTDFRNISDREIRRVQDELNHRPRKTLGYETPSVLFLNLFQPLIH

SEQ ID NO: 25641 - protein, 448 aa, Neisseria meningitidis
MSDNVPTIAAVATAPGRGGVGVIRISGKNLLPMAQALCGKTPKPRVATYADFTDADGQAIDSGLLLFFAAPASFTGEDVIELQGHGGPVVMDMLLNRCLELGARLAEPGEFTKRAFLNDKLDLAQAEGVADLIDASSRSAARLALRSLKGDFSRRIHGLVEDLITLRMLVEATLDFPEEDIDFLEAADARGKLDGLRRAVDDVLANAQQGAILREGLNVVLVGAPNVGKSSLLNALAGDEVAIVTDIAGTTRDAVRERILIDGVPVHIVDTAGLRETDDVVERIGIERSRKAVSEADVALVLVDPREGVNDKTRAILDALPPELKRIEIHSKSDLHAHAAGGFGTGAETVIALSAKTGDGLDALKRTLLREAGWQGEGEGLFLARTRHVNALKAAQEELSLAALCGNHQIELFAEHLRLAQVACGEITGEFTADDLLGVIFSRFCIGK

SEQ ID NO: 25642 - protein, 376 aa, Neisseria meningitidis; identical to SEQ ID NO: 23439

SEQ ID NO: 25643 - protein, 417 aa, Neisseria meningitidis
MQTYLVGGAVRDYLLGLPVKDRDWVVVGADAQTMLAQGFQPVGKDFPVFLHPETHEEYALARTERKTAKGYAGFSFHTDKDVTLEQDLMRRDLTINAMAQDADGKIIDPFGGQRDLAAGILRHVSPAFAEDPVRILRTARFAARYKFEIAEETIKLMRQMVENGEADALVAERVWQEFAKGLMEKNPRKMIEVLRECGALKVLLPEVNALFGVPQRADYHPEIDSGIHTLMTLQRAADMGLSLPERYAALLHDLGKAKTPSDILPRHHGHDLAGVEPVREVNQRLRAPKHCAELAELVCRWHIIFHQVGQLKSQTILNVLKKTDAFRRPERFQTALNVCIADTQGRLNREHTPYPQRAHWLALLEAANQADSGKIAAECRSQGKAHLIAEQIDRARLAQIAPLQKAFRAAQDKTEKH

SEQ ID NO: 25644 - protein, 258 aa, Neisseria meningitidis
MAKKFDKDSFSGTLIVVLAVSLICSIIVAGAVVGLKPIQEKQKLQDKQGYILSVAGLMDKNTDISKTFAERIEQRVVDLATGEYVADAPKDFSARVAGKDPAQSIQIKPEDDLAGIKSRAKYTEVYLVKGEDGKIGQIILPMHGNGLWSVMYGFVAIQPDGNTINGITYYEQGETPGLGGEIGNPLWQQKFVGKKLFDGQGKLALHVGKGAGSDKEHGVDALSGASLTSKGVQGSFAYWFGENGYIPYLNKLKSAGAQ

SEQ ID NO: 25645 - protein, 129 aa, Neisseria meningitidis; identical to SEQ ID NO: 322

SEQ ID NO: 25646 - protein, 315 aa, Neisseria meningitidis
MNILSKISSFIGKTFSLWVALFAAAAFFAPDTFKWAGPYIPWLLGIIMFGMGLTLKPSDFDILFKHPKAVIIGVIAQFAIMPATAWLLSKLLNLPAEIAVGVILVGCCPGGTASNVMTYLARGNVALSVAVTSVSTLISPLLTPAIFLMLAGEMLEIQAAGMLMSIVKMVLLPIVLGLIVHKVLGSKTEKLTDALPLVSVAAIVLIIGAVVGASKGKIMESGLLIFAVVVLHNGIGYLLGFFAAKWTGLPYDAQKTLAIEVGMQNSGLAAALAAAHFAAAPVVAVPGALFSVWHNISGSLLATYWAAKAGKHKKP

SEQ ID NO: 25647 - protein, 687 aa, Neisseria meningitidis
MMTQTLLIELLTEELPPKALNNLGNHFAAAVAEGLEKAQLVDGAAEFTAYASPRRLAVQVKNVKAVQADQKIVKKGPAVANAMKDGAPTKALEGFARGAGAKIEDLTIVHDGKQDVYAYEYVQTGKPLGELLEDIINQAVKKLPIPKVMRWGSSTFTFVRPVHGLIVLHGGDIVNVSVLGLQSSNQTLGHRFLSNGEITIENADSYAEQMRGQGKVVASFAERKAAIQTALEGQARRLNATVAADEALLDEVTALVEYPVVLEAGFEEHFLAVPQECLILTMQQNQKYFPLLDQNGKLMNRFLLVSNLQTADPSHIIQGNERVLRARLSDAEFFYKQDQKATLESRLPKLANVVYHNKIGSQAERIERLQSIAAHIAKALGADAAAAERAARLAKADLVTEMVGEFPELQGTMGKYYARLDGETEEIAEAIEQHYQPRFAGDNLPNGKVATAVALADKLETLVGIWGIGLIPTGDKDPYALRRAALGILRMLMQYGLDVNELIQTAFDSFPKGLLNEKTPSETADFMQARLAVLLQNDYPQDIVAAVLAKQPRRLDDVVAKLQAVAAFKQLPEAAALAAANKRVQNLLKKADAELGAVNESLLQQDEEKALFAAAQGLQPKIAAAVAEGNFQTALSELASVKPQVDAFFDGVMVMAEDAAVKQNRLNLLNRLAEQMNAVADIALLGE

SEQ ID NO: 25648 - protein, 143 aa, Neisseria meningitidis; identical to SEQ ID NO: 2619

SEQ ID NO: 25649 - protein, 54 aa, Neisseria meningitidis
MAKTLKAETYFYRPYHSWEKGLNENTNGLIRQYSPNKPFSETSAIGRYVGFKMS

SEQ ID NO: 25650 - protein, 365 aa, Neisseria meningitidis; identical to SEQ ID NO: 1845

SEQ ID NO: 25651 - protein, 310 aa, Neisseria meningitidis; identical to SEQ ID NO: 18494

SEQ ID NO: 25652 - protein, 112 aa, Neisseria meningitidis; identical to SEQ ID NO: 8651

SEQ ID NO: 25653 - protein, 252 aa, Neisseria meningitidis; identical to SEQ ID NO: 1597

SEQ ID NO: 25654 - protein, 685 aa, Neisseria meningitidis
MPEQNRILCRELSLLAFNRRVLAQAEDKNVPLLERLRFLCIVSSNLDEFFEVRMAWLKRENKLHPRRRLDNGKMPSETIADVTEAARSLIRHQYDLFNNVLQPELARESIHFYRRRNWTGAQKKWIEDYFDRELLPILTPIGLDPSHPFPRPLNKSLNFAVELDGTDAFGRPSGMAIVQAPRILPRVVPLPSELCGGGHGFVFLSSILHAHVGKLFPGMNVKGCHQFRLTRDSDLNVDEEDVQNLRAAVQNELHDREYGDGVRLEVADTCPARIRDFLLSQFRLTADELYQVKGPVNLVRLNAVPDLVNRPDLKFPPHTPGRLKALGKTASIFDLVRQSPILLHHPYQSFDPVVEMMREAAADPAVLAVKMTIYRTGTRSELVRALMKAALAGKQVTVVVELMARFDEANNVNWAKQLEEAGAHVVYGVFGYKIHAKMALVIRREDGVLKRYAHLGTGNYHQGTSRIYTDFGIITADEQITADVNTLFMEITGLGKPGRLNKLYQSPFTLHKMVIGRIRQETEHAKAGKPARITAKMNSLIEPTVIEALYRASAAGVQIDLIVRGMCTLRPGVKGLSENIRVRSIVGRQLEHARVYCFHNNGADDTFISSADWMGRNFFRRIETAAPITAPELKKRVIREGLEMALADNTHAWLMQPDGGYIRAAPAEGESEADLQNDLWTLLGG

SEQ ID NO: 25655 - protein, 321 aa, Neisseria meningitidis; identical to SEQ ID NO: 2913

SEQ ID NO: 25656 - protein, 177 aa, Neisseria meningitidis; identical to SEQ ID NO: 18067

SEQ ID NO: 25657 - protein, 394 aa, Neisseria meningitidis; identical to SEQ ID NO: 19894

SEQ ID NO: 25658 - protein, 317 aa, Neisseria meningitidis; identical to SEQ ID NO: 4876

SEQ ID NO: 25659 - protein, 248 aa, Neisseria meningitidis
VQPETSAQYQHRFAQVIRGGEAADGLPQDRLNVYIRLIRNNIHSFIDRCYTETRQYFDSEEWSRLKEGFVRDAHAQTPYFQEIPGEFLQYCQSLPLSDGILALMDFEYTQLLAEVAQIPDIPDIHYSNDSKYTPSPAAFIRQYRYDVTDDLHEAETALLIWRNAEDDVMYQTLDGFDMMLLEIMGSSALSFDTLAQTLVEFMPEDDNWKNILLGKWSGWTEQRIIIPSLSAISENMEGNSPGQNHLSA

SEQ ID NO: 25660 - protein, 174 aa, Neisseria meningitidis; identical to SEQ ID NO: 14426

SEQ ID NO: 25661 - protein, 44 aa, Neisseria meningitidis; identical to SEQ ID NO: 6328

SEQ ID NO: 25662 - protein, 238 aa, Neisseria meningitidis; identical to SEQ ID NO: 4111

SEQ ID NO: 25663 - protein, 186 aa, Neisseria meningitidis
MPGLAGLILPKLLARNWEGRQPMENRFAKIVKDIFSFTQFVSEAENKIPNQSSRYYDCWWELEILNASALEDWEISGKPEKWEKWTEKYQTEALQSVKHLFAEEVPENNIVCDISHFLHFADWAEADIPNQSRLYAEYWWEMEIFKMSVLEDWERSGKPLDWEKWQRQYRSEAFELVKKLNRSKQE

SEQ ID NO: 25664 - protein, 150 aa, Neisseria meningitidis; identical to SEQ ID NO: 18173

SEQ ID NO: 25665 - protein, 136 aa, Neisseria meningitidis; identical to SEQ ID NO: 4515

SEQ ID NO: 25666 - protein, 218 aa, Neisseria meningitidis; identical to SEQ ID NO: 3549

SEQ ID NO: 25667 - protein, 251 aa, Neisseria meningitidis
MKFARLLFLCAALAGTQAAAAEMVQIEGGSYRPLYLKKDTGLIKVKPFKLDKYPVTNAEFAEFVNSHPKWQKGKVSSKQAEPAYLKHWMKNGSRSYAPKAGELKQPVTNVSWFAANAYCAAQGKRLPTIDEWEFAGLASATQKNGSNEPGYNRTILDWYADGGRKGLHDVGKGRPNYWGVYDMHGLIWEWTEDFNSSLLSSGNADAQMFCSGASVGSSDSSNYAAFLRYGIRTSLQSKYVLHNLGFRCTSR

SEQ ID NO: 25668 - protein, 718 aa, Neisseria meningitidis
MPVPQPTAPYDHLTAEARTLLFRTASYLKPEEQVELEKAVAYAFHAHDGQTRKSGEPYITHPIAVATQLALWHMDIQGLCAGVMHDVLEDTGVTKGEMAAVFGNTIAEMVDGLSKLEKLKFEDHAEHQAESFRKLILAMTKDVRVIVVKLADRLHNMRTLGSMRPDKRRRIARETLEIYAQIANRIGLNNAYQELQDLSFQNLHPNRYETLKKAMDKSRKNRQDVVGKVLRAFGQRLVGANIEAKIKGREKNLYGIHQKMMAKKLRFAEVMDIYGFRVIVNSIPACYAALGALHTLYQPKPGRFKDYIAIPKSNGYQSLHTTLVGPYGLPIEVQIRTKEMDAVAEGGIAGHWSYKSYSKMVDQAVLHTNRWLKNILDLQASSANAIEFLEHVKVDLFPNEIYILTPKGKILTLPKGATPVDFAYAVHTDIGHKTVAARINNIMMPLRTKLKTGDSVEIITSEHAKPNPAWLNFAVSGRARSAIRQYIKNLNRHDAVVLGESLLQKALSSLLPKDVLLSDGIKEKYLADLNDKQTSFEEVLYNVGMGHTLPVYVAMHIAELAGEHFGSEVRLSSIKVDGQESGHIHFAECCHPVPGDSIRLLLVKGKGMIIHRDTCPTLLKSDPEQQLDADWENMNGQNYRVGLQVQSEDSHGLLALMAQAISDSGADIESVETPSKSQSGTEGFVEFKFLLKVKNLNQLNQIIQNLHSIPYIRKVIRS

SEQ ID NO: 25669 - protein, 287 aa, Neisseria meningitidis
MNKFSQSGKGLSGFFFGLILATVIIAGILFYLNQSGQNAFKIPVPSKQPAETEILKPKNQPKEDIQPEPADQNALSEPDAAKEAEQSDAEKAADKQPVADKADEVEEKADEPEREKSDGQAVRKKALTEEREQTVGEKAQKKDAETVKKQAVKPSKETEKKASKEEKKAEKEKVAPKPTPEQILNSGSIEKARSAAAKEVQKMKTPDKAEATHYLQMGAYADRRSAEGQRAKLAILGISSKVVGYQAGHKTLYRVQSGNMSADAVKKMQDELKKHEVASLIRSIESK

SEQ ID NO: 25670 - protein, 62 aa, Neisseria meningitidis; identical to SEQ ID NO: 5951

SEQ ID NO: 25671 - protein, 367 aa, Neisseria meningitidis
MMETQLYIGIMSGTSMDGADAVLVRMDGGKWLGAEGHAFTPYPDRLRRQLLDLQDTGTDELHRSRILSQELSRLYAQTAAELLCSQNLAPSDITALGCHGQTVRHAPEHGYSIQLADLPLLAERTRIFTVGDFRSRDLAAGGQGAPLVPAFHKALFRDDRETRAVLNIGGIANISVLPPDAPAFGFDTGPGNMLMDAWTQAHWQLPYDKNGEKAAQGNILPQLLDRLLAHPYFAQPHPKSTGRELFALNWLETYLDGGENRYDVLRTLSRFTAQTVFDAVSHAAADARQMYICGGGIRNPVLMADLAECFGTRVSLHSTAELNLDPQWVEAAAFAWLAACWINRIPGSPHKATGASKPCILGAGYYY

SEQ ID NO: 25672 - protein, 335 aa, Neisseria meningitidis
MSTFFQQTAQAMIAKHINRFPLLKLDQVIDWQPIEQYLNRQRTRYLRDHRGRPAYPLLSMFKAVLLGQWHSLSDPELEHSLITRIDFNLFCRFDELSIPDYSTLCRYRNRLAQDDTLSELLKLINRQLTEKGLKVEKASAAVIDATIIQTAGSKQRQAIEVDEEGQISGQTTPSKDSDARWIKKNGLYKLGYKQHTRTDAEGYIEKLHITPANAHECKHLPPLLEGLPEGTTVYADKGYDSAENRQHLEEHQLPDGIMRKACRNRPLSETQTKRNRYLSKTRYVVEQSFGTLHRKFRYARAAYFGLIKVSAQSHLKAMCLNLLKAANRLSAPAAA

SEQ ID NO: 25673 - protein, 720 aa, Neisseria meningitidis
MQQKIRFQIEGMTCQACASRIEKVLNKKDFVESAGVNFASEEAQVVFDDSKTSVADIAKIIEKTGYGAKEKTEDTLPQPEAEHHIGWRLWLLFTINVPFLIGMAGMMIGRHDWMIPPLWQFALASVVQLWLTIPFYKSAWASIKGGLANMDVLVTIGTVSIYLYSVYMLFFSPHAAHGMAHVYFEAGVMVIGFVSLGKFLEHRTKKSSLNSLGLLLKLTPTQVNVQRNGEWKQLPIDQVQIGDLIRANHGERIAADGIIESGSGWADESHLTGESNPEEKKAGGKVLAGALMTEGSVVYRATQLGSQTQLGDMMNALSEAQGSKAPIARVADKAAAVFVPAVVGIALLTFIVTWLIKGDWTVALMHAVAVLVIACPCALGLATPAAIMVGMDKAVKHGIWFKDAAAMEEAAHVDAVVLDKTGTLTEGRPQVAAVYCVPDSGFDEDDLYRIAAAVEQNATHPLARAIVSAAQTRSLEIPAAQNAQTVVGAGIAAEVEDVGLVKAGKAEFAELTLPEFSDGVWDIASIVAVSVDNKPIGAFALADALKADTAEAIGRLKKHNIDVYIMSGDNQGTVEYVAKQLGIAHAFGNMSPRDKAAEVQKLKAAGKTVAMVGDGINDAPALAAANVSFAMKGGADVAEHTASATLMQHSVNQLADALLVSQATLKNIKQNLFFAFFYNILGIPLAALGFLNPVIAGAAMAASSVSVLSNALRLKRVKID

SEQ ID NO: 25674 - protein, 131 aa, Neisseria meningitidis; identical to SEQ ID NO: 12068

SEQ ID NO: 25675 - protein, 144 aa, Neisseria meningitidis; identical to SEQ ID NO: 4528

SEQ ID NO: 25676 - protein, 1043 aa, Neisseria meningitidis
MNLETKPIAETPNFIVLDQYEKIEQSGSYQSENQLEAELIADLQNQGYEYRKDLNSQSRLLENLRAQLQRLNDVAFSDGEWARFLTEYLDRPSENITDKTRKIHDDHIYDFAFDDGRLKNIYLLDKKNLARNHVQLINQFEQTGTHANRYDVTVLVNGLPLVQIELKKRGVAVREAFNQVHRYSKESFNSENSLFKFLQIFVISNGTDTRYFANTTKRDKNSFDFTMNWARSDNHPIKDLKDFTATFLQKSVLLGVLLHYSVFDANDTLLIMRPYQIAAAERILWKINSSAQAKNWSGPESGGYVWHTTGSGKTLTSFKAARLATESAFIDKVFFVVDRKDLDYQTMKEYQRFSTDSVNGSESTAGLKRNLEKDDNKIIVTTIQKLNNLMKSEDNLPVYHQQVVFIFDECHRSQFGEAQKNLKKKFKKFCQFGFTGTPIFHDHIVDGKLIMKGNALGSESTESVFGRQLHSYVITDAIRDEKVLKFKVDYNDVRPQFKAVEAEQDEKKLSAAENRQALLHPERIREITQYILNQFRQKTHRLNAGGKGFNAMFAVSSVDAAKCYYEAFKTQQAGSLHPLKVATIFSFAANEEQNAVGEIADETFEPEAMDSSAKEFLQAAINDYNACFKTNFGTDSKAFQNYYRDLAKRVKNQEVDLLIVVGMFLTGFDAPTLNTLFVDKNLRYHGLMQAFSRTNRIYDATKTFGNIVCFRDLEQATIDAITLFGDKNTKNVVLEKSYEEYMNGYTDSQTGEARRGYLDVAKELHERFPDPDKIETEKDKKDFAKLFGEYLRAENVLQNYDEFAALRELQSVDAADEDAMKAFQEKYYLSDEDVQEMRQVPMPSERAVQDYRSAYNDIRDWLRRQKAGEQKEQSKIDWDDVVFEVDLLKSQEINLDYILQLIFEHHKKIKGKAELVEEIRRIIRASIGHRAKESLIVDFINDTDLDKVPDVPAILETFYTYAQEVMRNEAAELIAAEGLNETAAKRYLISSLKRGYASENGTELTETMPKMSPLNPQYLTKKQSVFQKIAAFVEKFAGIGTDI

SEQ ID NO: 25677 - protein, 274 aa, Neisseria meningitidis; identical to SEQ ID NO: 3305

SEQ ID NO: 25678 - protein, 107 aa, Neisseria meningitidis; identical to SEQ ID NO: 2524

SEQ ID NO: 25679 - protein, 336 aa, Neisseria meningitidis
MSDTPATRDFGLIDGRAVTGYVLSNRRGTRVCVLDLGGIVQEFSVLADGVRENLVVSFDDAASYADNPFQINKQIGRVAGRIRGAAFDINGRTYRVEANEGRNALHGGSHGLAVTRFNAVAADGRSVVLRSRLQQSADGYPNDLDLDISYRLDEDDRLTVSYRATALGDTVFDPTLHIYWRLDAGLHDAVLHIPQGGHIPADAEKLPVSTVLDDLEVFDFSRPKPLDAAVAALRRETGRAGFDDAYRVPSDIGRPAAVLQAGRRRRISIYSDRNGLVIFTAAPQDFARHDAGVYDALATEAQTLPDSLHWPEFGNIRLNKGDTREATIAYGIESLS

SEQ ID NO: 25680 - protein, 430 aa, Neisseria meningitidis; identical to SEQ ID NO: 2797

SEQ ID NO: 25681 - protein, 153 aa, Neisseria meningitidis
MSDLPSISRFLADEAATLDLGAAWSSRLNAPLVIYLEGDLGAGKTTLTRGILRGLGHLGAVKSPTYAIVESYPLKPFTLHHFDLYRFSFPEEWEDAGLDELFAANSVCLIEWPQQGGEFTPPADITTTLTHDGGGRKCLLTAHTERGRESLPL

SEQ ID NO: 25682 - protein, 187 aa, Neisseria meningitidis; identical to SEQ ID NO: 18661

SEQ ID NO: 25683 - protein, 424 aa, Neisseria meningitidis
MKTLQDWLSHLETAHSGGLIDMGLERVGEVKKRMKLTPQCPVVVVAGTNGKGSVCAYLTQIYKQAGYKTGTLTSPHLLRYNERIAINAEPVSDDTIIASFERIEAAHGEISLTYFEFNALAAVDIFMREQVDVMILEVGLGGRLDAVNAFDGDCAVVTSVDLDHQAFLGDTVEQVGLEKAGVFRSGKPAICGQNPAPASLVAHAEAIGAKLLMVQRDFEFHAMENIQWNYRFRPQHSDNPARNRNALPFPALRGTYQLSNAACTLTVLECLNDKLPVDIGAIKRGLLLVENPGRFQVLPGRPLTVLDVGHNPHAARALRRSLINLAFAQKRTAVFSMLSDKDIDGVLEIVKDQFDEWYIAPLDVPRGMTLESLQNKLHEHSIENIQTFASVREAYRAAASKAGENDRIVVFGSFHTVADVMSVL

SEQ ID NO: 25684 - protein, 163 aa, Neisseria meningitidis
MKYRRFYRNGGTYFFTVVTNKRQKILTDDAVRLALRQAVMAVRERYPFEILAWVLMPDHLHTIWRLPDNDSAYSERWRQIKRHSQYLIGGNLRLWQKRFWEHTIRDEADFSCHFDYLHFNPVKHGYVGQISDWRFSTFHRYVKQGMYPHNWGGGNADFSIGYD

SEQ ID NO: 25685 - protein, 514 aa, Neisseria meningitidis
MCGVLGLVSHEPVNQLLYDGLQMLQHRGQDAAGIATAEGGTFHMHKGKGMVREVFRTRNMRDLVGNAGIAHVRYPTAGNAGSSAEAQPFYVSSPFGIVLAHNGNLTNTAELYENVCNKHLRHVNTSSDSEVLLNVFAHELRREVSKNADPHRLNTDNIFNAVAEVHRLVRGAYGVVAMIAGYGMVAFRDPYGIRPLALGSQTDEAGRKSYAVASESVAFNALAYDLERDIRPGEAVFVGFDGTIIARQCSDRAKLSPCLFEYVYFARPDSVIDGVSVYQSRLDMGVSLAEKIKRELPVDGIDVVMPIPDTSRPSAMELAVHLKKPYREGLIKNRYIGRTFIMPGQATRKKSVRQKLSPMETEFAGKSVLLVDDSIVRGTTSREIVEMVRAAGARKVYIASAAPEVRYPNVYGIDMPTREELIANGRSAAEIAAEIGADGIVFQDLGDLEAVVKALNPKIESFDSSCFNGIYQTGDIDDAYLDRLSAEKSGCGGLKIHPSRMEHSISISDAGDEE

SEQ ID NO: 25686 - protein, 86 aa, Neisseria meningitidis; identical to SEQ ID NO: 7137

SEQ ID NO: 25687 - protein, 291 aa, Neisseria meningitidis; identical to SEQ ID NO: 5426

SEQ ID NO: 25688 - protein, 156 aa, Neisseria meningitidis; identical to SEQ ID NO: 681

SEQ ID NO: 25689 - protein, 227 aa, Neisseria meningitidis
MWLVGAARRIADTRTFTRIYTEIAVPVVLEQRQRQVPHSAVTARVALSREFVSFFEEHLPIAATSVVSIFGACIMLLVLEFWVGVSAVGILALFLWLLPRFAAISENLYFRLKNSLECDNHFIRKGDRRQLDRHYGLVARLRVLISNREAFGYLCVGAAMGILFGFAFVMMTLKGYSSAGHVYSVGTYLWMFAMSLDDVPRLVEQYSNLKDIGQRIEWSERNIKAGT

SEQ ID NO: 25690 - protein, 408 aa, Neisseria meningitidis; identical to SEQ ID NO: 3316

SEQ ID NO: 25691 - protein, 191 aa, Neisseria meningitidis; identical to SEQ ID NO: 19358

SEQ ID NO: 25692 - protein, 182 aa, Neisseria meningitidis; identical to SEQ ID NO: 2877

SEQ ID NO: 25693 - protein, 144 aa, Neisseria meningitidis; identical to SEQ ID NO: 3606

SEQ ID NO: 25694 - protein, 160 aa, Neisseria meningitidis; identical to SEQ ID NO: 1608

SEQ ID NO: 25695 - protein, 295 aa, Neisseria meningitidis; identical to SEQ ID NO: 19389

SEQ ID NO: 25696 - protein, 316 aa, Neisseria meningitidis; identical to SEQ ID NO: 6611

SEQ ID NO: 25697 - protein, 291 aa, Neisseria meningitidis; identical to SEQ ID NO: 18768

SEQ ID NO: 25698 - protein, 291 aa, Neisseria meningitidis; identical to SEQ ID NO: 22789

SEQ ID NO: 25699 - protein, 259 aa, Neisseria meningitidis; identical to SEQ ID NO: 1423

SEQ ID NO: 25700 - protein, 256 aa, Neisseria meningitidis; identical to SEQ ID NO: 18157

SEQ ID NO: 25701 - protein, 241 aa, Neisseria meningitidis; identical to SEQ ID NO: 13039

SEQ ID NO: 25702 - protein, 472 aa, Neisseria meningitidis; identical to SEQ ID NO: 18056

SEQ ID NO: 25703 - protein, 283 aa, Neisseria meningitidis; identical to SEQ ID NO: 9200

SEQ ID NO: 25704 - protein, 123 aa, Neisseria meningitidis; identical to SEQ ID NO: 1296

SEQ ID NO: 25705 - protein, 380 aa, Neisseria meningitidis; identical to SEQ ID NO: 2984

SEQ ID NO: 25706 - protein, 737 aa, Neisseria meningitidis; identical to SEQ ID NO: 18766

SEQ ID NO: 25707 - protein, 249 aa, Neisseria meningitidis; identical to SEQ ID NO: 18550

SEQ ID NO: 25708 - protein, 139 aa, Neisseria meningitidis; identical to SEQ ID NO: 19334

SEQ ID NO: 25709 - protein, 407 aa, Neisseria meningitidis; identical to SEQ ID NO: 12938

SEQ ID NO: 25710 - protein, 436 aa, Neisseria meningitidis
MIVPDLFVAHFREAVPYIRQMCGKTLVAGIDDRLLEGDTLNKLAADIGLLSQLGIRLVLIHGARHFLDRHAAAQGRTPHYCRGLRVTDETSLEQAQQFAGTVRSRFEAALCGSVSGFARAPSVPLVSGNFLTARPIGVIDGTDMEYAGVIRKTDTAALRFQLDAGNIVWLPPLGHSYSGKTFYLDMLQTAASAAVSLQAEKLVYLTLSDGISRPDGTLAETLSAQEAQSLAEHAGGETRRLISSAVAALEGGVHRVQILNGAADGSLLQELFTRNGIGTSIAKEAFVSIRQAHSGDIPHIAALIRPLEEQGILLHRSREYLENHISEFSILEHDGNLYGCAALKTFAEADCGEIACLAVSPQAQDGGYGERLLAHIIDKARSMGISRLFALSTNTGEWFAERGFQTASEDELPETRRKAYRSNGRNSHILVRRLHR

SEQ ID NO: 25711 - protein, 234 aa, Neisseria meningitidis
MLRSILAASLLAVSFPAAAEALNYNIVEFSESAGVEAVQDTMSARLQVAAEGRDKNAVNAEFVKKFNNFTRKSKNGSFKTELVSRSAMPRYQYTNGRRIQTGWEERAEFKVEGRDFDELNRFIADVQADAALEYTDFHVSRERRNEVIDQVSKDAILRFKARADKLSGILGTSGYKIVKLNLGHIGSHIAGGGTAQAKMLRAMPMAASVNMEGADSAAPGVEEISISVNGTVQF

SEQ ID NO: 25712 - protein, 433 aa, Neisseria meningitidis; identical to SEQ ID NO: 8831

SEQ ID NO: 25713 - protein, 300 aa, Neisseria meningitidis; identical to SEQ ID NO: 19179

SEQ ID NO: 25714 - protein, 214 aa, Neisseria meningitidis; identical to SEQ ID NO: 18108

SEQ ID NO: 25715 - protein, 1080 aa, Neisseria meningitidis
MQNMKNQVRGSGMDARSNPANVSDGLQNSSSHIGTNTRYRLTKLGEQMARLPIDPKIARILLAAKKHDCMAEILVIASALSIQDPRERPLEARDAASKAHERFTDKQSDFLAYLNIWDSFQRERDKGLSNKQLVQWCRQYFLSHLRMREWRELHHQLAQTAIEMGLTTKEAAFRRSPEVRQLTSSENAGDQDLSAKLKQKQLDKKQHRAQIRAAKEAGYEQIHRALLTGLIANVGMKSPDGNVYTSTRGSRFHLFPASALFKAKPKWVMAAELVETTKLYARDVAAIQPEWIEQEAPHLVRYHYFEPHWEQKRGEVIASERVTLYGLTVLPRRPVSYGRIAPEEAREIFIRGALVAQECDLKADFFVHNKKLIKEITELEHKSRKQDVLVDDEALFAFYNERLPEMAWKDAQGSVWGSEDSVRIIESDKAERSSENERNEFRKNKRNGSRQNENHGNTVGWVENPTSAATAKTVGFDNPTYATQQPTPSPEREGRGEGKTVAAQTNFSATAANPLPQEREQSASASTFSDDLRPANLQQTAPSPVGEGWGESKTVATQTNFSATSTLSDDPKPKKQPAPQKGRLKPLPLADIRTFQAWLKTAECDNPRLLFLSRDDLMQHAAAHITEEQFPKFWQTADGKFKLSYRFEPHHPLDGVTMTVPLTVLNRLHAPSLEWLVPGMLREKIQLLIKALPKQIRRICVPVPDFITKFLESNPDRQATIIPQLAHFIAKSASDMRILEQIDQDAWAAQELPEHCYLNLRIIDDGGQELAGGRKLHELQQQLGQAAAVTFRDNTQEFERDNVTTWDIGTLPESIKFARGKQQLTGYLGLQKEKDGRIALRLFDTTEAAEQAHRQGVIELMKLQLKEQVKDLNKGIQGFTQAAMLLKHINADTLRDDLTQAVCDRAFIGEDELPRNEKAFKEQIKRARSRLPAVKEALSRYLQETAAAYAELNGKLGKHPLTHLLRLRLQTLLAPGFATRTPWAQWPRLPIYLKAMTLRLEKYSSNPARDAAREADIQELEQMWQEKNDGLVKQGQPISDNLAAFKWMIEELRVSLFAQELKTPYPVSVKRLLKEWEKIF

SEQ ID NO: 25716 - protein, 39 aa, Neisseria meningitidis; identical to SEQ ID NO: 7406

SEQ ID NO: 25717 - protein, 96 aa, Neisseria meningitidis; identical to SEQ ID NO: 2317

SEQ ID NO: 25718 - protein, 177 aa, Neisseria meningitidis; identical to SEQ ID NO: 19230

SEQ ID NO: 25719 - protein, 559 aa, Neisseria meningitidis
MEIINDAELIRSMQRQQHIDAELLTDANVRFEQPLEKNNYVLSEDETPCTRVNYISLDDKTARKFSFLPSVLMKETAFKTGMCLGSNNLSRLQKAAQQILIVRGYLTSQAIIQPQNMDSGILKLRVSAGEIGDIRYEEKRDGKSAEGSISAFNNKFPLYRNKILNLRDVEQGLENLRRLSSVKTDIQIIPSEEEGKSDLQIKWQQNKPIRFSIGIDDAGGKTTGKYQGNVALSFDNPLGLSDLFYVSYGRGLAHKTDLTDATGTETASGSRSYSVHYSVPVKKWLFSFNHNGHRYHEATEGYSVNYDYNGKQYQSSLAAERMLWRNRLHKTSVGMKLWTRQTYKYIDDAEIEVQRRRSAGWEAELRHRAYLNRWQLDGKLSYKRGTGMRQSMPAPEENGGGTIPGTSRMKIITAGLDAAAPFMLGKQQFFYATAIQAQWNKTPLVAQDKLSIGSRYTVRGFDGEQSLFGERGFYWQNTLTWYFHPNHQFYLGADYGRVSGESAQYVSGKQLMGAVVGFRGGHKVGGMFAYDLFAGKPLHKPKGFQTTNTVYGFNLNYSF

SEQ ID NO: 25720 - protein, 131 aa, Neisseria meningitidis; identical to SEQ ID NO: 18033

SEQ ID NO: 25721 - protein, 330 aa, Neisseria meningitidis; identical to SEQ ID NO: 19399

SEQ ID NO: 25722 - protein, 91 aa, Neisseria meningitidis; identical to SEQ ID NO: 4054

SEQ ID NO: 25723 - protein, 87 aa, Neisseria meningitidis; identical to SEQ ID NO: 13703

SEQ ID NO: 25724 - protein, 414 aa, Neisseria meningitidis; identical to SEQ ID NO: 7206

SEQ ID NO: 25725 - protein, 333 aa, Neisseria meningitidis; identical to SEQ ID NO: 7659

SEQ ID NO: 25726 - protein, 272 aa, Neisseria meningitidis
MKKTVFTYAMIALTGTAAAAQELQTANEFTVHTDLSSISSTRAFLKEKHKAAKHIGVRADIPFDANQGIRLEAGFGRSKKNIINLETDENKLGKTKNVKLPTGVPENRIDLYTGYTYTQTLSDSLNFRVGAGLGFESSKDSIKTTKHTLHSSRQSWLAKVHADLLSQLGNGWYINPWSEVKFDLNSRYKLNTGVTNLKKDINQKTNGWGFGLGANIGKKLGESASIEAGPFYKQRTYKESGEFSVTTTSGDVSLTIPKTSIREYGLRVGIKF

SEQ ID NO: 25727 - protein, 252 aa, Neisseria meningitidis
MPCLAVVLVGGDPASAVYVRNKKTACQKCGIKSLSYELPESTSQEELLALVDRLNADSEVDGILVQLPLPKHLDSQAVLERISPDKDVDGFHPYNVGRLAVKMPLMRPCTPKGVMTLLEAYGIDPKGKKAVVVGASNIVGRPQALELLLARATVTVCHSATENLADEVAGADILVVGVGIPNFVKGEWIKPGAVVIDVGINRLDDGSLCGDVKFETAKERAAMITPVPGGVGPMTIATLMENTLHAASLHDA

SEQ ID NO: 25728 - protein, 149 aa, Neisseria meningitidis
MSIYAVAHIVHLYCAIAFVGGVFFEVLVLSVLHTGRVSCEARREVEKAMSYRAVRVMPFVVGLLFASGVVMAANRYLSILGEPFATSFGTMLTLKILLAFSVLAHFAIAVVKMARSTLTVGWSKYIHAVVFTHMLLIVFLAKAMFYISW

SEQ ID NO: 25729 - protein, 287 aa, Neisseria meningitidis; identical to SEQ ID NO: 8500

SEQ ID NO: 25730 - protein, 406 aa, Neisseria meningitidis; identical to SEQ ID NO: 19143

SEQ ID NO: 25731 - protein, 216 aa, Neisseria meningitidis; identical to SEQ ID NO: 3431

SEQ ID NO: 25732 - protein, 122 aa, Neisseria meningitidis; identical to SEQ ID NO: 12772

SEQ ID NO: 25733 - protein, 199 aa, Neisseria meningitidis
MSELDNILAHNRQFVESGEYEKYFTDKYPERGLAVLSCMDARIIGLLPDALGLKNGDAKLIKNAGALVTHPWGSVMRSLLVAVFELKVREIMVIAHHDCGMQGLNAEEFLGRVRESQIPEDRIETLRYAGIDLDGWLTGFDNVEDSVRHTVDLIRNHPLMPRHIAVHGLVIHPVTGKLTLVVDGSVSDGMDLSEGMETS

SEQ ID NO: 25734 - protein, 308 aa, Neisseria meningitidis; identical to SEQ ID NO: 9802

SEQ ID NO: 25735 - protein, 447 aa, Neisseria meningitidis
MFHSVNVFTGETLYRRPAQDYAEFERRLADLKMRGGAFAQLGVTERAARLQKFADRLEAEKERFAEMVCEEVGRCLHECRAEIGKSIELIRYYARLAPELLAHKTIATQASLSQVRFEPLGVVFAVMPWNYPVWQVLRFAVPAMCAGNACAVKPAPSVARVSQALFDLASDGIPLAGVWLDEAGTLKAVEDTDAMAFTGSTYTGRILAAHAGANLKKTVLELGGSNAFIVMPDADLERAAAEACYSRFRDAGQSCNAAKRIIVTEAAADRFITLFLAECAKLKMGDPKHPDTTLAPLHREDLRDRVHGQVEDAVSNGAVCLTGGKIPQGRGWFYPATVLDRVNPACRVWREEVFGPAALILRAENEEHAIRLANDSPFGLGACIYTADTGCAWRFAEKIQAGSVFINRHTSSDLRLPFGGVKDSGYGRELSEFGLYEFVNVKTYWQK

SEQ ID NO: 25736 - protein, 422 aa, Neisseria meningitidis
VKPLRRLTNLLAACAVAAAAFGQPALAADLAQDPFITDNAQRQHYEPGGKYHLFGDPRGSVSDRTGQINVIQDYTHQMGNLLIQQANINGTIGYHTRFSGHGHEEHAPFDNHAADSASEEKGSVNEGFTVYRLNWKGHEHHPADGYDGPQGGNYPKPTGARDEYTYHVNGTARSIKLNPTDTRSIRQRISDNYNNLGSNFSDRADEANKKIFEHNAKLDRWGNSMEFVNGVAAGALNPFISAGEAVDQWMQENPNAAETVEALVNVLPFAKVKNLTKAAKPGKAAVSGDFSDSYKHNTASRLSQSVDGEMFQTRNVDFKAKSIGTKIHDGAQGKHISGHRNYIEGKSTLNQNINPQELLNGIHSGAYPVISKGARGNPVVDFGYPIGSDGKSGLSTNFGTIHSGKNGVHIVPANPKTIKKVQ

SEQ ID NO: 25737 - protein, 540 aa, Neisseria meningitidis
MQVNIQIPCMLYRRGSVKPPLFEAPRLLPSFTDPVVPKLSAPGGYIVDIPKGNLKTEIEKLAKQPEYAYLKQLQVAKNVNWNQVQLAYDKWDYKQEGLTRAGAAIIALAVTVVTAGAGVGAALGLNGAAAAAADAAFASLASQASVSLINNKGDVGKTLKELGRSRTVKNLVVAAATAGVSNKLGASSLATWSETPWVNNLNVNLANAGSAALINTAVNGGSLKDNLEANILAALVNTAHGEAASKIKQLDQHYIAHKVAHAVAGCAAATANKGKCQDGAIGAAVGEIVGEALVKNTDFSDMTPEQLDLEVKKITAYAKLAAGTVAGVTGGDVNTAAQTAQNAVENNAVKAVVTAAKVVYKVARKGLKNGKINVRDLKQTLKDEGYNLADNLTTLFDETLDWNDAKAVIDIVVGTELNRANKGEAAQKVKEVLEKNRPYIPNKGAVPNMSTYMKNNPFGKQLAQISEKTTLPTQQGQSVFLVKRNQGLLKTGDRFYLDGQHKNHLEVFDKNGNFKFVLNMDGSLNQMKTGAAKGRKLNLK

SEQ ID NO: 25738 - protein, 626 aa, Neisseria meningitidis
MPYFALFDDAVSGRAKRYQNHVESRFFRPEELDALDSALQKGWQKGLHSVLFADYGFGLPLTGVESERGGNLALHWFADCADTDAENWLARHSDGLPAGISTPQSSVSEADYLDHIRQIHEAIRRGDTYQINYTTRLHLQAYGNPISLYRRLRQPVPYAVLSHLPDAEGQSAWTLCFSPELFLNLASDGTISTEPMKGTAPILGDGQDERRAAELQADPKNRAENVMIVDLLRNDLGKIAQTGKVCVPEPFKVSRFGSVWQMTSTIQAQALPHTSFADILRAAFPCGSITGAPKKMSMQIIETLETEARGLYTGSIGYLNPCSGGLGFEGTFNVVIRTLSLKPASASDGIVSGIGGPDSNVQARTAGQGEATPYRFQVHPLYQGVYGVGSGIVIDSDPAAEYRECGWKARFLNELRPDFGIFETMRVENRQCALLDRHLCRLKAAAQALNLPLPDGCENQIKQYIADLPDGAFRVKALLASDGISLSRAVLNHLADKQRVIISPAVLPAQNYLRRFKTTHRTLFDQAWQTAETQGAFDSLFFNSDGILLEGGRSNVFVKHRGQWLTPSLDLDILNGIMRQAVLDEPQKYLQTNQVIETHITQKTLQEAEEIRLSNALRGVFAAALA

SEQ ID NO: 25739 - protein, 458 aa, Neisseria meningitidis
MKHIHIIGIGGTFMGGIAAIAKEAGFEVSGCDAKMYPPMSTQLEALGIGVHEGFDAAQLEEFKADVYVIGNVAKRGMDVVEAILNRGLPYISGPQWLAENVLHHHWVLGVAGTHGKTTTASMLAWVLEYAGLAPGFLIGGVPENFSVSARLPQTPRQDPNSQSPFFVIEADEYDTAFFDKRSKFVHYRPRTVVLNNLEFDHADIFADLGAIQTQFHHLVRTVPSEGLIICNGQQQSLQDTLDKGCWTPVEKFGTEHGWQAGEANADGSFDVLLDGKTAGRVKWDLMGRHNRMNALAVIAAARHVGVGIQTACEALGAFKNVKRRMEIKGTANGITVYDDFAHHPTAIETTIEGLRQRVGNARILAVLEPRSNTMKLGTMKSALPVSLKEADQVFCYAGGVDWNVAEALAPLGGRLHVGKDFDAFVAEIVKNAEAGDHILVMSNGGFGGIHGKLLDALR

SEQ ID NO: 25740 - protein, 173 aa, Neisseria meningitidis; identical to SEQ ID NO: 6851

SEQ ID NO: 25741 - protein, 169 aa, Neisseria meningitidis; identical to SEQ ID NO: 18610

SEQ ID NO: 25742 - protein, 96 aa, Neisseria meningitidis
MAESKRVQRLLRVFIALDEHPIIGLSNKDLSVGLGLTPSQVSRDIDDLVASGLVIKLENGNYAYGIKTLQIAERFRRQHERLQSKIAEIGKRVNAD

SEQ ID NO: 25743 - protein, 622 aa, Neisseria meningitidis; identical to SEQ ID NO: 19142

SEQ ID NO: 25744 - protein, 163 aa, Neisseria meningitidis; identical to SEQ ID NO: 18129

SEQ ID NO: 25745 - protein, 77 aa, Neisseria meningitidis; identical to SEQ ID NO: 14102

SEQ ID NO: 25746 - protein, 101 aa, Neisseria meningitidis; identical to SEQ ID NO: 1118

SEQ ID NO: 25747 - protein, 455 aa, Neisseria meningitidis
MPDLHTEFSRLLPADEIAELSPTLLKDQRNRFTSAPDIILQPRSVESVQTIMRFCYEHRIPVTPQGGNTGLCGAAVSENGVLLNLSKLNRIRSINLSDNCITVEAGSVLQTVQQAAEASNRLFPLSLASEGSCQIGGNIACNAGGLNVLRYGTMRDLIIGLEVVLPNGELVSHLHPLHKNTTGYDLRHLFIGSEGTLGIITAATLKLFARPSDKATAWVGIPDIESAVRLLTETQAHFAERLCSFELVGRFAAELSSEFSKFPLPTHSEWHILLELTDSLPDSNLDDRLVEFLYKKGFTDSVLAQSEQERIHMWALRENISASQRKLGTSIKHDIAIPIGRVADFVRRCAKDLEQNFKGIQIVCFGHLGDGSLHYNTFLPEILSNEVYRYENDINDAVYRNVLACNGTIAAEHGIGIIKKQWLDKVRTPAEIALMKSIKQHLDPYNIMNPGKLLP

SEQ ID NO: 25748 - protein, 989 aa, Neisseria meningitidis; identical to SEQ ID NO: 19335

SEQ ID NO: 25749 - protein, 494 aa, Neisseria meningitidis; identical to SEQ ID NO: 19482

SEQ ID NO: 25750 - protein, 256 aa, Neisseria meningitidis
MEPERLQKVLAASGVGSRREMEEWINNGWVTVNGKTAQLGDKVTPDDHVTVKGSIIKLKWADRLPRIILYYKQEGEIVSRDDPQGRVSIFDRLPQAASSRWVAIGRLDINTSGLLILTTSGELVQRFAHPSFEVEREYAVRVLGGLTGEQMRVLTEEGVMLEDGLAKVERIREQGGEGANKWYNVVIKEGRNREVRRIFESQGLTVSRLVRVGFGPIGLPNRLKRGQFYELNPAEVANIIKWADMLLPGERRRKKA

SEQ ID NO: 25751 - protein, 65 aa, Neisseria meningitidis; identical to SEQ ID NO: 127

SEQ ID NO: 25752 - protein, 117 aa, Neisseria meningitidis; identical to SEQ ID NO: 18705

SEQ ID NO: 25753 - protein, 217 aa, Neisseria meningitidis
MKITHCKLKKKVQKELLRFFVLEVTARSAADILGIHPNSAALFYRKIRTVINHHLALAADEVFEGPVEPDESDFGGRRKGRRGRGAAGKVVVFGILKRNGRVYTVVVDNAKSETLLPVIKKKIMPDSIVYTDSLSSCDKLDVSGFIYYRINHSKEFADRQNHINGIENFWNQAKRVLRKYNGIDRKSFPLFLKECEFRFNFGTPSQQLKILRDWCGI

SEQ ID NO: 25754 - protein, 123 aa, Neisseria meningitidis; identical to SEQ ID NO: 1024

SEQ ID NO: 25755 - protein, 252 aa, Neisseria meningitidis
MNPKTPPDHTEDAVRLSKRMAQLGLCSRREADGYIEQGWVTVNGKTAVLGQKVSPADRIELNKKAHEQQAARITILLNKPVGYVSAQAEKGYKSAAELITPENHWEGDTSRIRFDPKHKIGLAPAGRLDIDSVGLLVLTQDGRIAKQLIGENSGSEKEYLVRVRGKLDEKGLALLNHGLSLDGEKLRPAQVEWQNEDQLRFVLKQGKKRQIRRMCELVGLRVVGLKRIRMGKVKLGRLPPGKWRYLAPGESF

SEQ ID NO: 25756 - protein, 316 aa, Neisseria meningitidis
LLNEAVDALAVREDGVYVDGTFGRGGHSRLILSRLGDAGRLIVFDKDPQAIAVAEELARSDKRVGVVHGGFASFQTALDGLGIGKVDGALFDLGISSPQIDDGSRGFSFRFDAPLDMRMDTTRGMSAAEWIAVASEQDLHEVIKNYGEERFSRQIARAIVAQRAESPIDTTRKLAQIVAQNVRTRERGQDPATRTFQAIRIFINRELEEVGAVLPQVMCRLKEGGRLAVIAFHSLEDRIVKQFVKKYSQHAPLPRWAAVREADLPEPPLKIAGRALKPGEAEIAANPRARSAVLRVAERTAGPIPEQSQRKTSEWQ

SEQ ID NO: 25757 - protein, 194 aa, Neisseria meningitidis; identical to SEQ ID NO: 15809

SEQ ID NO: 25758 - protein, 148 aa, Neisseria meningitidis; identical to SEQ ID NO: 4053

SEQ ID NO: 25759 - protein, 433 aa, Neisseria meningitidis; identical to SEQ ID NO: 2952

SEQ ID NO: 25760 - protein, 300 aa, Neisseria meningitidis
MDTAKKDILGSGWMLVAAVCFTIMNVLIKEASAKFALGSGELVFWRMLFSTVALGAAAVLRRDTFRTPHWKNHLNRSMVGTGAMLLLFYAVTHLPLATGVTLSYTSSIFLAVFSFLILKERISVYTQAVLLLGFAGVVLLLNPSFRSGQETAALAGLAGGAMSGWAYLKVRELSLAGEPGWRVVFYLSVTGVAMSSVWATLTGWHTLSFPSAVYLSCIGVSALIAQLSMTRAYKVGDKFTVASLSYMTVVFSALSAAFFLGEELFWQEILGMCIIILSGILSSIRPTAFKQRLQSLFRQR

SEQ ID NO: 25761 - protein, 242 aa, Neisseria meningitidis; identical to SEQ ID NO: 107

SEQ ID NO: 25762 - protein, 370 aa, Neisseria meningitidis; identical to SEQ ID NO: 852

SEQ ID NO: 25763 - protein, 172 aa, Neisseria meningitidis; identical to SEQ ID NO: 14215

SEQ ID NO: 25764 - protein, 154 aa, Neisseria meningitidis; identical to SEQ ID NO: 6562

SEQ ID NO: 25765 - protein, 119 aa, Neisseria meningitidis; identical to SEQ ID NO: 2176

SEQ ID NO: 25766 - protein, 459 aa, Neisseria meningitidis; identical to SEQ ID NO: 19288

SEQ ID NO: 25767 - protein, 1067 aa, Neisseria meningitidis
MAKFFIDRPIFAWVISIFIIAAGIFGIKSLPVSQYPSVAAPTITLHATYPGASAQVMEDSVLSVIERNMNGVEGLDYMSTSADSSGSGSVSLTFTPDTDENLAQVEVQNKLSEVLSTLPATVQQYGVTVSKARSNFLMIVMLSSDVQSTEEMNDYAQRNIVPELQRIEGVGQVRLFGAQRAMRIWVDPKKLQNYNLSFADIGSALSAQNVQISAGSIGSLPAVRGQTVTATVTAQGQLGTAEEFGNVILRANTDGSNVYLKDVARVGLGMEDYSSSTRLNGVNTTGMAVMLSNSGNAMATAKAVKERMATLEKYFPQGMSWKTPYDTSKFVEISIEKVIHTLIEAMVLVFVVMYLFLQNIRYTLIPTIVVPISLLGGFAFISYMGMSINVLTMFAMVLVIGIVVDDAIVVVENVERIMAGEGLPPKEATKKAMGQISGAVIGITAVLISVFVPLAMFSGATGNIYKQFALTMASSIAFSAFLALTLTPALCATMLKTIPKGHHEEKKGFFGWFNKKFNSWTHGYEGRVAKVLRKTFRMMVVYIGLAVVGVFLFMRLPTSFLPTEDQGFVMVSVQLPAGATQERTNATLAQVTQLAKSIPEIENIITVSGFSFSGSGQNMAMGFAILKDWNERTAPGSDAVAIAGKLTGMMMGTLKDGFGIAVVPPPILELGNGSGLSINLQDRNNTGHTALLAKRNELIQKMRASGLFDPSTVRAGGLEDSPQLKIDINRAAAAAQGISFADIRTALASALSSSYVSDFPNQGRLQRVMVQADEDARMQPADILNLTVPNKSGVAVPLSTIATVSWENGTEQSVRFNGYPSMKLSASPATGVSTGQAMAAVQKMVDELGGGYSLEWGGQSREEAKGGSQTLILYGLAVAAVFLVLAALYESWSIPLAVILVIPLGLIGAAAGVTGRNLFEGLLGSVPSFANDIYFQVGFVTVMGLSAKNAILIIEFAKDLQAQGKSAVEAALEAARLRFRPIIMTSFAFILGVVPLYIAGGASSASQRAIGTTVFWGMLIGTLLSVFLVPLFYVVVRKFFKETAYEHEMAIRHASEAGITGSNDSQH

SEQ ID NO: 25768 - protein, 392 aa, Neisseria meningitidis; identical to SEQ ID NO: 276

SEQ ID NO: 25769 - protein, 395 aa, Neisseria meningitidis; identical to SEQ ID NO: 1108

SEQ ID NO: 25770 - protein, 192 aa, Neisseria meningitidis; identical to SEQ ID NO: 746

SEQ ID NO: 25771 - protein, 534 aa, Neisseria meningitidis
MQFGAKPLFENVSVKFGEGSRYGLIGANGSGKSTFMKILGGDLEQTAGEVAIENGVRLGKLRQDQFAYEDMRVLDVVMMGHTEMWAAMTERDAIYANPEATEDDYMKAAELEAKFAEYDGYTAEARAAELLSGVGISEDLHNAKMAEVAPGFKLRVLLAQALFSKPDVLLLDEPTNNLDINTIRWLEGVLNQYDSTMIIISHDRHFLNEVCTHMADLDYNTITIYPGNYDDYMLASAQSRERALKDNAKAKEKLQELQEFVARFSANKSKARQATSRLKQADKIKSEMVEVKPSTRQNPYIRFEADEKAKLHRQAVEVEKLAKRFETQLFKNLNFILEAGQRLAIIGPNGAGKSTLLKLLAGAYNPEYSDGLLPDEGSIKWAEKASVGYYPQDHENDFDVDMDLSEWMRQWGQEGDDEQVIRGTLGRLLFGSNDVVKKVKVLSGGEKGRMLYGKLLLLKPNVLVMDEPTNHMDMESIESLNMALEKYNGTLIFVSHDRQFVSSLATQIIELDGKGGYEHYLGDYESYLEKKGVA

SEQ ID NO: 25772 - protein, 56 aa, Neisseria meningitidis; identical to SEQ ID NO: 2971

SEQ ID NO: 25773 - protein, 306 aa, Neisseria meningitidis; identical to SEQ ID NO: 1708

SEQ ID NO: 25774 - protein, 525 aa, Neisseria meningitidis
MRANPKTQAMPSETISLMKTRSLISLLCLLLCSCSSWLPPLEERTESRHFNTSKPVRLDNILQIRHTPHTNGLSDIYLLNDPHEAFAARAALIESAEHSLDLQYYIWRNDISGRLLFNLVYLAAERGVRVRLLLDDNNTRGLDDLLLALDSHPNIEVRLFNPFVFRKWRALGYLTDFPRLNRRMHNKSFTADNRATILGGRNIGDEYFKVGEDTVFADLDILATGSVVGEVSHDFDRYWASHSAHNATRIIRSGNIGKGLQALGYNDETSRHALLRYRETVEQSPLYQKIQTGRIDWQSVQTRLISDDPAKGLDRDRRKPPIAGRLQDALKQPEKSVYLVSPYFVPTKSGTDALAKLVQDGIDVTVLTNSLQATDVAAVHSGYVKYRKPLLKAGIKLYELQPNHAVPATKDKGLTGSSVTSLHAKTFIVDGKRIFIGSFNLDPRSARLNTEMGVVIESPKIAEQMERTLADTTPKYAYRVTLDRHNRLQWHDPATRKTYPNEPEAKLWKRIAAKILSLLPIEGLL

SEQ ID NO: 25775 - protein, 524 aa, Neisseria meningitidis; identical to SEQ ID NO: 2756

SEQ ID NO: 25776 - protein, 449 aa, Neisseria meningitidis
MLNPSRKLVELVRILEEGGFIFSGDPVQATEALRRVDGSTEEKIIRRAEMIDRNRMLRETLERVRAGSFWLWVVAASMMFTAGFSGTYLLMDNQGLNFFLILAGVLGMNTLMLAVWLAMLFLRVKVGRFFSSPATWFRGKDPVNQAVLRLYADEWRQPSVRWKIGATSHSLWLCTLLGMLVSVLLLLLVRQYTFNWESTLLGDSSSVRLVEMLAWLPAKLGFPVPDARAVIEGRLNGNIADARAWSGLLVGSIACYGILPRLLAWVVCKILLKTSENGLDLEKPYYQAVIRRWQNKITDADTRRETVSAVSPKIILNDAPKWAVMLETEWQDGAWFEGRLAQEWLDKGVAANREQVAALEAELKQKPAQLLIGVRAQTVPDRGVLRQIVRLSEAAQGGAVVQLLAEQGLSDDLSEKLEHWRNALAECGAAWLEPDRAAQEGRLKTNDRT

SEQ ID NO: 25777 - protein, 220 aa, Neisseria meningitidis; identical to SEQ ID NO: 5269

SEQ ID NO: 25778 - protein, 66 aa, Neisseria meningitidis; identical to SEQ ID NO: 3561

SEQ ID NO: 25779 - protein, 404 aa, Neisseria meningitidis; identical to SEQ ID NO: 18892

SEQ ID NO: 25780 - protein, 103 aa, Neisseria meningitidis; identical to SEQ ID NO: 2548

SEQ ID NO: 25781 - protein, 478 aa, Neisseria meningitidis; identical to SEQ ID NO: 22965

SEQ ID NO: 25782 - protein, 39 aa, Neisseria meningitidis; identical to SEQ ID NO: 7406

SEQ ID NO: 25783 - protein, 140 aa, Neisseria meningitidis; identical to SEQ ID NO: 2533

SEQ ID NO: 25784 - protein, 111 aa, Neisseria meningitidis; identical to SEQ ID NO: 16634

SEQ ID NO: 25785 - protein, 716 aa, Neisseria meningitidis
MKTPLLKPLLITSLPVFASVFTAASIVWQLGEPKLAMPFVLGIIAGGLVDLDNRLTGRLKNIIATVALFTLSSLTAQSTLGTGLPFILAMTLMTFGFTILGAVGLKYRTFAFGALAVATYTTLTYTPETYWLTNPFMILCGTVLYSTAIILFQIILPHRPVQESVANAYDALGGYLEAKADFFDPDEAAWIGNRHIDLAMSNTGVITAFNQCRSALFYRLRGKHRHPRTAKMLRYYFAAQDIHERISSAHVDYQEMSEKFKNTDIIFRIHRLLEMQGQACRNTAQALRASKDYVYSKRLGRAIEGCRQSLRLLSDSNDNPDIRHLRRLLDNLGSVDQQFRQLQHNGLQAENDRMGDTRIAALETGSLKNTWQAIRPQLNLESGVFRHAVRLSLVVAAACTIVEALNLNLGYWILLTALFVCQPNYTATKSRVRQRIAGTVLGVIVGSLVPYFTPSVETKLWIVIASTTLFFMTRTYKYSFSTFFITIQALTSLSLAGLDVYAAMPVRIIDTIIGASLAWAAVSYLWPDWKYLTLERTAALAVCSNGAYLEKITERLKSGETGDDVEYRATRRRAHEHTAALSSTLSDMSSEPAKFADSLQPGFTLLKTGYALTGYISALGAYRSEMHEECSPDFTAQFHLAAEHTAHIFQHLPETEPDDFQTALDTLRGELDTLRTHSSGTQSHILLQQLQLIARQLEPYYRAYRQIPHRQPQNAA

SEQ ID NO: 25786 - protein, 1816 aa, Neisseria meningitidis
MKTKRFKINAISLSIFLAYALTPYSEAALVRDDVDYQIFRDFAENKGKFFVGATDLSVKNKQGQNIGNALSNVPMIDFSVADVNRRTLTVIDPQYAVSVKHVKGDEISYYGHHNGHLDVSNDENEYRSVAQNDYEPNKNWHHGNQGRLEDYNMARLNKFVTEVAPIAPTSAGGGVETYKDKNRFSEFVRVGAGTQFEYNSRYNMTELSRAYRYAIAGTPYQDVNVTSNLNQEGLIGFGDNSKHHSPKKLKEVLSQNALTNYAVLGDSGSPLFAYDKQEKRWVFLGAYDYWAGYQKNSWQEWNIYKKEFADKIKQRDNAGTIKGNGKHHWNITSGTNSHIGSTAVRLANNERDANNGQNVTFEDNGTLVLDQNINQGAGGLFFKGDYTVKGANNDITWLGAGIDVADGKKVVWQVKNPNGDRLAKIGKGTLEVNGTGVNQGQLKVGDGTVILNQQADADKKVQAFSQVGIVSGRGTLVLNSSNQINPDNLYFGFRGGRLDANGNDLTFEHIRNVDEGARIVNHNTDHASTITLTGKSLITDPKTISIHYIQNNDDDDNGYYYYRPRKPIPQGKDLYYKNYRYYALKSGGSVNAPMPENGQTENNDWVFMGYKQEEAQKNAMNHKNNQRISGFSGFFGEENGKGHNGALNLNFNGKSAQNRFLLTGGTNLNGKISVTQGNVLLSGRPTPHARDFVNKSSARKDAHFSKNNEVVFEDDWINRTFKATEIAVNQSASFSSGRNVSNITANITATDNAKVNLGYKNGDEVCVRSDYTGYVTCNTDNLSDKALNSFGATQINGNVNLSQNAALVLGKAALWGQIQGQGNSSVSLNQHSKWHLTGDSQVHNLSLADSHIHLNNASDAQSANKYHTLKINHLSGNGHFHYLTHLAKNLGDKVLVKESASGHYQLHVQDKTGEPNQEGLNLFDASSVQDRSHLSVSLANNHVDLGALRYTIKTENGITRLYNPYAENRRRVKPAPSPATNTASQAQKATQTDGAQIAKPQNIVVAPPSPQANQAEEAKRQQAKAEQVKRQQAEAERKSAELAKQKAEAEREARELATRQKAEQERSSAELARRHEKEREAAELSAKQKVEAEREAQALAVRRKAEAEEAKRQAAELARRHEKEREAAELSAKQRVGEEERRQTAQSQPQRRKRRAAPQDYMAASQDRPKRRGHRSVQQNNVEIAQAQAELVRRQQEERKAAELLAKQRAEAEREAQALAARRKAEAEEAKRQAAELAHRQEAERKAAELSANQKAAAEAQALAARQQKALARQQEEARKAAELAVKQKAETERKTAELAKQRAAAEAAKRQQEARQTAELARRQEAERQAAELSAKQKAETDREAAESAKRKAEEEEHRQAAQSQPQRRKRRAAPQDYMAASQNRPKRRGRRSTLPAPPSPSFDSSAYAAPRALHNPDWYENDYEEIPLDALEDENVSESVDTSDKQPQDNTELHEKYENDYEEIPLDALEDEDVSESVDTSDKQPQDNTELHEKVETVSLQPRAAQPRAQAATQPQAQAAAQADAVSTNTNSALSDAMASTQSILLDTGASLTRHIAQKSRADAEKNSVWMSNIGYGRDYASAQYRRFSSKRTQTQIGIDRSLSENMQIGGVLTYSDSQHTFDQASGKNTFVQANLYGKYYLNDAWYVAGDIGAGSLRSRLQTQQKANFNRTSIQTGLTLGNTLKINQFEIVPSAGIRYSRLSSADYKLGNDSVKVSSMSVKTLTAGLDFAYRFKVGNLTVKPLLSAAYFANYGKGGVNVGGNSFAYKADNQQKYSAGAALLYRNVTLNVNGSITKGKQLEKQKSGQIKIQIRF

SEQ ID NO: 25787 - protein, 240 aa, Neisseria meningitidis; identical to SEQ ID NO: 1969

SEQ ID NO: 25788 - protein, 701 aa, Neisseria meningitidis
LTLYAVEELNYDKLDSQKRRRFLGISYSKAHDTTTQVMKTALPSRVVAESANLQSGWDTKLQGTQFETTLGGATIRAGVGEQARADAKIILEGIKTTIHNETVSSSKSALWQKQAGRGSNIETLQLPSFTGPVAPVLSAPGGYIADIPKGNLKTEIEKLAKQPEYAYLKQLQVAKNINWNQVQLAYDKWDYKQEGMTPAAAAVVVIVVTVLTYGALSAPAAAGTAGAAGAGAGGAAAGTAAGTGVAAGTAATTGVAAGTSAAAITTAAGKAALASLASQAAVSLINNKGDINHTLKELGKSSTVRQAATAAVTAGVLQGISGLNTQAAEAVSKHFHSPAAGKLTANLINSTAAASVHTAINGGSLKDNLGDAALGAIVSTVHGEVASKIKFNLSEDYIAHKIAHAVAGCASAVANKGKCRDGAIGAAVGEMVGETLLDGRDVGKLSPQERQKVIAYSQIIAGSVVALVKGDVNTAANAATVAVENNSLLARRRVNIRWTPRQELEHEYAILEIQAITNQIRRLDPKFNGIAILRTPGEPWTRHDVQTYRQYYNQLRESRGFAVDPIYRIRINNGNEFNRIMSSKYPYNELYVANPKSATGYFRVDSYNPATEEIISRKFTQFSQIQESTGIGYIKEAVRKYSPGAVISNVPSTPTTIRGRKLEGKLILEVPAQVNPIPQSVLRAAQEENVIIRDTTGRIYK

SEQ ID NO: 25789 - protein, 91 aa, Neisseria meningitidis; identical to SEQ ID NO: 1961

SEQ ID NO: 25790 - protein, 169 aa, Neisseria meningitidis; identical to SEQ ID NO: 2049

SEQ ID NO: 25791 - protein, 351 aa, Neisseria meningitidis; identical to SEQ ID NO: 15425

SEQ ID NO: 25792 - protein, 467 aa, Neisseria meningitidis
MDTTLKTTLTSVAAAFALSACTMIPQYEQPKVEVAETFKNDTADSGIRAVDLGWHDYFADPRLQKLIDIALERNTSLRTAVLNSEIYRKQYMIERNNLLPTLAANANDSRQGSLSGGNVSSSYKVGLGAASYELDLFGRVRSSSEAALQGYFASTANRDAAHLSLIATVAKAYFNERYAEEAMSLAQRVLKTREETYKLSELRYKAGVISAVALRQQEALIESAKADYAHAARSREQARNALATLINQPIPDDLPAGLPLDKQFFVEKLPAGLSSEVLLDRPDIRAAEHALKQANANIGAARAAFFPSIRLTGTVGTGSAELGGLFKSGTGVWSFAPSITLPIFTWGTNKANLDVAKLRQQAQIVAYESAVQSAFQDVANALAAREQLDKAYDALSKQSRASKEALRLVGLRYKHGVSGALDLLDAERSSYAAEGAALSAQLTRAENLADLYKALGGGLKRDTQTDK

SEQ ID NO: 25793 - protein, 210 aa, Neisseria meningitidis; identical to SEQ ID NO: 48

SEQ ID NO: 25794 - protein, 394 aa, Neisseria meningitidis; identical to SEQ ID NO: 277

SEQ ID NO: 25795 - protein, 321 aa, Neisseria meningitidis; identical to SEQ ID NO: 4056

SEQ ID NO: 25796 - protein, 447 aa, Neisseria meningitidis; identical to SEQ ID NO: 19427

SEQ ID NO: 25797 - protein, 41 aa, Neisseria meningitidis; identical to SEQ ID NO: 6068

SEQ ID NO: 25798 - protein, 209 aa, Neisseria meningitidis; identical to SEQ ID NO: 1847

SEQ ID NO: 25799 - protein, 351 aa, Neisseria meningitidis; identical to SEQ ID NO: 1414

SEQ ID NO: 25800 - protein, 314 aa, Neisseria meningitidis; identical to SEQ ID NO: 18168

SEQ ID NO: 25801 - protein, 209 aa, Neisseria meningitidis; identical to SEQ ID NO: 4591

SEQ ID NO: 25802 - protein, 467 aa, Neisseria meningitidis; identical to SEQ ID NO: 18280

SEQ ID NO: 25803 - protein, 226 aa, Neisseria meningitidis; identical to SEQ ID NO: 1949

SEQ ID NO: 25804 - protein, 794 aa, Neisseria meningitidis; identical to SEQ ID NO: 19836

SEQ ID NO: 25805 - protein, 337 aa, Neisseria meningitidis; identical to SEQ ID NO: 263

SEQ ID NO: 25806 - protein, 161 aa, Neisseria meningitidis
MIQIGIIMGSNSDWPVMRQAAQFLEEFGVEYEARVVSAHRTPDLMFQYAETARERGIKAIIAGAGGAAHLPGMVAAKTTVPVLGVPVPSKYLRGEDSLLSIVQMPKGVPVATFAIGEAGAANAALFAVSMLANETPELAQKLADFRAKQEQAVLSMELEQI

SEQ ID NO: 25807 - protein, 395 aa, Neisseria meningitidis; identical to SEQ ID NO: 18316

SEQ ID NO: 25808 - protein, 558 aa, Neisseria meningitidis
MSFKTDAEIAQSSTMRPIGEIAAKLGLNADNIEPYGHYKAKINPAEAFKLPQKQGRLILVTAINPTPAGEGKTTVTIGLADALRHIGKDAVIALREPSLGPVFGVKGGAAGGGYAQVLPMEDINLHFTGDFHAIGAANNLLAAMLDNHIYQGNELNIDPKRVLWRRVVDMNDRQLRNIIDGMGKPVDGVMRPDGFDITVASEVMAVFCLAKDISDLKERLGNILVAYAKDGSPVYAKDLKAHGAMAALLKDAIKPNLVQTIEGTPAFVHGGPFANIAHGCNSVTATRLAKHLADYAVTEAGFGADLGAEKFCDIKCRLADLKPDAAVVVATVRALKYNGGVERANLGEENLDALAKGLPNLLKHISNLKNVFGLPIVVALNRFVSDSDAELAMIEKACAEHGVEVSLTEVWGKGGAGGADLAHKVVNAIENQPNNFNFAYDVELGIKDKIRAIAQKVYGAEDVDFSAEASAEIASLEKLGLDKMPICMAKTQYSLSDNAKLLGCPEGFRIAVRGITVSAGAGFIVALCGNMMKMPGLPKVPAAEKIDVDEHGVIHGLF

SEQ ID NO: 25809 - protein, 310 aa, Neisseria meningitidis; identical to SEQ ID NO: 8806

SEQ ID NO: 25810 - protein, 335 aa, Neisseria meningitidis
MSTFFQQTAQAMIAKHINRFPLLKLDQVIDWQPIEQYLNRQRTRYLRDHRGRPAYPLLSMFKAVLLGQWHSLSDPELEHSLITRIDFNLFCRFDELSIPDYSTLCRYRNWLAQDDTLSELLKLINCQLTEKGLKVEKASAAVVDATIIQTAGSKQRQAIEVDEEGQISGQTTPSKDSDARWIKKNGLYKLGYKQHTRTDAEGYIEKLHITPANAHECKHLPPLLEGLPKGTTVYADKGYDSAENRQHLEERQLLDGIMRKACRNRPLTETQTKHNRYLSKIRYVVEQSFGTLHRKFRYARAAYFGLIKVSAQSHLKAMCLNLLKAANRLSAPAAA

SEQ ID NO: 25811 - protein, 151 aa, Neisseria meningitidis; identical to SEQ ID NO: 6340

SEQ ID NO: 25812 - protein, 100 aa, Neisseria meningitidis; identical to SEQ ID NO: 1023

SEQ ID NO: 25813 - protein, 129 aa, Neisseria meningitidis
MWKITKEQGQDLSFATYCLLSAAINLQEFKLWLEKVVLDMPIDNIHFYIFDLIDLKEGVGDIYNILDFVPNSDLSKDQDDALTGIAFLRGIDVYDPPVSKEKALKALKKHPEIYQRFQHFFPFVELPPL

SEQ ID NO: 25814 - protein, 185 aa, Neisseria meningitidis; identical to SEQ ID NO: 19919

SEQ ID NO: 25815 - protein, 252 aa, Neisseria meningitidis
MITIRNVSYRIGTRPILDNVSLDIPEGGITALVGPNGAGKSTLFSFMARLRPLESGSIAYRGKNLACTPTAELAKTLSILTQENSIMSRITVRDLLMFGRYPYHQGRPTAECRRIVNGAIEEFHLQDFADRYLTELSGGQRQRAMIAMVFCQRTDYVLLDEPLNNLDMYHARSLMQILRRLTDEHKRTTVVVLHDINQAAAYADHVVAMKNGQVAMQGKPDDIFTAANIKTLFDMDVSVLDHQSKKLIVHHI

SEQ ID NO: 25816 - protein, 594 aa, Neisseria meningitidis; identical to SEQ ID NO: 19641

SEQ ID NO: 25817 - protein, 716 aa, Neisseria meningitidis
MLTDLEKNAIRDHYQNIGKNLPGFRPRASQREMIAAVANAFSRTLAREEGGEPPKREGESIAVIEGPTGVGKSLAYLLAGGIMAQTRGKRLIVSSATVALQEQLVDRDLPFLVEKSGLELSFALAKGRGRYLCPYKLYQLTQSNAQQNLLGFEAPAVLWDSKPKPEELKLLRDIADEFSARRFNGDRDTWPEKIDDAIWLKVTNDRHGCLKTACPNRPECPFYLARDVLETVDVVVANHDLLLADISMGGGVILPAPENSFYCIDEAHHLPKKALSRFAAEHSWNIAVWTLEKLPQLTGKIAALTDKAELANLADEAAASLLDSLHEWQFHLAEEPSLSMGPSENDRRTNSEPTWLWEDGKIPEGLETTVSNTAIAARSLLKHVVGLNDALSAARREKEQDGALLDRLTGEFGIFIVRIEQISAVWDLLSTVPLEGEEPLAKWITRRADDKNDYIFNASPISSASHLANSLWRRAAGAVLTSATLQSLGNFNLMLRQTGLQWLPETTTLALKSPFDFEKQGELYIPPIYASPKDPEAHTAAVIEWLPKLISPTEAIGTLVLFSSRKQMQDVALRLPGDYLPLLLVQGELPKAVLLQKHHRAIEEGKASIIFGLDSFAEGLDLPGTACVQVIIAKLPFAMPDNPIEKTQNRWIEQRGGNPFIEITVPEAGIKLIQAVGRLIRTEQDYGRVTILDNRIKTQRYGQQLLAGLPPFKRIG

SEQ ID NO: 25818 - protein, 335 aa, Neisseria meningitidis; identical to SEQ ID NO: 19241

SEQ ID NO: 25819 - protein, 215 aa, Neisseria meningitidis; identical to SEQ ID NO: 1514

SEQ ID NO: 25820 - protein, 72 aa, Neisseria meningitidis; identical to SEQ ID NO: 18381

SEQ ID NO: 25821 - protein, 134 aa, Neisseria meningitidis; identical to SEQ ID NO: 18811

SEQ ID NO: 25822 - protein, 389 aa, Neisseria meningitidis; identical to SEQ ID NO: 19109

SEQ ID NO: 25823 - protein, 102 aa, Neisseria meningitidis; identical to SEQ ID NO: 427

SEQ ID NO: 25824 - protein, 296 aa, Neisseria meningitidis
MNSPFHNIGIVTRPNTPDIQDTAHTLITFLKQHGFTVYLDEVGIKEGCIYTQDTVGCHIVNKTELGQYCDLVAVLGGDGTFLSVAREIALRAVPIIGINQGHLGFLTQIPREYMTDKLLPVLEGKYLAEERILIEAALIRESKTAERAIALNDAVLSRGGAGQMIEFEVFVNREFVYTQRSDGLIVSTPTGSTAYSLAAGGPIMQAGLHAFTLVPICPQSMTNRPIAIPDTSEIEILVTQGGDARVHFDGQTHIDVQNLDRITIRRYRNPLRILHPTDYQYFKTLRQKLHWGEQLV

SEQ ID NO: 25825 - protein, 412 aa, Neisseria meningitidis
MAFYAFKAMRAAALAAAVALVLSSCGKGGDAAQGGQPAGREAPAPVVGVVTVHPQTVALTVELPGRLESLRTADVRAQVGGIIQKRLFQEGSYVRAGQPLYQIDSSTYEANLESARAQLATAQATLAKADADLARYKPLVAAEAVSRQEYDAAVTAKRSAEAGVKAAQAAIKSAGINLNRSRITAPISGFIGQSKVSEGTLLNAGDTTVLATIRQTNPMYVNVTQSASEVMKLRRQIAEGKLLAADGVIAVGIKFDDGTVYPEKGRLLFADPAVNESTGQITLRAAVPNDQNILMPGLYVRVLMDQVAVDNAFVVPQQAVTRGAKDTVMIVNAQGGMEPREVTVAQQQGTNWIVTSGLKDGDKVVVEGISIAGITGAKKVTPKEWAPSENQAAAPQSGVQTASEAKTASEAE

SEQ ID NO: 25826 - protein, 156 aa, Neisseria meningitidis
LNITVLAVGTKMPRWVDEAVAEYAKRFGRDVAYALKEIKPEKRGAGVNAAQGMAAEEKRILEAVPQGAFLVVLDERGKAPTSVELAEHLKSWRQNGEHVCFVIGGADGMTDRLKQQARMMMRLSSLTLPHGMVRVLLTEQLYRAVSILHNHPYHRE

SEQ ID NO: 25827 - protein, 1071 aa, Neisseria meningitidis; identical to SEQ ID NO: 19134

SEQ ID NO: 25828 - protein, 169 aa, Neisseria meningitidis; identical to SEQ ID NO: 219

SEQ ID NO: 25829 - protein, 103 aa, Neisseria meningitidis; identical to SEQ ID NO: 1558

SEQ ID NO: 25830 - protein, 261 aa, Neisseria meningitidis
VKHISSTNNEHIRHLHRLLSQGKFRRQYAQTVLEGVHLLQVFLQSGRKPVGVYIPEGKMPSEEVRRLRAVVPEGKVFSVSDGILKKISSLTCADDVLALIDIPDAGALPAGGDCVVLDGVQDPGNVGTVLRSAAAAGVGTVVLGRGCADAWSPKVLRAGMGAHFLSGIYPQADLEIWLARYKGRVFATALREEKQAVLYGEDLCGPTAWVFGNEGAGVGKAVLDRADKCVRIPMHDATESLNVAMAATICLFEQMRQRSAY

SEQ ID NO: 25831 - protein, 223 aa, Neisseria meningitidis; identical to SEQ ID NO: 934

SEQ ID NO: 25832 - protein, 481 aa, Neisseria meningitidis
MKLPIQKFMMLFAAAISLLQIPISHANGLDARLRDDMQAKHYEPGGKYHLFGNARGSVKNRVYAVQTFDATAVGPILPITHERTGFEGIIGYETHFSGHGHEVHSPFDNHDSKSTSDFSGGVDGGFTVYQLHRTGSEIHPEDGYDGPQGSDYPPPGGARDIYSYYVKGTSTKTKTNIVPQAPFSDRWLKENAGAASGFFSRADEAGKLIWESDPNKNWWANRMDDIRGIVQGAVNPFLMGFQGLGVGAITDSAVNPVTYAAARKTLQGIHNLGNLSPEAQLAAATALQDSAFAVKDSINSARQWADAHPNITATAQTALSVAEAATTVWGGKKVELNPTKWDWVKNTGYKKPAVRLMQTVDGEMAGGNKPPKPSTQQHSTHSDNNIGLPAPYVKPDTSISPTGTIYVDSKGNAIPTPIGGYITGSPDARFIQVRDSNGNLTGARIDDAHHANTHQDPRALTGHAHVPGVTNDDGTPWLPIK

SEQ ID NO: 25833 - protein, 655 aa, Neisseria meningitidis; identical to SEQ ID NO: 9708

SEQ ID NO: 25834 - protein, 176 aa, Neisseria meningitidis; identical to SEQ ID NO: 1829

SEQ ID NO: 25835 - protein, 213 aa, Neisseria meningitidis
MKAFTKITAIVAPLDRSNVDTDAIIPKQFLKSIKRSGFGPNAFDEWRYLDHGEPGMDNSKRPLNPDFSLNQPRYQGAQILLTRKNFGCGSSREHAPWALDDYGFRAVIAPSFADIFFNNCYKNGLLPIVLTEEQVDRLFKEVEANEGYRLSIDLAGQTLTTPGGETLAFDITEHRKHCLLNGLDEIGLTLQHADEIHAFEEKRRQSQPWLFNG

SEQ ID NO: 25836 - protein, 194 aa, Neisseria meningitidis
LYCLRLRRLVLIFVNPLYLHQFHETQVGSVKQLIAHFDRLIDELDKQIDDHTHTHFDGKAQVAEQIKGIGSITTATLMAMLPELGRLSHKRIASLAGIAPHPRESGETKFKSRCFGGKSAVRKALYMATVAATRFEPLIRDFYQRLPSEGKPYKVAVTACMRKLLTISNARMRDYFAENDTAENDTAENGIRTA

SEQ ID NO: 25837 - protein, 354 aa, Neisseria meningitidis
MEKEFRILNIVSAKIWGGGEQYVYDVSKALGLRGCTMFTAVNKNNELMHRRFSEVSSVFTTRLHTLNGLFSLCALTRFIRKNRISHLMIHTGKIAALSILLKKLTGVRLIFVKHNVVANKTDFYHRLIQKNTDRFICVSRLVYDVQTADNPFKEKYRIVHNGIDTGRFPPSQEKPDSRFFTVAYAGRISPEKGLENLIEACVILHRKYPQIRLKLAGHGHPDYMCRLKRDVSASGAEPFVSFEGFTEDIASFYRQSDVVVLPSLVPEAFGLSLCEAMYCRTAVISNTLGAQKEIIEHHQSGILLDRLTPESLADEIERLVLNPEAKNALATAGHQCVANRFTINHIADKLLDAI

SEQ ID NO: 25838 - protein, 69 aa, Neisseria meningitidis; identical to SEQ ID NO: 3057

SEQ ID NO: 25839 - protein, 196 aa, Neisseria meningitidis; identical to SEQ ID NO: 259

SEQ ID NO: 25840 - protein, 178 aa, Neisseria meningitidis; identical to SEQ ID NO: 2748

SEQ ID NO: 25841 - protein, 133 aa, Neisseria meningitidis; identical to SEQ ID NO: 2967

SEQ ID NO: 25842 - protein, 445 aa, Neisseria meningitidis; identical to SEQ ID NO: 19216

SEQ ID NO: 25843 - protein, 219 aa, Neisseria meningitidis; identical to SEQ ID NO: 8069

SEQ ID NO: 25844 - protein, 591 aa, Neisseria meningitidis; identical to SEQ ID NO: 15053

SEQ ID NO: 25845 - protein, 453 aa, Neisseria meningitidis; identical to SEQ ID NO: 18644

SEQ ID NO: 25846 - protein, 365 aa, Neisseria meningitidis
LAATLAGGFFLFTKDDFFLLWKSALTALGFASNLYFARGKDYFDPAQEEKPLLHIWSLSVEEQFYFVFPILLLLVARKSLRVQFGFLAALCALSLAASFIPSALDKYYLPHLRACELLIGSLTAVWMRYRQQRNLAVGKRYAAVGALFSACILSACLFAYSEQTAYFPGPAALIPCLAVAALIYFNHYEHPLKKFFQWKITVAAGLISYSLYLWHWPILAFMRYIGPDNLPPYSPAAAIVLTLAFSLISYHCIEKPFKKWKGSFAQSVLWIYALPMLILGAGSFFAMRLPFMAQYDRLGLTRSNTSCHNNTGKQCLWGDTEKQPELLVLGDSHADHYKTFFDAVGKKEKWSATMVSADACAYVEG

SEQ ID NO: 25847 - protein, 226 aa, Neisseria meningitidis; identical to SEQ ID NO: 19445

SEQ ID NO: 25848 - protein, 305 aa, Neisseria meningitidis; identical to SEQ ID NO: 19715

SEQ ID NO: 25849 - protein, 233 aa, Neisseria meningitidis; identical to SEQ ID NO: 4313

SEQ ID NO: 25850 - protein, 977 aa, Neisseria meningitidis
VPSSIKDKDREREYTHHPSRGGGGSVSFNNTDTLVSQQSGTAVFGTATYLPPYGKVSGFDTAKLTERNNAVNWIHTTHPGLIGYSYAGVVCRDSTGCPKLVYKTRFSFDNPDLAKTGGRLDRHTEPSRDNSPIYKLKDHPWLGVSFNLGSDNTVKNGKSSSKLISSFNENNNNQTIVSTTEGDPISLGDQQREHTAVVYYLNAKLHLLDKKQIQNITDKTVQLGVLKPSIDVKTQRTGIAGILAFHAQWDIKDTGQIPVKLGLQQVKAGRCINKPNPNPNKKDLSPALTAPALWFGPVQNGKVQMYSASVSTYPDSSSSRIFLQNLKRKTDPGRPGRYSLATLNKSDIESRKPTFTGRQTIIRLDGGVQQIKLDKSNEATGLNGNTNNNTFGIVKEYSVNPETNEWKKVLLPWTVRSFSNDNEFVKFNKESDKYSQRYRIRENGNNSKRDLGDIVNSPIVAVGGYLATSANDGMVHIFKKGNGGDDRNYSLKLSYIPGTMPRKDIESKDSNLAKELRTFAEKSYVGDRYGVDGGFVLRKVDNLNGQNRVFMFGAMGFGGRGAYALDLTKADGSDPTKASLFDVKDNGNNGNNRVELGYTVGTPQIGKTHDGKYAAFLASGYATKEINSTDNKTALYVYDLESSGTLIKKIDVPGGKGGLSSPTLVDKDLDGIVDIAYAGDRGGKMYRFDLSNQDSSQWTVRTIFEGTKPITSAPAISQLKDKRVVIFGTGSDLSEEDVDNNDIQSIYGIFDNDTDTGFAQDGLGKGLLEQKLEKDKDGKTLFLSDYKRSDGSGDKGWVVKLEAGQRVTVKPTVVLRTAFVTIHKYTGNDKCGAETAILGINTADGGKLTKKSARPIVPEANTAVAQYSGHKKTSSGKSIPIGCMEKGNETVCPNGYVYGKPVNVRYLDEKKTDGFSTTADGDAGGSGIDPAGKRSGKNNRCFSQKGVRTLLMNDLDSLDITGPTCGMKRISWREIFY

SEQ ID NO: 25851 - protein, 258 aa, Neisseria meningitidis
MKNWFAALLLAVPMGAAFASGGHAHYEKVDIDLRDQVSLQRGAQIFTNYCLSCHSASGMRFNRLKDIGLTDEEIKKNLMFTTDNVGDVMHSAMNPKDAAKWFGAAPPDLTLIARSKGADYLYAYMRGFYKDPTRPSGWNNTVFDKVGMPHPLWEQQGVQAVELDAKGQPVMVKDEHGEMKPKLYWESTGLHSRRLPNGKVIQKEYDAYVRDLVNYLVYMGEPAQLQRKRIGYVVMIFLFAVMLPLAYFLKKEYWKDVH

SEQ ID NO: 25852 - protein, 309 aa, Neisseria meningitidis; identical to SEQ ID NO: 176

SEQ ID NO: 25853 - protein, 287 aa, Neisseria meningitidis; identical to SEQ ID NO: 2947

SEQ ID NO: 25854 - protein, 122 aa, Neisseria meningitidis; identical to SEQ ID NO: 18664

SEQ ID NO: 25855 - protein, 841 aa, Neisseria meningitidis
MNPNSKHNTNFTNLLKPSDSDIKQFAAQHIRHLTDLLNRYAYEYYTLDAPSVPDAEYDKLFRELEALELNHPELKLPDSPTQRVGGEPLAGFAEVRHEVPMLSLTNAFSPQDENGVFDHAEMYAFDQRVRDGLDGGKPEYVIEPKFDGLAISLLYRDGVLVQAATRGDGTTGEDVTQNIKTVANIPLRLHGENTPELIEVRGEVLMQKADFAALNKRQAENGQKPFANPRNAAAGSLRQLDSRITAQRKLHFFPYSVARQQGGFVAEEHIQELAYFQALGFSLPNGNFGCFKNIDEVLAFYEQMQQKRPELPYEIDGMVVKVNSLAQQRELGFISRAPRWAIAHKFPAEEALTIVEAIDVQIGRTGAVTPVARLQPVFVGGVTVTNATLHNQDEVSRKDVRVGDTVVVRRAGDVIPEVVRVIFERRPMQETAVAVSDGIGHRQDDLFAETPSANQTQSVPLHKPYRLPTHCPICRSEIEREEGEAVARCSGGMLCQAQRAQGLIHFASRKAMDIDGLGEKQIEQLVAQDLVRHFADLYRLDIPTLQKMKETTDKTVAESDQTPSEGSSVGASGKHKKQPVKWAENILGGIESGKTPELARFLFALGIRHVGERTAKTLAQAFGTLERVRRAPEPVLACLPDIGTVVAHSIAHFFAQAEQQAMIDELLAAGVAPQTQAVTIPPARHAEPQRWIARLPDFKISENKAQALWELAGKNIEGLQNDKALPADWQAWRSEPQNAALLENLKTFFAQMPSEDEAAQGSDGINKAVAGKTFVLTGTLPTLKRDQAQSLIEAAGGKVSGSVSKKTDYVVAGEAAGSKLEKANALGVSVLSEAELLTLLG

SEQ ID NO: 25856 - protein, 312 aa, Neisseria meningitidis
MLELNGLCKRFGGKTVADNICLTVGRGKILAVLGRSGCGKSTLLNMIAGIVRPDGGEIQLNGENITRMPPEKRRISLMFQDYALFPHMSALENAAFGLKMQKMPKAETERLAMAALAEVGLENEAHRKPEKLSGGEKQRLALARALVVRPSLLLLDESFSSLDTHLRGTLRRMTAERIRNGGIPAVLVTHSPEEACTTADEIAVMHEGKILQYGTPETLVQTPADVQVARLMGLPNTDDDRHIPQHAVRFDQDGIACRVLSRTCLPESFSLSVLHPEHGILWLNLDMRHAGEISGNDTVHIRIEDREIVRFR

SEQ ID NO: 25857 - protein, 386 aa, Neisseria meningitidis; identical to SEQ ID NO: 3047

SEQ ID NO: 25858 - protein, 41 aa, Neisseria meningitidis; identical to SEQ ID NO: 2201

SEQ ID NO: 25859 - protein, 217 aa, Neisseria meningitidis; identical to SEQ ID NO: 8419

SEQ ID NO: 25860 - protein, 148 aa, Neisseria meningitidis; identical to SEQ ID NO: 14771

SEQ ID NO: 25861 - protein, 110 aa, Neisseria meningitidis; identical to SEQ ID NO: 18880

SEQ ID NO: 25862 - protein, 418 aa, Neisseria meningitidis; identical to SEQ ID NO: 18725

SEQ ID NO: 25863 - protein, 92 aa, Neisseria meningitidis; identical to SEQ ID NO: 32

SEQ ID NO: 25864 - protein, 76 aa, Neisseria meningitidis; identical to SEQ ID NO: 374

SEQ ID NO: 25865 - protein, 214 aa, Neisseria meningitidis; identical to SEQ ID NO: 18686

SEQ ID NO: 25866 - protein, 661 aa, Neisseria meningitidis
MAKNNQYSESSITVLKGLEPVKERPGMYTRTDSPTHICQEVIDNAADEALGGFATAIDVQIHEDGSLSVRDNGRGIPVGLHPEEGVPVVELVFTRLHAGGKFNKKDGGSAYAFSGGLHGVGVSVTNALSTRLEVTVKREGKIHRIVFAGGDVVEPLAQVGKCAVKDSGTEVRVWPDGKYFESPNYSIPELERLLRAKAVLLPGVRVSLTRPVKGEDEAHTQTWHYPDGLKSYLTDLIADAQEAVPLFSCENYISDEHNGDFSIGEGAAFALTWLEEGSCANESYVNLIPTPLGGTHEAGLKQAVFNAVNNFINLHNLLPRGVKVQSDDVFGKTAFVLSARVLDPQFQGQTKDKLTNRDALKLVAAVAGDPLELWLNQNVDFGKKIAELAIRQAQARMRSVKKIEKKKGSGVAVLPGKLTDCESEDIRENELFLVEGDSAGGSAKLARDKATQAILPLRGKVLNSFEVHPDQLFGNAEIHDISVAIGVDPHGINDHPDLSGLRYGKIAILSDADVDGSHIQVLLLTLFYRHFPKLVADGHIYVAQPPLFRVDVNAQGKSKPARKFYALDQNELDGILERLQKEGVKETAYSISRFKGLGEMNPDQLKDTTMHPDTRRLLQVQIPEGADDETRDIFVKLMGKGEAAARRAWMEREGDTAELDI

SEQ ID NO: 25867 - protein, 414 aa, Neisseria meningitidis; identical to SEQ ID NO: 18692

SEQ ID NO: 25868 - protein, 461 aa, Neisseria meningitidis
MVSIFDIFKIGIGPSSSHTVGPMKAAAAFAAGLDAQAVRIVIDIYGSLALTGYGHGTFDALMLGLEGSLPHDIPLAGIPERLERIRTQHILRLNGQEIRFIPDRDLNIRGNQVLPKHPNGLRFTAYASDGIVLKEQVYYSTGGGFVVTGEDFERQSETEKTVPYPYNSCAELLDRCRLNRLDISEVVLANEAALAGCGEAEIRRRAAAVAEVMEGCIKRGLGADGELPGGLNVRRRAPQLAAKLKVLRETEIVNTQLWPMVYAMAVNEENAAGGRVVTAPTNGAAGIIPAVLHYFRKFNPHATQERVENFLLTAGAIGILYKTNASISGADVGCQGEVGVACSMAAGAYAEVIGGTPKQVENAAEMAMEHHLGLTCDPVGGLVQIPCIERNGIAAEKALKLGTLALLEDGTDKKVSLDEVIRTMLQTGRDMKATYKETSLAGLAATLRKKAVPVSVRVVEC

SEQ ID NO: 25869 - protein, 140 aa, Neisseria meningitidis; identical to SEQ ID NO: 4408

SEQ ID NO: 25870 - protein, 70 aa, Neisseria meningitidis; identical to SEQ ID NO: 18924

SEQ ID NO: 25871 - protein, 79 aa, Neisseria meningitidis; identical to SEQ ID NO: 1083

SEQ ID NO: 25872 - protein, 195 aa, Neisseria meningitidis; identical to SEQ ID NO: 3348

SEQ ID NO: 25873 - protein, 66 aa, Neisseria meningitidis; identical to SEQ ID NO: 421

SEQ ID NO: 25874 - protein, 451 aa, Neisseria meningitidis; identical to SEQ ID NO: 19945

SEQ ID NO: 25875 - protein, 417 aa, Neisseria meningitidis; identical to SEQ ID NO: 9265

SEQ ID NO: 25876 - protein, 124 aa, Neisseria meningitidis; identical to SEQ ID NO: 2472

SEQ ID NO: 25877 - protein, 268 aa, Neisseria meningitidis; identical to SEQ ID NO: 8872

SEQ ID NO: 25878 - protein, 429 aa, Neisseria meningitidis; identical to SEQ ID NO: 2821

SEQ ID NO: 25879 - protein, 119 aa, Neisseria meningitidis; identical to SEQ ID NO: 6320

SEQ ID NO: 25880 - protein, 469 aa, Neisseria meningitidis
MKYISTRGETAHKPFSEVLLMGLAPDGGLMLPEHYPQIGRETLDKWRGSAYPELAFEIMRLFVTDIPEDDLRDILNRTYTEAAFGTKEITPVRTLSDGIKIQALSNGPTLAFKDMAMQFLGNAFEYVLNKEGKKLNILGATSGDTGSAAEYALRGKKGVNVFMLSPDGKMSAFQRAQMYSLQDGNIHNIAVKGMFDDCQDIVKAVQNDAAFKEKYHIGTVNSINWGRIVAQVVYYFAGYFKATQSNDEQVSFCVPSGNFGNVCAGHIAKQMGLPIRRLIVATNENDVLDEFFKTGAYRPRNSAHTYVTSSPSMDISKASNFERFVFDLMDRDPQEINTLWAEVAAGKGFDLRFALEKVGGKYGFTSGKSTHPDRLATIRQVYEQDQELIDPHTADGVKVAREVREEGETVVCLETALAAKFDATIREAVGDAAIPRPAALEGLETLPQRVQTVPNSADAVKGIIEQTLA

SEQ ID NO: 25881 - protein, 361 aa, Neisseria meningitidis; identical to SEQ ID NO: 7621

SEQ ID NO: 25882 - protein, 375 aa, Neisseria meningitidis
MLECTANHRSGEIMSQTIDELLLPHRNAIDTIDAEILRLLNERAQHAHAIGELKGTGAVYRPEREVAVLRRIQDLNKGPLPDESVARLFREVMSECLAVERPLTIAYLGPQGTFTQQAAIKHFGHAAHTMACPTIDNCFKQVETRQADYLVAPVENSTEGSVGRTLDLLAVTALQACGEVVLRIHHNLLRKNNGSTEGIAKVFSHAQALAQCNDWLGRHLPNAERIAVSSNAEAARLVAESDDGTVAAIAGRTAAEIYGLDMVAECIEDEPNNTTRFLVMGHHETGASGSDKTSLAVSAPNRAGAVASLLQPLTESGISMTKFESRPSKSVLWEYLFFIDIEGHRRDAQIQTALERLGERASFVKVIGSYPTAVL

SEQ ID NO: 25883 - protein, 92 aa, Neisseria meningitidis; identical to SEQ ID NO: 600

SEQ ID NO: 25884 - protein, 238 aa, Neisseria meningitidis; identical to SEQ ID NO: 2994

SEQ ID NO: 25885 - protein, 95 aa, Neisseria meningitidis; identical to SEQ ID NO: 4938

SEQ ID NO: 25886 - protein, 451 aa, Neisseria meningitidis
MSEYTPQTAKQGLPALAKSTIWMLSFGFLGVQTAFTLQSSQMSRIFQTLGADPHSLGWFFILPPLAGMLVQPIVGHYSDRTWKPRLGGRRLPYLLYGTLIAVIVMILMPNSGSFGFGYASLAALSFGALMIALLDVSSNMAMQPFKMMVGDMVNEEQKGYAYGIQSFLANTGAVVAAILPFVFAYIGLANTAEKGVVPQTVVVAFYVGAALLVITSAFTIFKVKEYDPETYARYHGIDVAANQEKANWIELLKTAPKAFWTVTLVQFFCWFAFQYMWTYSAGAIAENVWHTTDASSVGYQDAGNWYGVLAAVQSVAAVICSFVLAKVPNKYHKAGYFGCLALGALGFFSVFFIGNQYALVLSYTLIGIAWAGIITYPLTIVTNALSGKHMGTYLGLFNGSICMPQIVASLLSFVLFPMLGGLQATMFLVGGVVLLLGAFSVFLIKETHGGV

SEQ ID NO: 25887 - protein, 207 aa, Neisseria meningitidis
MNQFELCQKEHVNPFALSKQYLLVVTFVKSSSKNFQAALLWARSAKLFENLEIGKETIYCCAFDKTAEQAGMAGVFLNYIENWNGKQIYINGRIHSGSIYDLLGVLDCYQKSQSCPNPKSHCCFVSDDIFLWHGSRPTFEISLDLTGKKKETSSAKKFVMPCINFRHHRIEKETYLGNWNEQIAALAVKQNIDWCPSFDIENFRQYE

SEQ ID NO: 25888 - protein, 389 aa, Neisseria meningitidis
MTAHKILPVLLSIILGVSHATAASPAPNKPAVHAAPTFQTPETLTAAHIVIDLQSKQILSAKNINTPVEPAALTQLMTAYLVFKNMKSGNIRSEENLKIPESAWASEGSRMFVRPGDTVSTDKLLKGMIALSANDAALTLVGRLGNGSIENFVQQMNKEARRLGMKNTVFKNPTGLSREGQVSTAKDLALLSEALMRDFPEYYPLFSIKSFKFKNIEQNNRNILLYRDNNVNGLKAGHTESGGYNLAVSYSGNGRHILVITLGSESAETRASDNSKLLNRALQAFDTPKIYPKGKTVAQIQISGGSKKTVRAGFLKEAYITLPHKEAKTTEQILETIQPIPAPVKKGQILGKIKIRQNGYTLAEKEIVALENVEKRSRWQRLWTRLTGQ

SEQ ID NO: 25889 - protein, 608 aa, Neisseria meningitidis
LGISRKISLILSILAVCLPMHAHASDLANDSFIRQVLDRQHFEPDGKYHLFGSRGELAERSGHIGLGNIQSHQLGNLFIQQAAIKGNIGYIVRFSDHGHEVHSPFDNHASHSDSDEAGSPVDGFSLYRIHWDGYEHHPADGYDGPQGGGYPAPKGARDIYSYDIKGVAQNIRLNLTDNRSTGQRLADRFHNAGAMLTQGVGDGFKRATRYSPELDRSGNAAEAFNGTADIVKNIIGAAGEIVGAGDAVQGISEGSNIAVMHGLGLLSTENKMARINDLADMAQLKDYAAAAIRDWAVQNPNAAQGIEAVSNIFTAVIPVKGIGAVRGKYGLGGITAHPVKRSQMGAIALPKGKSAVSNNFADAAYAKYPSPYHSRNIRSNLEQRYGKENITSSTVPPSNGKNVKLADQRHPKTGVPFDGKGFPNFEKHVKYDTKLDIQELSGGGIPKAKPVFDAKPRWEVDRKLNKLTTREQVEKNVQEIRNGNKNSNFSQHAQLEREINKLKSADEINFADGMGKFTDSMNDKAFSRLVKSVKENGFTNPVVEYVEINGKAYIVRGNNRVFAAEYLGRIHELKFKKVDFPVPNTSWKNPTDVLNESGNVKRPRYRSK

SEQ ID NO: 25890 - protein, 327 aa, Neisseria meningitidis
MSEIKTDDPKRGIKLRGADKTARIPIKVVPLQEKLKKPEWIRAKLPSRKFFEIKDILREQKMHTVCEEASCPNIGECFSKGTATFMIMGDICTRRCPFCDVGHGRPNMLDPDEPKNLAESVKAMNLRYVVITSVDRDDLRDGGAQHFADCIKAIRETSPNTKIEILVPDFRGRLDIALKILAETPPDVMNHNLETHPSLYRKARPGANYQHSLDLLKRYKEMMPHIPTKSGIMVGLGETDEDVREIMRDMRAHNIEMITIGQYLQPSDGHLPVLRYVTPEQFKIFEKEAYELGFSNAAIGAMVRSSYHADEQATEALRESHGGCGHH

SEQ ID NO: 25891 - protein, 616 aa, Neisseria meningitidis; identical to SEQ ID NO: 18186

SEQ ID NO: 25892 - protein, 291 aa, Neisseria meningitidis; identical to SEQ ID NO: 14774

SEQ ID NO: 25893 - protein, 224 aa, Neisseria meningitidis; identical to SEQ ID NO: 18482

SEQ ID NO: 25894 - protein, 42 aa, Neisseria meningitidis; identical to SEQ ID NO: 19082

SEQ ID NO: 25895 - protein, 346 aa, Neisseria meningitidis; identical to SEQ ID NO: 19638

SEQ ID NO: 25896 - protein, 328 aa, Neisseria meningitidis; identical to SEQ ID NO: 372

SEQ ID NO: 25897 - protein, 343 aa, Neisseria meningitidis; identical to SEQ ID NO: 614

SEQ ID NO: 25898 - protein, 77 aa, Neisseria meningitidis; identical to SEQ ID NO: 19615

SEQ ID NO: 25899 - protein, 197 aa, Neisseria meningitidis; identical to SEQ ID NO: 2603

SEQ ID NO: 25900 - protein, 419 aa, Neisseria meningitidis; identical to SEQ ID NO: 18862

SEQ ID NO: 25901 - protein, 915 aa, Neisseria meningitidis
MQQQHLFRLNILCLSLMTALPVYAENVQAGQAQEKQLDTIQVKAKKQKTRRDNEVTGLGKLVKTADTLSKEQVLDIRDLTRYDPGIAVVEQGRGASSGYSIRGMDKNRVSLTVDGLAQIQSYTAQAALGGTRTAGSSGAINEIEYENVKAVEISKGSNSVEQGSGALAGSVAFQTKTADDVIGEGRQWGIQSKTAYSGKNRGLTQSIALAGRIGGAEALLIHTGRRAGEIRAHEDAGRGVQSFNRLVPVEDSSNYAYFIVKEECESGNYETCKSKPKKDIVGKDERQTVSTRDYTGPNRFLADPLSYESRSWLFRPGFRFENKRHYIGGILEHTQQTFDTRDMTVPAFLTKAVFDANKKQAGSLSGNGKYAGNHKYGGLFTNGENGALVGAEYGTGVFYDETHTKSRYGLEYVYTNADKDTWADYARLSYDRQGIGLDNHFQQTHCSADGSDKYCRPSADKPFSYYKSDRVIYGESHRLLQAAFKKSFDTAKIRHNLSVNLGFDRFGSNLRHQDYYHQNAKRAYSSNLPTQNGNQKISPNGSTSTPYWVSIGRGNVVTEQICRLGNNTYTDCTPRSINGKSYYAAVRDNVRLGRWADVGAGLRYDYRSTHSDDGSVSTGTHRTLSWNAGIVLKPADWLDLTYRTSTGFRLPSFAEMYGWRAGVQSKAVKIDPEKSFNKEAGIVFKGDFGNLEASWFNNAYRDLIVRGYEAQIKNGKEEAKGDPAYLNAQSARITGINVLGKIDWNGVWDKLPEGWYSTFAYNRVHVRDIKKRADRTDIQSHLFDAIQPSRYVVGLGYDQPEGKWGVNGMLTYSKAKEITELLGSRALLNGNSRNTKATARRTRPWYIVDVSGYYTIKKHFTLRAGVYNLLNYRYVTWENVRQTAGGAVNQHKNVGVYNRYAAPGRNYTFSLEMKF

SEQ ID NO: 25902 - protein, 761 aa, Neisseria meningitidis; identical to SEQ ID NO: 19322

SEQ ID NO: 25903 - protein, 508 aa, Neisseria meningitidis; identical to SEQ ID NO: 9065

SEQ ID NO: 25904 - protein, 255 aa, Neisseria meningitidis
MSSNKASFFTRLRRLCRLTVWLFKTGKNLRGIDGGCPESRNRAVIELGRGALAALDIGLEVGRPTPEHPNGVLVAANHVSWLDIFAMSAVYPSSFIAKQEIKSWPVLGKMGQNAGTVFINRNSRRDIEPINRAVCETLQRGQNVSFFPEARTSSGLGLLPFKAALFQSAIDAGAKVLAVALRYYDETGKRTARPSYADVGLPICLWRIVSMKKLTIKVDFVCVADAAESEDRYALKDKIEESIRAVVADDADIAV

SEQ ID NO: 25905 - protein, 766 aa, Neisseria meningitidis
MHRPTAKQILHEVFGYPEFRGRQEAVINTLAGGGSLTVLMPTGGGKSLCYQIPALMREGVAVVVSPLIALMNDQVANLHAAGIEAAAVNSSTSADGAREIADKLAQGRLKLLYVAPERLVTDRFLRFLDQQTVSLFAIDEAHCVSQWGHDFRPEYQQLGMLAERYPNVPRIALTATADAATRADIKHYLHLDDAPEFISSFDRPNIYYQVIEKNNGKKQLLEFIRKEMTGQSGIVYCLSRKKVEDVAQFLRENGLNAIPYHAGLSMDVREENQRRFTREDNIIVVATVAFGMGIDKPDVRFVAHLDMPQSVEHFYQESGRAGRDGLPAVSWLCYGLNDWVLLHERIAEGNSDEVQKQIEMQKLDAMLAVCETAACRRVLLLKHFGEASEPCGHCDNCLHPPVRFDGTVLVQKLLSCVYRAGQRFAAGYITNLLRGKSDDWIRGNRHEQLSTFGIGTELSNKEWRSVIRQCISLGYLTVNITRYQALQLTEAAKKVLKGETEVMLRPLKRDKPAARTLKDNWLRTEREERLWQALRVWRMKQAEAEGIPAYMIFGDKTLRDLVEKMPQDLNGLHDIYGLGEAKIDRFGHGILEVCRNAADFSHDAVIRPQTEREQQLRQKLEAWRYEQARAENCALHAVLSDESLADMLAATPETETDLEGVHGLGSVRAAKYGRDILAVCRPFSDGIDEAAKHKRRLMRALIQWCGETAKHEQSEPYRILSKAALRAIAAKQPEGLAELAAVYGVGEEKAARYGAAVLAVLERNAV

SEQ ID NO: 25906 - protein, 304 aa, Neisseria meningitidis; identical to SEQ ID NO: 745

SEQ ID NO: 25907 - protein, 78 aa, Neisseria meningitidis
MRKACRNRPLSETQTKRNRYLSKTRYVVEQSFGTLHRKFRYARAAYFGLIKVSAQSHLKAMCLNLLKAANRLSAPAAA

SEQ ID NO: 25908 - protein, 340 aa, Neisseria meningitidis
LSYRDAGVDIDAGDQLVENIKPFAKRTMRPEVLGDLGGFGALVEIGKKYKNPVLVSGTDGVGTKLKLAFDWDKHDMVGIDLVAMSVNDILVQGAEPLFFLDYFACGKLDVPRATDVIKGIAQGCEESGCALIGGETAEMPGMYPVGEYDLAGFAVGVVEKENVITGRSIGAGDVVLGLASNGAHSNGYSLIRKIIERDNPDLDAEFDNGKTLREAVIAPTRLYVKPILAALEKFTIKGMAHITGGGITENVPRVLPENTVAQIDAKSWELPKLFQWLQKAGNVETQEMYRTFNCGIGMVVIVAAEDADAVQGLLGEQGETVYRLGLIRERQGDEHQTQVA

SEQ ID NO: 25909 - protein, 41 aa, Neisseria meningitidis; identical to SEQ ID NO: 18046

SEQ ID NO: 25910 - protein, 52 aa, Neisseria meningitidis; identical to SEQ ID NO: 12591

SEQ ID NO: 25911 - protein, 324 aa, Neisseria meningitidis; identical to SEQ ID NO: 19538

SEQ ID NO: 25912 - protein, 475 aa, Neisseria meningitidis; identical to SEQ ID NO: 3229

SEQ ID NO: 25913 - protein, 275 aa, Neisseria meningitidis; identical to SEQ ID NO: 18182

SEQ ID NO: 25914 - protein, 130 aa, Neisseria meningitidis; identical to SEQ ID NO: 425

SEQ ID NO: 25915 - protein, 412 aa, Neisseria meningitidis; identical to SEQ ID NO: 2406

SEQ ID NO: 25916 - protein, 369 aa, Neisseria meningitidis
MKYKRIVFKVGTSSITHSDGSLSRGKIQTITRQLAALHHAGHELVLVSSGAVAAGFGALGFKKRPAKIADKQASAAVGQGLLMEEYTANLSSDGIVSAQILLNRTDFADKRRYQNAGGALSVLLQRRAIPIINENDTVSVEELKIGDNDTLSAQVAAMIQADLLVLLTDIDGLYTGNPNSNPDAVRLDRIEHINHEIIEMAGGAGSSNGTGGMLTKIKAATIATESGVPVYICSSLKPDALAEAADNQADGSFFVPRAKGLRTQKQWLAFYSESRGGVYVDEGAEHALSEQGKSLLMSGVAGIEGHFSRMDTVTVYSNATKQPLGKGRVLFGSAAAEDLLKSRKAKGVFIHRDDWISITPEIRLLLTEF

SEQ ID NO: 25917 - protein, 327 aa, Neisseria meningitidis
MKNFLSLFASILMSALIAVWFSQNPINAYWQQTYHRNSPLEPLAAYGWWRSGAALQENAYTFSDGIKAFLSGETPSTAQGGGSADMPSEAAASEAVPQTGKTEWKQDTEAAAVRSGDKVFFAGDSLMQGVAPFVQKSLKQQYGIESVNLSKQSTGLSYPSFFDWPKTIEETLKKHPEISVLAVFLGPNDPWDFPVGKRYLKFASDEWAQEYLKRVDRILEAAHTHRVQVVWLGIPYMKKAKLDGQMRYLDKLLSEHLEGKIILIPTAHTLSGGEDRYTDSVNVNGKPVRYRSKDGIHFTAEGQKLLAAKIMEKIVFEPSTQPSSTQP

SEQ ID NO: 25918 - protein, 211 aa, Neisseria meningitidis
LNIKYSGIENRFETAILKKNGVRYGFVSFAPNLAAVKLNDYAKVRKLITKTKQKADIVIVMFHGGAEGKQAEHLPFDTEIFYGENRGNVVEFARLAVDSGADVVFGQRPHVTRAVELYRDRFISYSGGNFATYGAINTSGISGIAPIFKIITDKQGRFVSGNIIPITQVGDKIPKIDPEKTVIGRIIYLNRSDFPKGNGLDVSPDGSITRR

SEQ ID NO: 25919 - protein, 115 aa, Neisseria meningitidis
MNKKYPKINYIGNKEKIASWICDQPPSDVDTVADVFSGGCSFAYEAKKRGYRVITNDILAINYQIALALIENNHETLNDDDVAMIFSGSPHAGFMSQRYAEKFYFHDECQQLDLY

SEQ ID NO: 25920 - protein, 120 aa, Neisseria meningitidis; identical to SEQ ID NO: 1496

SEQ ID NO: 25921 - protein, 150 aa, Neisseria meningitidis; identical to SEQ ID NO: 13725

SEQ ID NO: 25922 - protein, 37 aa, Neisseria meningitidis; identical to SEQ ID NO: 6771

SEQ ID NO: 25923 - protein, 178 aa, Neisseria meningitidis; identical to SEQ ID NO: 5654

SEQ ID NO: 25924 - protein, 122 aa, Neisseria meningitidis; identical to SEQ ID NO: 848

SEQ ID NO: 25925 - protein, 57 aa, Neisseria meningitidis; identical to SEQ ID NO: 735

SEQ ID NO: 25926 - protein, 131 aa, Neisseria meningitidis; identical to SEQ ID NO: 1281

SEQ ID NO: 25927 - protein, 159 aa, Neisseria meningitidis
MRKSRLSRYKQNKLIELFVAGVTARTAAELVGVNKNTAAYYFHRLRLLIYQNSPHLEMFDGKVEADESYFGGQRKGKRGRGAAGKVAVFGLLKRNGKVYTVTVPNSNRYFISYYPTSETQHCLYGLLSLCIRCARIPFLRNFVFVSITAHILLNDKTIL

SEQ ID NO: 25928 - protein, 130 aa, Neisseria meningitidis; identical to SEQ ID NO: 1661

SEQ ID NO: 25929 - protein, 149 aa, Neisseria meningitidis; identical to SEQ ID NO: 628

SEQ ID NO: 25930 - protein, 124 aa, Neisseria meningitidis; identical to SEQ ID NO: 6571

SEQ ID NO: 25931 - protein, 173 aa, Neisseria meningitidis
VKDSLMDAFDFFMQGNFKKIATEQGLDRKYFIFHYIVCNLSAISSFCLMKVIHSYTILCLLIMIIGIAFGFILRNRVLSIVKNKQNFLSDMFPLEMPFFSRVYKIPILARFLNRGMKWLYLQNFFCLVMICFSISLILNEERGWMPYFACYWFGLCYPVSTYYVFLSRDYKHI

SEQ ID NO: 25932 - protein, 145 aa, Neisseria meningitidis; identical to SEQ ID NO: 3684

SEQ ID NO: 25933 - protein, 56 aa, Neisseria meningitidis; identical to SEQ ID NO: 6169

SEQ ID NO: 25934 - protein, 144 aa, Neisseria meningitidis; identical to SEQ ID NO: 6

SEQ ID NO: 25935 - protein, 62 aa, Neisseria meningitidis; identical to SEQ ID NO: 18333

SEQ ID NO: 25936 - protein, 455 aa, Neisseria meningitidis
MQHLTERMTQIAKLLNSSANNPDIDIPDFLTEIKDYSEFSVTDENGTYLHWDKFRQIHTEDTRMKWRAVKESRKKIQKPIDFPFEHQFWFCIPDSLQARLHLIDKSCGSSIGTSSLGGFGRSEQNRFLLKSLIMEEAITSAQLEGAATTRKVAKDMLKSQRKPKTKDEIMIVNNYHLMKKAVELKNTPLSVEMILDLHRIATSNAIENKADPGQFRRDDEIFIADNDGNSLYQPPPHGQVHTLMEAVCTFANNTYDGVENPFIHPVVQAIILHFLIGYIHPFGDGNGRIARALFYWFMLKNSYWLFEYISISRLLKNAPAQYAKSYLYAETDDSDLTYFIYYQCDIIKRAVADLEHYISDKQKHQQEFKAAIAQYTEKIGKLNQRQIGILQKAVEESGKIFTALEIANQYGISLNTARSDLSKLGEYRFLVPFKSGNALEYVAPQDLLERLEKKN

SEQ ID NO: 25937 - protein, 96 aa, Neisseria meningitidis; identical to SEQ ID NO: 3692

SEQ ID NO: 25938 - protein, 41 aa, Neisseria meningitidis; identical to SEQ ID NO: 3182

SEQ ID NO: 25939 - protein, 69 aa, Neisseria meningitidis; identical to SEQ ID NO: 19611

SEQ ID NO: 25940 - protein, 69 aa, Neisseria meningitidis; identical to SEQ ID NO: 4226

SEQ ID NO: 25941 - protein, 72 aa, Neisseria meningitidis; identical to SEQ ID NO: 113

SEQ ID NO: 25942 - protein, 150 aa, Neisseria meningitidis; identical to SEQ ID NO: 7624

SEQ ID NO: 25943 - protein, 92 aa, Neisseria meningitidis; identical to SEQ ID NO: 1005

SEQ ID NO: 25944 - protein, 133 aa, Neisseria meningitidis; identical to SEQ ID NO: 6682

SEQ ID NO: 25945 - protein, 153 aa, Neisseria meningitidis; identical to SEQ ID NO: 7521

SEQ ID NO: 25946 - protein, 107 aa, Neisseria meningitidis
MFDGEVEADESYFGGQRKGKRGRGAAGKVAVFGLLKRNGKVYTVTVPNTQTATLFPIIREQVKPDSIVYTDCYRSYDVIRCERIPFLRNFVFVSITAHILPNDKTIL

SEQ ID NO: 25947 - protein, 52 aa, Neisseria meningitidis; identical to SEQ ID NO: 14117

SEQ ID NO: 25948 - protein, 142 aa, Neisseria meningitidis; identical to SEQ ID NO: 5523

SEQ ID NO: 25949 - protein, 71 aa, Neisseria meningitidis; identical to SEQ ID NO: 1785

SEQ ID NO: 25950 - protein, 85 aa, Neisseria meningitidis; identical to SEQ ID NO: 19866

SEQ ID NO: 25951 - protein, 143 aa, Neisseria meningitidis
MTENAQDKARQAVETVVKSPELVEQILSDEYVQIMIARRFHSGSLPPPSDLAQYNDIISNGADRIMAMAEKEQAVRHETIRQDQTFNRRGQLYGFISVILILLFAVFLVWSGYPATAASLAGGTVVALAGAFVIGRSRDQGKN

SEQ ID NO: 25952 - protein, 131 aa, Neisseria meningitidis
MMYSFEANANAVKISETVSVDTGQGAKIHKFVPKNSKTYSSDLIKTVDLTHIPTGAKARINAKITASISRAGVLAGGGKLARLGAKFSTRAVPYVGTALLAHDVYETFKEDIQARGYQYDTETDKFAKVSG

SEQ ID NO: 25953 - protein, 130 aa, Neisseria meningitidis; identical to SEQ ID NO: 18694

SEQ ID NO: 25954 - protein, 175 aa, Neisseria meningitidis
MEMKQMLLAVGVAAVLAGCGKDAGGYEGYWREKSDKKEGMIAVKKEKGNYFLNKINVVTGKEESMLLSEKDGELSINTGIGEIPIKLSDDGKELYVERRQYVKTDAAMKDKIIAHQKKCGQTAQAYRDARNALPSNQTYQQHLAAIEQLKRRFEAEFDELEKEIKCNGRSPALLL

SEQ ID NO: 25955 - protein, 138 aa, Neisseria meningitidis; identical to SEQ ID NO: 489

SEQ ID NO: 25956 - protein, 164 aa, Neisseria meningitidis
MIFKQNQNYWTVFYTNEEALIVQTCSGLGLTAIDHLYPPHILPLDTDNETLGTTVLQALANSRTFVYDSPEDQDFFDTEKIRQRYEDWVAKLCGNLGYKTRRALFKNMMSVDIWLHNGCLKISPSRHVKLEAWDAIDADDVILSLDNSPEEIGAGLKLALSRCR

SEQ ID NO: 25957 - protein, 751 aa, Neisseria meningitidis
MGQYKKLWYLLFAVLAVCFTILGYMGSEVYKKAPPYPEQVVSASGKVLMTKDDILAGQSAWQTTGGMEVGSILGHGAYQAPDWTADWLHRELVAWLDLTAQETYGKKFDEVSPEEQAVLKTRLADEYRNQSRVKEDGSVVVSETRVKAIESILPYYHGVYSDDPKFQTTREHFAMKNNTLPSQEAREKLFNFFFWTSWSASTNRPDENFTYTNNWPHEPLINNVPTTENYMWSFTSVVLLLMGIGLLMWGYSFLTKHEEVEVPSEDPISKIQLTPSQKALGKYVFLTVALFVVQVLLGGLTAHYTVEGQGFYGIDEALGFEMSDWFPYALTRTWHIQSAIFWIATGFLTAGLFLAPIVNGGKDPKFQRAGVNFLYIALFIVVGGSYAGNFFALTHILPPEFNFWFGHQGYEYLDLGRFWQLLLMVGLLLWLFLMLRCTVSAFKEKGVDKNLLAIFVASMVGVGVFYAPGLFYGEKSPIAVMEYWRWWVVHLWVEGFFEVFATAAFAFVFYNMGFVRRSTATASTLAAAAIFMLGGVPGTLHHLYFSGSTSASMAIGACFSALEVVPLVLLGREAYEHWSYQHLSDWAKRLRWPLMCFVAVAFWNMIGAGVFGFLINPPISLFYIQGLNTSAVHAHAALFGVYGFLALGFVLLVARYLKPNVQFDDKLMTWGFWLLNGGLVGMIAISLLPVGVIQAYASITHGLWYARSEEFLQMEILDTLRWVRTAADLIFIGGAICVAIQATKIVFGRDK

SEQ ID NO: 25958 - protein, 77 aa, Neisseria meningitidis
MEAIVYLEDNEYIALCDLLKLAGLAESGGQAKALIAEGLVSRNGETETCKTAKIRGGEVIEFDGARLEIADGYDPEE

SEQ ID NO: 25959 - protein, 124 aa, Neisseria meningitidis; identical to SEQ ID NO: 3797

SEQ ID NO: 25960 - protein, 702 aa, Neisseria meningitidis
MKISFHLALLPTLIIASFPVAAADTQDNGEHYTATLPTVSVVGQSDTSVLKGYINYDEAAVTRNGQLIKETPQTIDTLNIQKNKNYGTNDLSSILEGNAGIDAAYDMRGESIFLRGFQADASDIYRDGVRESGQVRRSTANIERVEILKGPSSVLYGRTNGGGVINMVSKYANFKQSRNIGAVYGWANRSLNMDINEVLNKNVAIRLTGEVGRANSFRSGIDSKNVMVSPSITVKLDNGLKWTGQYTYDNVERTPDRSPTKSVYDRFGLPYRMGFAHRNDFVKDKLQVWRSDLEYAFNDKWRAQWQLAHRTAAQDFDHFYAGSENGNLIKRNYAWQQTDNKTLSSNFTLNGDYTIGRFENHLTVGMDYSREHRNPTLGYNRAFSASINPYDRASWPASGRLQPILTQNRHKADSYGIFVQNIFSATPDLKFVLGGRYDKYTFNSENKLTGSSRQYSGHSFSPNIGAVWNINPVHTLYASYNKGFAPYGGRGGYLSIDTLSSAVFNADPEYTRQYETGVKSSWLDDRLSTTLSAYQIERFNIRYRPDPKNNPYIYAVSGKHRSRGVELSAIGQIIPKKLYLRGSLGVMQAKVVEDKENPDRVGIHLNNTSNVTGNLFFRYTPTENLYGEIGVTGTGKRYGYDSRNKEVTTLPGFARVDAMLGWNHKNVNVTFAAANLFNQKYWRSDSMPGNPRGYTARVNYRF

SEQ ID NO: 25961 - protein, 391 aa, Neisseria meningitidis; identical to SEQ ID NO: 2276

SEQ ID NO: 25962 - protein, 387 aa, Neisseria meningitidis; identical to SEQ ID NO: 30

SEQ ID NO: 25963 - protein, 421 aa, Neisseria meningitidis; identical to SEQ ID NO: 19787

SEQ ID NO: 25964 - protein, 695 aa, Neisseria meningitidis; identical to SEQ ID NO: 19112

SEQ ID NO: 25965 - protein, 321 aa, Neisseria meningitidis; identical to SEQ ID NO: 25640

SEQ ID NO: 25966 - protein, 200 aa, Neisseria meningitidis; identical to SEQ ID NO: 19887

SEQ ID NO: 25967 - protein, 221 aa, Neisseria meningitidis; identical to SEQ ID NO: 3662

SEQ ID NO: 25968 - protein, 405 aa, Neisseria meningitidis; identical to SEQ ID NO: 19889

SEQ ID NO: 25969 - protein, 105 aa, Neisseria meningitidis; identical to SEQ ID NO: 3792

SEQ ID NO: 25970 - protein, 231 aa, Neisseria meningitidis; identical to SEQ ID NO: 3708

SEQ ID NO: 25971 - protein, 166 aa, Neisseria meningitidis; identical to SEQ ID NO: 1704

SEQ ID NO: 25972 - protein, 1391 aa, Neisseria meningitidis; identical to SEQ ID NO: 4736

SEQ ID NO: 25973 - protein, 106 aa, Neisseria meningitidis; identical to SEQ ID NO: 19891

SEQ ID NO: 25974 - protein, 92 aa, Neisseria meningitidis; identical to SEQ ID NO: 752

SEQ ID NO: 25975 - protein, 109 aa, Neisseria meningitidis; identical to SEQ ID NO: 899

SEQ ID NO: 25976 - protein, 117 aa, Neisseria meningitidis; identical to SEQ ID NO: 408

SEQ ID NO: 25977 - protein, 206 aa, Neisseria meningitidis; identical to SEQ ID NO: 1193

SEQ ID NO: 25978 - protein, 237 aa, Neisseria meningitidis; identical to SEQ ID NO: 5135

SEQ ID NO: 25979 - protein, 919 aa, Neisseria meningitidis; identical to SEQ ID NO: 19900

SEQ ID NO: 25980 - protein, 96 aa, Neisseria meningitidis; identical to SEQ ID NO: 4410

SEQ ID NO: 25981 - protein, 290 aa, Neisseria meningitidis; identical to SEQ ID NO: 3809

SEQ ID NO: 25982 - protein, 145 aa, Neisseria meningitidis; identical to SEQ ID NO: 19905

SEQ ID NO: 25983 - protein, 358 aa, Neisseria meningitidis; identical to SEQ ID NO: 9712

SEQ ID NO: 25984 - protein, 348 aa, Neisseria meningitidis
MMKIKALMIAAALLAAADVHAAPQKAKTASAKVAKVAKVAKVAKVAKVAKVAATAQKEAAPAQQQGGIRFSDGIAAVADNEVITRRRLAEAVAEAKANLPKEAQISESELSRQVLMQLVNQSLIVQAGKRRNIQASEAEIDAVVAKNSALKNLSPAQRRDFADNIIAEKVRQQAVMQNSRVSEAEIDAFLEQAQKQGITLPEGAPLRQYRAQHILIKADSENAAVGAESTIRKIYGEARSGTDFSSLARQYSQDASAGNGGDLGWFADGVMVPAFEEAVHALKPGQVGAPVRTQFGWHIIKLNEVRDAGTPQERIRNSVRQYIFQQKAEQATVNLLRDLHSGAYVDIR

SEQ ID NO: 25985 - protein, 792 aa, Neisseria meningitidis
VLALGLCFGTHCAAADAVAAEETDNPTAGGSVRSVSEPIQPTSLSLGSTCLFCSNESGSPERTEAAVRGSGEASIPEDYTRIVADKVEGQSQVQVRAEGNVVVERNRTTLNTDWADYDQSGDTVTAGDRFALQQDGTLIRGETLTYNLEQQTGEAHNVRMEIEQGGRRLQSVSRTAEMLGEGHYKLTETQFNTCSAGDAGWYVKAASVEADREKGIGVAKHAAFVFGGVPLFYTPWADFPLDGNRKSGLLVPSLSAGSDGVSLSVPYYFNLAPNLDATFAPGVIGERGAVFDGQVRYLRPDYAGQSDLTWLPHDKKSGRNNRYQAKWQHRHDISDTLQAGVDFNQVSDSGYYRDFYGNKEIAGNVNLNRRVWLDYGGRAAGGSLNAGLSVLKYQTLANQSGYKDKPYALMPRLSADWRKNTGRAQIGVSAQFTRFSHDSRQDGSRLVVYPDIKWDFSNSWGYVRPKLGLHATYYSLNRFGSQEARRVSRTLPIVNIDSGATFERNTRMFGGGVLQTLEPRLFYNYIPAKSQNDLPNFDSSESSFGYGQLFRENLYYGNDRINTANSLSAAVQSRILDGATGEERFRAGIGQKFYFKDDAVMLDGSVGKKPRNRSDWVAFASGSIGSRFILDSSIHYNQNDKRAENYAVGASYRPAQGKVLNARYKYGRNEKIYLKSDGSYFYDKLSQLDLSAQWPLTRNLSAVVRYNYGFEAKKPIEVLAGAEYKSSCGCWGAGVYAQRYVTGENTYKNAVFFSLQLKDLSSVGRNPADRMDVAVPGYIPAHSLSAGRNKRP

SEQ ID NO: 25986 - protein, 65 aa, Neisseria meningitidis; identical to SEQ ID NO: 3913

SEQ ID NO: 25987 - protein, 216 aa, Neisseria meningitidis; identical to SEQ ID NO: 7775

SEQ ID NO: 25988 - protein, 334 aa, Neisseria meningitidis
MSTFFRQTAQAMIAKHIDRFPLLKLDRVIDWQPIEQYLNRQKTRYLRDHRGRPAYPLLSMFKAVLLGQWHSLSDPELEHSLITRIDFNLFCRFDELSIPDYSTLCRYRNWLAQDDTLSELLKLINRQLTEKGLKIEKASAAVVDATIIQTAGSKQRQAIEVDEGQINGQTTPSKDSDARWIKKNGLYKLGYKQHTRTDAEGYIEKLHITPANAHECKHLSPLLEGLPEGTTVYADKGYDSAENRQHLEEHQLLDGIMRKACRNRPLSEVQTKRNRYLSKTRYVVEQSFGTLHRKFRYARSTYFGLIKVSAQSHLKAMCLNLLKAANRLSAPAAA

SEQ ID NO: 25989 - protein, 228 aa, Neisseria meningitidis; identical to SEQ ID NO: 380

SEQ ID NO: 25990 - protein, 322 aa, Neisseria meningitidis
MKILLVRLSSMGDLIHTLPAIEDLARQCPDVELHWLCEAGFADIARLHPFVKKIHVMKWRQWRKHLFRAETWREMGHLKQTLRQEVFDFVLDSQGLIKSACFAKMAKSPIYGLDKNSAREGWAALAYVKTYAVPKGKNAVWRNRELFAQVFGYVMPETQVFGLTVPEAGRLKNLAQPYYAALHATSRDSKLWPVENWRSLLQKLNEEQQCNIYLPWGNEDEKTRAKQIADGLPFAIVCDKINLLQAAYLLKYAVGIVGVDTGLLHLANALEKPVVGIYTDTDPIKTGVQVSPIAKNLGNIGQIPTADLVYQALMDCVAADKG

SEQ ID NO: 25991 - protein, 68 aa, Neisseria meningitidis; identical to SEQ ID NO: 5814

SEQ ID NO: 25992 - protein, 369 aa, Neisseria meningitidis; identical to SEQ ID NO: 9819

SEQ ID NO: 25993 - protein, 208 aa, Neisseria meningitidis
MRCFMIQNVVTSIILYSGTAVDLLIILMLFFAKRKSRKDIINIYLGQFLGSVSLILLSLLFAFVLDYIPSKEILGLLGLIPIFLGIKVLLLGDSDGEAIAKEGLRKDNKNLIFLVAMITFASCGADNIGVFVPYFTTLNLANLIVALLTFLVMIYLLVFSAQKLAQVPSVGETLEKYSRWFVAVVYLGLGIYILVENNSFDMLWTVLG

SEQ ID NO: 25994 - protein, 190 aa, Neisseria meningitidis; identical to SEQ ID NO: 4428

SEQ ID NO: 25995 - protein, 180 aa, Neisseria meningitidis; identical to SEQ ID NO: 3825

SEQ ID NO: 25996 - protein, 307 aa, Neisseria meningitidis; identical to SEQ ID NO: 19863

SEQ ID NO: 25997 - protein, 104 aa, Neisseria meningitidis; identical to SEQ ID NO: 1772

SEQ ID NO: 25998 - protein, 186 aa, Neisseria meningitidis; identical to SEQ ID NO: 104

SEQ ID NO: 25999 - protein, 273 aa, Neisseria meningitidis
LLIHYTLCRYRNRLAQDDTLSELLKLINCQLTEKGLKVEKASAAVVDATIIQTAGSKQRQAIEVDNKGQVSGQTTPSKDSDARWIKKNGLYKLGYKQHTRTDAEGYIEKLHITPANAHECKHLPPLLEGLPKGTTVYADKGYDSAENRQHLEEHQLQDGIMRKACRNRPLTEAQTKRNRYLSKTRYSGLNLNQDKATKPQTVQIVRQGEATPYWFKFNPLYVVEQSFGTLHRKFRYARAAYFGLLKVSAQSHLKAMCLNLLKAANRLSAPAAA

SEQ ID NO: 26000 - protein, 134 aa, Neisseria meningitidis; identical to SEQ ID NO: 1773

SEQ ID NO: 26001 - protein, 136 aa, Neisseria meningitidis; identical to SEQ ID NO: 1774

SEQ ID NO: 26002 - protein, 145 aa, Neisseria meningitidis; identical to SEQ ID NO: 1775

SEQ ID NO: 26003 - protein, 130 aa, Neisseria meningitidis; identical to SEQ ID NO: 7797

SEQ ID NO: 26004 - protein, 234 aa, Neisseria meningitidis; identical to SEQ ID NO: 19933

SEQ ID NO: 26005 - protein, 106 aa, Neisseria meningitidis; identical to SEQ ID NO: 19934

SEQ ID NO: 26006 - protein, 399 aa, Neisseria meningitidis
LSTFPNHTMHTISFPNRTRLTALPPLSLYIHIPWCIKKCPYCDFNSHSLKNGLPEAAYIDALLTDLQLELPNIWGRPVETIFFGGGTPSLFQAESIDRLLSGVRSLLRLQPEAEITLEANPGTFEIEKFQGFKDAGITRLSIGVQSFNDDMLSRLGRVHNGKEALTAIDTALKLFDKVNIDLMYALPNQTVQTALDDVQTAIATGATHISAYHLTMEPNTPFGHTPPKGLPQDEAALDIEDAVHGALESAGFVHYETSAFAKPAMQCRHNLNYWQFGDYLGIGAGAHGKISYPDRIERTVRRRHPNDYLALMQNRPSEAVERKTVAAEDLPFEFMMNALRLTDGVPAAMLQERTGVPSAKIMAQIETARQKGLLETDPAVFRPTEKGRLFLNDLLQCFL

SEQ ID NO: 26007 - protein, 105 aa, Neisseria meningitidis; identical to SEQ ID NO: 5128

SEQ ID NO: 26008 - protein, 125 aa, Neisseria meningitidis
MCEFKDFRRNIPCFKEYDENSFIGKWYDDGVWDDEEYWKLENALIEVRRKYPYPMDIPRDIVIGIGSIIEFLMVPNWKLFTIKSSPWLPKSIKINERYERFRVMLRYIFTEKDIVNVRFDYYNKK

SEQ ID NO: 26009 - protein, 133 aa, Neisseria meningitidis
MMCEFKDFRRNIPCFKEYDENSFIGKWYDDGVWDDEEYWKLENDLIEVRRKYPYPMDIPRDIVIGIGSIIDFLMVQNWKLFEIKASPWLPKSVKINERYERFRVMLRYIFTDLDVEDWKFFYFPIQHSKGRLR

SEQ ID NO: 26010 - protein, 129 aa, Neisseria meningitidis; identical to SEQ ID NO: 11676

SEQ ID NO: 26011 - protein, 187 aa, Neisseria meningitidis
LRPLQKSPSPTSETQTQDFGCFRIKYLLILPKYPLNPPRTPDNQASGLPFRRQRAHLACWPLSTGSNTSPSGGLRTHFVISNVPSTPNLLRGRQLEGKLILEVPAQVNPIPQSVLRAAQEENVIIRDTTGRIYNRWWFSIRWLCRCTSCKKRTIDTNRENRGRCVSNCKCKHWISMDCQFVRAKRRS

SEQ ID NO: 26012 - protein, 144 aa, Neisseria meningitidis; identical to SEQ ID NO: 4260

SEQ ID NO: 26013 - protein, 74 aa, Neisseria meningitidis; identical to SEQ ID NO: 24022

SEQ ID NO: 26014 - protein, 93 aa, Neisseria meningitidis
MQNGGGKIYQTADNVEGIMLLKVVPERTVSADAKTRDPMWDNAALQTSEGVNFIARFLGFFSDGEYRYVDVLQPNHSDIIRYSGKDFSAKSNT

SEQ ID NO: 26015 - protein, 326 aa, Neisseria meningitidis; identical to SEQ ID NO: 4334

SEQ ID NO: 26016 - protein, 105 aa, Neisseria meningitidis; identical to SEQ ID NO: 7739

SEQ ID NO: 26017 - protein, 101 aa, Neisseria meningitidis; identical to SEQ ID NO: 705

SEQ ID NO: 26018 - protein, 122 aa, Neisseria meningitidis; identical to SEQ ID NO: 3754

SEQ ID NO: 26019 - protein, 500 aa, Neisseria meningitidis; identical to SEQ ID NO: 3049

SEQ ID NO: 26020 - protein, 99 aa, Neisseria meningitidis; identical to SEQ ID NO: 19064

SEQ ID NO: 26021 - protein, 87 aa, Neisseria meningitidis; identical to SEQ ID NO: 19939

SEQ ID NO: 26022 - protein, 117 aa, Neisseria meningitidis; identical to SEQ ID NO: 9841

SEQ ID NO: 26023 - protein, 117 aa, Neisseria meningitidis; identical to SEQ ID NO: 15855

SEQ ID NO: 26024 - protein, 362 aa, Neisseria meningitidis
MNAQTLIANVAELVKTKLKPIVDDIDRKGYYPEAFMRELGAIGGFGAVGTEAEGGNGLGLATQIAVLREIGKECGATSFSAWCQAACAWYLHQTPNQAVKDKYLADILQGKVLAGTGMSNTVKHLAGIEKHNLQAERVEGGYTVNGALPWVSNIGEDHIANTAQIGDGYVMFITGGQWEGVSLQNCPEFCALEGTRTFSLNFKDVFIPDEDIIAAPEQFADYIQSIKAGFILLQIGIGAGVIDGSLGIIRLANIVNAEVNSYLDDGYDSLKARLDGAWAETERLAGLAWSGTPDNLATLKLREAAAVLALAAAQSAALHSGAKGYLMRSPAQRRVREAMFVAIVTPAIKHLRKEIAAIEAAK

SEQ ID NO: 26025 - protein, 137 aa, Neisseria meningitidis; identical to SEQ ID NO: 1900

SEQ ID NO: 26026 - protein, 676 aa, Neisseria meningitidis
MRHFATESGKSKGQFYTPAEVSRIMAKIIGISADCRPAPAFMTRPAARVRCCSKPPPKPAAKSAFTVRKKMWQPRPLPVIFCTTTKPPKSTPGTPCPIRLSVMKTTGLRPSILPLPIRLIPPEKNGDYAFLLHLLKSLKPSGKGAIILPHGVLFRGNAEARIRTELLNLDLIKGIIGLPANLFYGTGIPACIIVIDKEHAQTAQFAEEGTNQVISGGSVFMIDASRGFIKDGNKNRLREQDIHKIIDTFTNLVTAVWCIAKSQHKITTLICLAISTAEKSKTCKISPPIYLYGGIPAHDMDALEAYWQVLGRMKNELFAEHDGHFTTIQRNRLQIFPTLNSLKSCGIGVEFRANLVQPQISTIKSKAAKSKPIYWRTPITPPSKPDTWQSLPRGTLKTTLPPSNRAGLSGNGAKACWTRSNPAALKNTISTKSRTTGRKPCKTMFISSPKMAGRRLKTWPKSPKKAMKPRTPSSLRKPKPTKKAKPKPSASAKNTAAKSSPPSWLPAATFQTASPSWKKNKASWNAAKNWKTTKNTAAKRVRTTYWMQKANFPPNFKPHWKKAAKKANGLFYKPPKHRRKKPRKTQSKPKSKPTLPYSNNSADFPKPKSSSLPFKTNGLPIYKVESKIAWKTVFSSLSAATRWKTATAARWPSLPEKWKSGKAKSMPTLKIWVLEA

SEQ ID NO: 26027 - protein, 407 aa, Neisseria meningitidis; identical to SEQ ID NO: 5647

SEQ ID NO: 26028 - protein, 442 aa, Neisseria meningitidis; identical to SEQ ID NO: 19956

SEQ ID NO: 26029 - protein, 180 aa, Neisseria meningitidis
VNYCEFAASLPENTDNPNKHYHDTQYGFPIDSDNGLFERLVLEINQAGLSWTLMLKKRQAFQTAFEGFDINTVAAFDDTDRERLLADAGSPQPPENRCRHFQCTANPSVATRIRLVQELARRAPSAKQRRMGTLKTFQIRRRRNRRRISDEYRLPQRRARRKLSGLPNPEIPPEMARCHL

SEQ ID NO: 26030 - protein, 207 aa, Neisseria meningitidis
MNRRTFLLGAGALLLTACGRKSARTHAKIPEGSTVLALGDSLTFGYGANPGESYPAQLQKLTGWNIVNGGVSGDTSAQALSRLPALLARKPKLVIVGIGGNDFLRKVPKEQTRANIAKIIETVQKENIPAVLVGVPHITLGALFGHLNDHPLYEDLSEEYGIPLFGGAWAEILGDNNLKSDQIHANGKGYRKFAEDLNQFLRKQGFR

SEQ ID NO: 26031 - protein, 548 aa, Neisseria meningitidis; identical to SEQ ID NO: 19079

SEQ ID NO: 26032 - protein, 330 aa, Neisseria meningitidis; identical to SEQ ID NO: 19957

SEQ ID NO: 26033 - protein, 356 aa, Neisseria meningitidis
MKIILTTSMSGLGGTETATVRLGRLLKRRGHDIILASSDGPFVGEAQASGIRWQPVDFYWGGLAGYLKSTFAYARMLRREQPDIIDCQMARVVPACALAAKIVSPKTKIIYHSHGLDAATYPKIAKLFDKLGVYIIGNCKHEREKLIRHGFPAGRIAYAYNAPPPPEFHFRKTEKECAVLGTLSRLDTVRAVHLMLDILKKMVDCGMPVRLNIAGIGEEMDNLKAQAERLGIDDKVTFLGGIRDLTGYFKEIDILVNTPHCVGDHGAGVGNNILEAGLYDTPVVTYDMAGISEMVITGRTGYCIPFGDEEAFIAAVDTLVRQPELREAMGKRLHAHVAALCSDDEIYRTTMAAYAM

SEQ ID NO: 26034 - protein, 258 aa, Neisseria meningitidis
MNRPKQPFFRPEVTVARQTSLTGKVILTRPLSFSLWTTFASISALLIILFLIFGNYTRKTTVEGQILPASGVIRVYAPDTGTITTKFVEDGEKVKAGDKLFALSTSRFGAGGSVQQQLKTEAVLKKTLAEQELGRLKLIHENETRSLKATVERLENQKLHILQQIDGQKRRIRLAESVAKTALGRQELSGLGMVSSDLAKSSEPVYLVKIKPDKSTITAYGEEKPLQIGMTLEADILHEKRRLYEWVLELIYSISGKL

SEQ ID NO: 26035 - protein, 300 aa, Neisseria meningitidis; identical to SEQ ID NO: 19961

SEQ ID NO: 26036 - protein, 524 aa, Neisseria meningitidis; identical to SEQ ID NO: 19965

SEQ ID NO: 26037 - protein, 327 aa, Neisseria meningitidis; identical to SEQ ID NO: 294

SEQ ID NO: 26038 - protein, 77 aa, Neisseria meningitidis; identical to SEQ ID NO: 760

SEQ ID NO: 26039 - protein, 163 aa, Neisseria meningitidis
MRAVIQKTVGAKVDVVSENGTETCGKIDGGFVVLLGVTHSDTEKDARYIADKIAHLRVFEDEAGKLNLSLKDVGGAVLLVSQFTLYADATSGRRPSFSQAAPAEQAQQLYLRTAELLRGHGIHVETGRFRTHMQVSLCNDGPVTILLDSFMTRISPKMKVVPD

SEQ ID NO: 26040 - protein, 507 aa, Neisseria meningitidis; identical to SEQ ID NO: 19972

SEQ ID NO: 26041 - protein, 453 aa, Neisseria meningitidis; identical to SEQ ID NO: 19977

SEQ ID NO: 26042 - protein, 169 aa, Neisseria meningitidis
MGSKFFFLLLRFAGSVLPPSHMRGIGIVGRRVRGFLARRVSPHIGRGVNIERGAYVFPDTVLGDGSGIGANCEICRGPVVGKNVMMEPECLFYSNNHKFDRKRFEGYTEIRPITLEDDVWPGRRVIVMAGVTVGRGSVVGAGAVVTKDIPPYSLAAGNPAVVKKNLPEG

SEQ ID NO: 26043 - protein, 325 aa, Neisseria meningitidis
MQENPTVWLFDLDNTLHNADAGLFTLINRAMTRYMTRRLKLSESAASDLRQDYWHRYGATLAGLQIHHPEIDIAEFLRESHPIDAILTKLHGMADTEHTLCRLNGRKAVFSNGPSFYVRAVVGALGLENRFDALFGTDDFGLLYKPNPQAYLNVCRLLDVPPECCIMVDDSADNLHQAKALGMKTVRFGAKVHDLPFIDASVSDMAQLARYAETLSEHRQNHYNTHNPPKIRKNVMRKTFLILMTAAALLSGCAWETYQDGNGKTAVRQKYPAGTPIYYQDGSYSKNMNYNQYRPERHAVLPNQTGNNADEEHRQHWQKPKFQNR

SEQ ID NO: 26044 - protein, 92 aa, Neisseria meningitidis
MIHEEISAMPMGYETLIGDMGSALSGGQKQRIVLARALILRTENPIFRCSDQPFGYCQKSSQCKLEWLVYHKNYGGTQKGNGGISRENVFRI

SEQ ID NO: 26045 - protein, 436 aa, Neisseria meningitidis; identical to SEQ ID NO: 13843

SEQ ID NO: 26046 - protein, 346 aa, Neisseria meningitidis; identical to SEQ ID NO: 9873

SEQ ID NO: 26047 - protein, 98 aa, Neisseria meningitidis; identical to SEQ ID NO: 1735

SEQ ID NO: 26048 - protein, 141 aa, Neisseria meningitidis; identical to SEQ ID NO: 7863

SEQ ID NO: 26049 - protein, 1010 aa, Neisseria meningitidis
MFWIVLIVILLLALAGLFFVRAQSEREWMREVSAWQEKKGEKQAELPEIKDGMPDFPELALMLFHAVKTAVYWLFVGVVRFCRNYLAHESEPDRPVPPASANRADVPTASDGYSDSGNGTEEAETEEAEAAEEEAADTEDIATAVIDNRRIPFDRSIAEGLMPSESEISPVRPVFKEITLEEATRALNSAALRETKKRYIDAFEKNETAVPKVRVSDTPMEGLQIIGLDDPVLQRTYSRMFDADKEAFSESADYGFEPYFEKQHPSAFSAVKAENARNAPFRRHAGQAEAKSPDVSQGQSVSDGTAVRDACRRVSVNLKEPNKATVSAEARISRLIPESRTVVGKRDVEMPSETENVFTETVSSVGYGGPVYDEAADIYIEEPAAPDAWVVEPPEVPKVPMPAIDIPPPPPVSEIYNRTYEPPTGFEQAQRSRIAETDHLADDVLNGGWQEETAAIADDGSEGAAERSNGQYLSETEAFGHDSQAVCPFENVPSERPSCRVSDTEADEGAFPSEETGAVSEHLPTTDLLLPPLFNPEATQTEEELLENSITIEEKLAEFKVKVKVVDSYSGPVITRYEIEPDVGVRGNSVLNLEKDLARSLGVASIRVVETILGKTCMGLELPNPKRQMIRLSEIFNSPEFAESKSKLTLALGQDITGQPVVTDLGKAPHLLVAGTTGSGKSVGVNAMILSMLFKAAPEDVRMIMIDPKMLELSIYEGIPHLLAPVVTDMKLAANALNWCVNEMEKRYRLMSFMGVRNLAGFNQKIAEAAARGEKIGNPFSLTPDDPEPLEKLPFIVVVVDEFADLMMTAGKKIEELIARLAQKARAAGIHLILATQRPSVDVITGLIKANIPTRIAFQVSSKIDSRTILDQMGAENLLGQGDMLFLPPGTAYPQRVHGAFASDEEVHRVVEYLKQFGEPDYVDDILSGGGSEELPGIGRSGDGETDPMYDEAVSVVLKTRKASISGVQRALRIGYNRAARLIDQMEAEGIVSAPEHNGNRTILVPLDNA

SEQ ID NO: 26050 - protein, 407 aa, Neisseria meningitidis
MVSAIRTGRGRDFFSKSGTGIAEERHQNRRACTDVPLLAERNSKHPDRPYGFAKYRQSGLDIYAWHGIYFFPRFPFIDIDCIRWVCAGLKAFKHYIRENGLPDLIHAHCMNYAGILAFKISQKYGIPYVVTKHSSTITRGLIRPHQWQPMKNAAAHAAARLAISRHFAHVLQHKYGCEWQYLPNILGGIFNRPFEQREKNNKPHFVFCTVSHLRRLKGHDVLLTAFARALAQCPQLRLNIGGSGQEEQRLKQQAADLGITHAVTFLGALQPEAVLDLMRNSDAFVLASRTETFGVVYIEALSQGLPVIATRCGGAESIVSDGNGYLVPVDDDDALADALIKMYEHHSDFEPARLRENCLNEFGENAVIGRLIGIFRQAIAEYGKKIPVKYSGLTKIRTRRRSRRQYK

SEQ ID NO: 26051 - protein, 97 aa, Neisseria meningitidis; identical to SEQ ID NO: 19990

SEQ ID NO: 26052 - protein, 124 aa, Neisseria meningitidis; identical to SEQ ID NO: 1868

SEQ ID NO: 26053 - protein, 127 aa, Neisseria meningitidis
LYCLRLRRLVLIFVNPLYIIATTVPAQQTFLDAAELMQWSRETEWLGLNVIAHRNFGKQHAQVEFEAYFRDGQHRSAHHELSGFVNIGGQWYFIDPTVPHPAMKQPCICGSGKKFKACCGKYLKPVA

SEQ ID NO: 26054 - protein, 67 aa, Neisseria meningitidis
MAAPPPTKKTIRNASDRSGLFSGESAASEHTAHAHIDLPSLAHRVHRRPLRLKIKLPSVVGITTQKK

SEQ ID NO: 26055 - protein, 78 aa, Neisseria meningitidis; identical to SEQ ID NO: 1011

SEQ ID NO: 26056 - protein, 66 aa, Neisseria meningitidis; identical to SEQ ID NO: 3905

SEQ ID NO: 26057 - protein, 64 aa, Neisseria meningitidis; identical to SEQ ID NO: 3555

SEQ ID NO: 26058 - protein, 154 aa, Neisseria meningitidis; identical to SEQ ID NO: 19997

SEQ ID NO: 26059 - protein, 139 aa, Neisseria meningitidis; identical to SEQ ID NO: 7880

SEQ ID NO: 26060 - protein, 86 aa, Neisseria meningitidis; identical to SEQ ID NO: 19998

SEQ ID NO: 26061 - protein, 85 aa, Neisseria meningitidis; identical to SEQ ID NO: 19361

SEQ ID NO: 26062 - protein, 80 aa, Neisseria meningitidis; identical to SEQ ID NO: 1154

SEQ ID NO: 26063 - protein, 78 aa, Neisseria meningitidis; identical to SEQ ID NO: 3909

SEQ ID NO: 26064 - protein, 100 aa, Neisseria meningitidis; identical to SEQ ID NO: 7884

SEQ ID NO: 26065 - protein, 67 aa, Neisseria meningitidis; identical to SEQ ID NO: 10269

SEQ ID NO: 26066 - protein, 68 aa, Neisseria meningitidis; identical to SEQ ID NO: 3911

SEQ ID NO: 26067 - protein, 64 aa, Neisseria meningitidis; identical to SEQ ID NO: 631

SEQ ID NO: 26068 - protein, 147 aa, Neisseria meningitidis; identical to SEQ ID NO: 20005

SEQ ID NO: 26069 - protein, 263 aa, Neisseria meningitidis
MADILPSDKRRQPPKTKGSTMNIIEQEMKHSSLRKVDAEIAKIIADAHKINAESVKPKNPDGIPWRPPGWLPPSPPCWHYSNLPDHKPREGLYPPNNPNKMNRAALFNRYPEWIIGQDGASRFITHCRYPRLIAKIHRQTDGECPGGHYRHSENGITLYDFIFFDGKPADEARFAAVLTETCRRAVKKICETKTATTWNSATRLTTFAPFATAANHRPSWRKSSGSTTYRAAGKPNPIPKPVGPICRWKNGGSSSIGKKQTPS

SEQ ID NO: 26070 - protein, 89 aa, Neisseria meningitidis; identical to SEQ ID NO: 3886

SEQ ID NO: 26071 - protein, 100 aa, Neisseria meningitidis; identical to SEQ ID NO: 1890

SEQ ID NO: 26072 - protein, 72 aa, Neisseria meningitidis; identical to SEQ ID NO: 7897

SEQ ID NO: 26073 - protein, 71 aa, Neisseria meningitidis; identical to SEQ ID NO: 19861

SEQ ID NO: 26074 - protein, 61 aa, Neisseria meningitidis; identical to SEQ ID NO: 5879

SEQ ID NO: 26075 - protein, 219 aa, Neisseria meningitidis; identical to SEQ ID NO: 20022

SEQ ID NO: 26076 - protein, 74 aa, Neisseria meningitidis; identical to SEQ ID NO: 13735

SEQ ID NO: 26077 - protein, 692 aa, Neisseria meningitidis; identical to SEQ ID NO: 20024

SEQ ID NO: 26078 - protein, 151 aa, Neisseria meningitidis
MESPTLWAIVDLSEFVFVPRYNVAAAAGYGAPVFGEEPLFCLAFRKYWIDNYVTKQPEKLSVITVKGDSMEGVLNHGDSILINHAETDPRDGLYVLRIGNDLFVKRVQRIPGKLLVTSENPRYAPFEIDLSNAQDDIAIIGRVEWYGRSID

SEQ ID NO: 26079 - protein, 133 aa, Neisseria meningitidis; identical to SEQ ID NO: 9910

SEQ ID NO: 26080 - protein, 96 aa, Neisseria meningitidis; identical to SEQ ID NO: 20028

SEQ ID NO: 26081 - protein, 68 aa, Neisseria meningitidis; identical to SEQ ID NO: 531

SEQ ID NO: 26082 - protein, 71 aa, Neisseria meningitidis; identical to SEQ ID NO: 3926

SEQ ID NO: 26083 - protein, 46 aa, Neisseria meningitidis
MCVAIMAYFGGFVRALFDLGVFERGDVKGRGKWFSRFWRRCRRCCA

SEQ ID NO: 26084 - protein, 37 aa, Neisseria meningitidis; identical to SEQ ID NO: 970

SEQ ID NO: 26085 - protein, 333 aa, Neisseria meningitidis
MRPFFVGATVLAILGALVFFISPGAVVLHRQIFLELMLPAAYGGFLTAALLDWTGFSSNLKPVATLMAALLLAASAILPFSPQTASFFVAAYWLVLLLFCARLIWLDRNTDNFALLMLLAAFTVFQTAYAATGDLNLLRAQVHLNMAAVMFVSVRVSVLLGAEALKKCRLKDPVFIPNVVYKNIAITFLLLHAAAELWLPAQTAGFTALAVGFILLAKLRELHHHELLRKHYVRTYYLLQLFAAAGYLWTGAAKLQNLPASAPLHLITLGGMMGGVMMVWLTAGLWHSGFTKLDYPKLCRIAVPILFAAAVFVLYLLTFVPIFRANAFTDDPE

SEQ ID NO: 26086 - protein, 337 aa, Neisseria meningitidis
MIFSIIVPIYNVEKYLRCCVDSVLAENFADYEMILVDDGSPDGCGKICDEYAGKYPHIKVIHQENGGLSDARNAGIRAAKGDYLIFLDSDDYWADTNRSKNGGGGILFDLQQLADKKVDLILHPSSLNYHVIPKGADFSDNDFVRHFETLVEGRYYIANAWTKIVRREIIIKNNLFFPKGYIHEDFPYSLKLARFVKTFAFYDNPFYQYRVLGNSISHNVKYKNFSDMLAHLDRGVDFLVENKNSPIYGGLQKFVFDNIGYLRSILVRLYFSKNIILIYRKYFSFKEKCRKIFGAKTIRPVFIGKTAFIIGLPILRLLVPPMLYPAIKAVYQKFFSE

SEQ ID NO: 26087 - protein, 172 aa, Neisseria meningitidis
MIKNLYKLINYAALIGFAPNIVFAWPMFVDPPSYQNIHVRSWKARRDSGIVKQDLDFSCGAASIATLLNNFYGRHYSEAEILDKMDKTQMRASFDDMQRIMPELGFEAQGYALPFEQLVQLKIPVIVYLKYRKNNHFSVLNGINGETVLLADPSLGHVSMSKSQFLSAWKTR

SEQ ID NO: 26088 - protein, 243 aa, Neisseria meningitidis; identical to SEQ ID NO: 20036

SEQ ID NO: 26089 - protein, 1064 aa, Neisseria meningitidis
MRTTPTFPTKTFKPAAMALAVATTLSACLGGGTSAPDFNAGGTGIGSNSRATTAKSAAVSYAGIKNEMCKDRSMLCAGRDDVAVTDRDAKINAPPNLHTGDFTNPNDAYKNLINLKPAIEAGYTGRGVEVGIVDTGESVGSISFPELYGRKEHGYNENYKNYTAYMRKEAPEDGGGKDIEASFDDEAVIETEAKPTDIRHVKEIGHIDVVSHIIGGRSVDGRPAGGIAPDATLHIMNTHDGTKNEIMSAAIRNAWVKLGERGVRIVNNSFGTTSRAGTADHFQIANSEEQYRQALLAYSGGDKTDEGIRLMQQSDYGNLSYHIRNKNMLFIFSASNDAQAQPNTLTLLPFYEKDAQKGIITVAGVDRSGEKFNGSNHCGITAMWCLSAPYEASVRFTRTNPIQIAGTSFSAPIVTGTAALLLQKYPWMSNDNLRTTLLTTAQDIGAVGVDSKFGWGLLDAGKAMNGPASFPFGDFTADTKGTSDIAYSFRNDISGTGGLIKKGGSQLQLHGNNTYTGKTVIEGGSLVLYGNNESDMRVETKGALIYNGAASGGSLNSDGIVYLADTDRSGANETVHIKGDLQLGGEGTLYTRLGKLLKVDGTAIIGGKLYMSARGKGAGYLNRTGQRVPFLSAAKIGRDYSFFTNIETDGGLLASLDSVEKTAGSEGDTLSYYVRRGNAARTASAAAHSAPAGLKHAVEQGGSNLENLMVELDASESSATPETVETAAADRTDMPGIRPYGATFRAAAAVQHANAADGVRIFNSLAATVYADSTAAHADMQGRRLKAVSDGLDHNATGLRVIAQTQQDGGTWEQGGVEGKMRGSTQTVGIAAKTGENTTAAATLGMGHSTWSENSANAKTDSISLFAGIRHDAGDIGYLKGLFSYGRYKNSISRSTGADEHAEGSVNGTLMQLGALGGVNVPFAATGDLTVEGGLRYDLLKQDAFAEKGSALGWSGNSLTEGTLVGLAGLKLSQPLSDKAVLFATAGVERDLNGRDYTVTGGFTGATAATGKTGARNMPHTRLVAGLGADVEFGNGWNGLARYSYAGSKQYGNHSGRVGVGYRF

SEQ ID NO: 26090 - protein, 387 aa, Neisseria meningitidis; identical to SEQ ID NO: 20038

SEQ ID NO: 26091 - protein, 387 aa, Neisseria meningitidis
MNITIVAPYCSLPSEPYFNRFWYLAERLSQSHDVLLITSRFRHYDKSFRRPEDAEAASQDRLKVMLLEESGYGKNVSLERVASHYRFVKNFEQWLKNCRPGEQDIVYSAYPLIATNLLLGKHKARLGYKLIVDVQDVWPESFSSVVPFLKKVPHKLLPFASRANRAYRCADALVAVSQTYLDRAKEANPNVPGEAVYIGTDFAAIAPPRFRSKTVRLFYLGTLSYSYDVETVCKGVRKLLDDGENVELHIMGGGPDLEKLKQYENRAIKFYGYLPYSEMMSIAKGCDIAVNAIHSHAMQSVTNKLSDYMALQKPILNSQNNAEVLDLMNLLPHENYRSGDVDGFVQAAKDILKRKSDPVQSDEIVRRFKRDVAYQKIVNLIERLAHE

SEQ ID NO: 26092 - protein, 160 aa, Neisseria meningitidis; identical to SEQ ID NO: 515

SEQ ID NO: 26093 - protein, 118 aa, Neisseria meningitidis; identical to SEQ ID NO: 9922

SEQ ID NO: 26094 - protein, 64 aa, Neisseria meningitidis; identical to SEQ ID NO: 11919

SEQ ID NO: 26095 - protein, 483 aa, Neisseria meningitidis
MLSFLSGLLSLGIEVLWVRMFSFAAQSVPQAFSFTLACFLTGIAVGAYFGKRICRSRFVDIPFIGQCFLWAGIADFLILGAAWLLTGFSGFVHHAGIFITLSAVVRGLIFPLVHHVGTDGNKSGRQVSNVYFANVAGSALGPVLIGFVILDFLSTQQIYLLICLISAAVPLFCTLFQKSLRLNAVSVAVSLMFGILMFLLPDSVFQNIADRPDRLIENKHGIVAVYHRDGDKVVYGANVYDGAYNTDVFNSVNGIERAYLLPSLKSGIRRIFVVGLSTGSWARVLAAIPEMQSMIVAEINPAYRSLIADEPQIAPLLQDKRVEIVLDDGRKWLRRHPDEKFDLILMNTTWYWRAYSTNLLSAEFLKQVQSHLTPDGIVMFNTTHSPHAFATAVHSIPYAYRYGHMVVGSATPVVFPNKELLKQRLSRLIWPESGRHVFDSSTVDAAAQKVVSRMLIQMTEPSAGAEVITDDNMIVEYKYGRGI

SEQ ID NO: 26096 - protein, 90 aa, Neisseria meningitidis; identical to SEQ ID NO: 11808

SEQ ID NO: 26097 - protein, 203 aa, Neisseria meningitidis
MNFTRLLNQVLSTVQKGNTFSDSPLNSFGGGALVAGVASMLLNGKNRKTITKIGSTAALGYLAYRGYQMWQQNKGRATVTQSDFQPAGETEETYSRTVLRTMIATAASDGMIDEAERRTIEQESGTDPETAAWLAAEYRLPASIEDIAAAVGNDEALAAEAYLAARLVCADLSRKETVFLARLSQALELDDNLVENLERQLGF

SEQ ID NO: 26098 - protein, 677 aa, Neisseria meningitidis; identical to SEQ ID NO: 9929

SEQ ID NO: 26099 - protein, 650 aa, Neisseria meningitidis
MLPTQPNPTQPNPTQPNPPNPSPDLIDTAGVNTEAIYTSDGITANSTQLEQLKKLFPACFDADGNFLIDRLQAEIAPQTDIGREFYEMNWLGKSYARLLRNLPPETLISEDKTHNAKPENAGSQNLLIRGDNLEVLKHLKNAYTNSVKMIYIDPPYNTGSDGFVYQDDRKFTPAELACLANIDEDEAARILDFTDKGSNSHSAWLTFMYPRLYIARELLKDDGVIFISIDDNEAAQLKLLCDEVFGEGNFIKDLIVNTSEGGGNAKYVVNGHETVLVYAKDITHFDNLKRPKDIRGKKIVINDELYWIQEDAVREQFGKYGNLHYEDIIEIKGIEFKNKIDKDIENNEYILIPKSYGKTIIGKLRKVSDDFSKFHSILNIGNISKNLTKDGIRELEELFETGKGYSPFETPKPLDLLKRLVLSATFKGNQTDLILDFFAGSGTTAHAVMQLNAEGQNGNRRYICVQLPEKTAEKSEARKAGYPTIFDITKARIEKAAAKIRVEHPDYTGDSGFKIFQTADNFRQHPDKDFSPEQPDLPLNDELSEEQLQTLLTTWTLYDGAALTTPVEPVRLGAYTAYLCEKRLYLMNAGFTSADLLAFIRKLDDDADFNPNRVIVFGSNMASAMQHELDQAVRGYANKKEIELNVIIRV

SEQ ID NO: 26100 - protein, 712 aa, Neisseria meningitidis
MTLKASKQASKQASKQASKQASKQASKQASKQASKQASKQASKQASGRVNLLTLSVLSLFCTPYVGSDAYDPVKEAEIKNKFILEAAEDRNSHVWRGPCSVSFDCFGAFSYQPGSDTRSTNIGDAADFSFSDKPANGVSHYFSSGKTDPNSSEALYDEINITGKNYNSGILAVDNMPVVKKYVTENYGADLKQAVKDQLKDLYKTRPEDWEKNKKIVEEAIIKQYGIPRNKINKFRKVIDPIIEEAVLTPHSNTTPTNLDNIFNKKLHVKIENKSHVAGQVLELTKMTLKDSLWEPRRHSDIHTLETSDNARIRLNTKDEKLTVHKDYAGGADFLFGYDVRESDEPALTFEDKVSGQSGVVLERRPENLKTLDGRKLIAAKTADSGSFAFKQNYRQGLYELLLKQCEGGFCLGVQRLAIPEAEAVLYAQQAYAANTLFGLRAADRGDDVYAADPSRQNIRGGAAADGRRKGVQIGGEVFVRQNEGSRLAIGVMGGRVGQHASVNSKGGAAGSDLHGYGGGVYAAWHQLRDKQTGAYLDGWLQYQRFKHRINDENRAERYKTKGWTASVEGGYNTLVAEGVVGKGNNVRFYLQPQAQFTYLGVNGGFTDSEGTGVGLLGSGQWQSRAGIRAKNRFALRNGVNLQPFAAFNVLHRSKSFGVEMDGEKQTLAGRTALEGRFGIEAGWKGHMSARIGYGKRTDGDKEAALSLKWLF

SEQ ID NO: 26101 - protein, 255 aa, Neisseria meningitidis
MALAKRIIPCLDVKDGRVVKGVNFIGLRDAGDPVEAAKRYNGEGADELTFLDITASSDNRDTILHIIEEVAGQVFIPLTVGGGVRTVADIRRLLNAGADKVSINTAAVTRPDLIDEAAGFFGSQAIVAAVDAKAANPENTRWEIFTHGGRNPTGLDAVEWAVEMQKRGAGEILLTGMDRDGTKQGFNLPLTRAVAEAVDIPVIASGGVGNVRHLIEGITEGKADAVLAAGVFHFGEIAIREAKRAMREAGIEVRL

SEQ ID NO: 26102 - protein, 497 aa, Neisseria meningitidis
MLSGLPIPKDIARPPETILVNITPQETRVAVLEENNICELHIERNSEHSLVGNIYLGVVRRVLPGMQSAFIDIGLERAAFLHIVDVLEQRRNPEETQRIEHMLFEGQSVLVQVIKDPINTKGARLSTQISLAGRFLVHLPQEDHIGVSQRIEDDAERSSLRERLDKLLPENACRGYIIRTNAENATDEQLQSDIDYLTKVWEHIQEQAKIRPPETLLYQDLPLSLRVLRDMVGCDTQKILVDSTVNHGRMTRFAEQYVHGALGRIELFKGERPLFETHNVEQEISRALQPRVNLNFGSYLIIESTEAMTTIDVNTGGFVGARNFDETIFRTNLEACHTIARELRLRNLGGIIIIDFIDMAQESHREAVLQELAKALAFDRTRVTLHGFTSLGLVELTRKRSRENLNQVLCEPCPSCQGRGRLKTPQTVCYEIQREIVREARRYDAESFRILAASNVIDLFLDEESQSLAMLIDFIGKPISLAVETAYTQEQYDIVLM

SEQ ID NO: 26103 - protein, 316 aa, Neisseria meningitidis; identical to SEQ ID NO: 3819

SEQ ID NO: 26104 - protein, 129 aa, Neisseria meningitidis; identical to SEQ ID NO: 24315

SEQ ID NO: 26105 - protein, 457 aa, Neisseria meningitidis
MSNPFSSLGLGTELVSALTAQGYENPTPIQAAAIPKALAGHDLLAAAQTGTGKTAAFMLPSLERLKRYATASTSPAMHPVRMLVLTPTRELADQIDQNVQSYIKNLPLRHTVLFGGMNMDKQTADLRAGCEIVVATVGRLLDHVKQKNISLNKVEIVVLDEADRMLDMGFIDDIRKIMQMLPKQRQTLLFSATFSAPIRKLAQDFMNAPETVEVAAQNTTNANVEQHIIAVDTFQKRNLLERLIVDLHMNQVIVFCKTKQSVDRVTRELVRRNLSAQAIHGDRSQQSRLETLNAFKDGSLRVLVATDIAARGLDIAELPFVINYEMPAQPEDYVHRIGRTGRAGADGVAISLMDESEQKMFESIKELTGNKLLIERIEGFEPQWWEQGGAKPEKTETSEPRQRNRYESARAQREKNTRPETTANDAGAACGKIAGRSRRSRREHRTCALLQPRYGVK

SEQ ID NO: 26106 - protein, 628 aa, Neisseria meningitidis
MPSEAVFQMIDMNTENRSPEQFDIPLFLKNLPKLPGVYRFFDEGGKVLYVGKAVNLKRRVSGYFQKNDHSPRIALMVKQVHHIETTITRSEAEALILENNFIKALSPKYNILFRDDKSYPYLMLSGHQYPQMAYYRGTLKKPNQYFGPYPNSNAVRDSIQILQKVFMLRTCEDSVFEHRDRPCLLYQIKRCTAPCVGHISEEDYRDSVRQAATFLNGKTDELTRTLQHKMQTAAANLQFEEAARYRDQIQALGIMQSNQFIDSKNPNNPNDIDLLALAVSDGIVCVHWVSIRGGRHVGDKSFFPDTKNDPEPNGQDYAEAFVAQHYLGKSKPDIIISNFPMPDALKEALESEHGKQMQFVTKTIGERKVWLKMAEQNAQMAIAQRRLQQSSQQHRIDELAKILGMDSDGLNRLECFDISHTQGEATIASCVVYDEQNIQPSQYRRYNITTAKPGDDYAAMREVLTRRYGKMQEAEANGETVKWPDVVLIDGGKGQIGIAVSVWEELGLHIPLVGIAKGPERKAGMEELILPFTGEVFRLPPNSPALHLLQTVRDESHRFAITGHRKKRDKARVTSSLSEIPGIGSKRRQALLTRFGGLRGVIAASREDLEKVEGISKALAETIYEHLH

SEQ ID NO: 26107 - protein, 197 aa, Neisseria meningitidis
MASIQNLYETVVGVLGDQASKVISALGEITVECLPEHYISVMTALRDHEELHFELLVDLCGVDYSTYKNEVWQGKRFAVVSQLLSVKNNQRIRVRVWVSDDDFPVVESVVDIYNSADWYEREAFDMYGIMFNNHPDLRRILTDYGFVGHPFRKDFPISGYVEMRYDEEQKRVIYQPVTIESREITPRIVREENYGGQ

SEQ ID NO: 26108 - protein, 183 aa, Neisseria meningitidis; identical to SEQ ID NO: 1696

SEQ ID NO: 26109 - protein, 174 aa, Neisseria meningitidis
LRSSEMDILLKYWKPVGVLLLIVLIFTAWRFDRAEKYRMGREAAAAEISNRLKDGYIEQAKQARSAEQKAAAAFAERQTKLEEEKQNAEKTVAAMRLELNRLRHYAAAQNRSRNLPATTTAATASDGASDSQGWLLFGQCAEKYAGLAETADGHAADLREWQAYGHAVSSQRAE

SEQ ID NO: 26110 - protein, 119 aa, Neisseria meningitidis
MYFVDRTAVVLKPTVRFLEWLKSTDENMPDLTIEQLRANCSVFLVPQFDEPEAVVSYFDERYRQIFEAELAGWDIDKDKWPQDMGLKAFWEFFDIEIHDMVLDMEEADLNITPVFDNMM

SEQ ID NO: 26111 - protein, 100 aa, Neisseria meningitidis; identical to SEQ ID NO: 1675

SEQ ID NO: 26112 - protein, 312 aa, Neisseria meningitidis; identical to SEQ ID NO: 5589

SEQ ID NO: 26113 - protein, 263 aa, Neisseria meningitidis
MARHPYRRLRPAKSGFPEVGISEEGNIRSLHLGSDTIQSSMNLDHPSELVLSYSRAMMGWLLFTDALPQHITQIGLGGGSFARWIDTYLPDTRQTAVDINPQVIAIARSLFELPFEGEKFEIIEADGAEYIKVFRHNTDVILVDGFDGEQIIDALVEEPFFRDCRNALSSDGIFVTNWWSGDKRYQRFIERLLSVFEGRVLELPAESHGNVAVMAFQSSPKEQNIDKLKKRADKLSNAYGLDFHRMLAGLKASNPNNGKHFHL

SEQ ID NO: 26114 - protein, 160 aa, Neisseria meningitidis; identical to SEQ ID NO: 1608

SEQ ID NO: 26115 - protein, 410 aa, Neisseria meningitidis
MPSAHYPEMSEKLMAVLMAMLVTLMPFSIDAYLPAIPEMAQSLNADVHRIEQSLSLFMFGTAFGQVVGGSVSDIKGRKPVALTGLIVYCLAVAAIVFASSAEQLLNLRVVQAFGAGMTVVIVGAMVRDYYSGRKAAQMFALIGIILMVVPLVAPMVGALLQGLGGWQAIFVFLAAYSLVLLGLVQHFLPKPAVGGKIGRDVFGLVAGRFKRVLKTRAAMGYLFFQAFSFGSMFAFLTESSFVYQQLYRVTPHQYAWAFALNIITMMFFNRVTAWRLKTGAHPQSILLWGIVVQFAANLSQLAAVLFFGLPPFWLLVACVMFSVGTQGLVGANTQACFMSYFKEEGGSANAVLGVFQSLIGAGVGMAATFLHDGSATVMAATMTASTSCGIALLWLCSHRAWKENEQSEYL

SEQ ID NO: 26116 - protein, 256 aa, Neisseria meningitidis
MKITTWNVNSLNVRLPQVQNLLADNPPDILVLQELKLDQDKFPAAALQMMGWHCVWSGQKTYNGVAIVSRNAPEDVHIVLPALPDDPQRRVIAATVGGVRVINVYCVNGEALDSPKFKYKEQWFAALTEFVRDEMTRYGKLVLLGDFNIAPADADCYDPEKWHEKIHCSSVERQWFKNLLDLGLTDSLRQVHPEGAFYTWFDYRGAMFQRKLGLRIDHILVSPAMAAALKDVRVDLETRALERPSDHAPVTAEFDW

SEQ ID NO: 26117 - protein, 39 aa, Neisseria meningitidis; identical to SEQ ID NO: 7406

SEQ ID NO: 26118 - protein, 391 aa, Neisseria meningitidis; identical to SEQ ID NO: 7218

SEQ ID NO: 26119 - protein, 378 aa, Neisseria meningitidis
MKNISLSPPAMLGILGGGQLGRMFTVAAKTMGYKVTVLDPDPDAPAAEFADRHLCAPFDNQTALEELAKCAAVTTEFENVNADAMRFLAKHTNVSPSGDCVAIAQNRIQEKSWIRKAGLQTAPYQAICKAEDITEESIQFLPGILKTATLGYDGKGQIRVKTVDELKAAFAEHRGVDCVLEKMVDLRGEISVIVCRLNNDNVQTFDPAENIHENGILAYSIVPARLSADIQQQARQMAQRLADELNYVGVLAVEMFVVGDTHELVVNEIAPRPHNSGHHTVDACAADQFQQQVRLMCNLPPADTKLLSSCCMANILGDVWQEDGGEPDWFPLQSRPDAHLHLYGKKTAHKGRKMGHFTVLTTDSDTAFQEAKKLHQSL

SEQ ID NO: 26120 - protein, 650 aa, Neisseria meningitidis
MRFAVALLSLLGIASVIGTVLQQNQPQTDYLVKFGPFWAQIFGFLGLYDVYASAWFVVIMMFLVVSTSLCLIRNVPPFWREMKSFREKVKEKSLAAMRHSSLLDVKIAPEVAKRYLEVQGFQGKTINREDGSVLIAAKKGTMNKWGYIFAHVALIVICLGGLIDSNLLLKLGMLTGRIVPDNQAVYAKDFKPESILGASNLSFRGNVNISEGQSADVVFLNADNGILVQDLPFEVKLKKFHIDFYNTGMPRDFASDIEVTDKATGEKLERTIRVNHPLTLHGITIYQASFADGGSDLTFKAWNLGDASREPVVLKATSIHQFPLEIGKHKYRLEFDQFTSMNVEDMSEGAEREKSLKSTLNDVRAVTQEGKKYTNIGPSIVYRIRDAAGQAVEYKNYMLPVLQEQDYFWITGTRSGLQQQYRWLRIPLDKQLKADTFMALREFLKDGEGRKRLVADATKGAPAEIREQFMLAAENTLNIFAQKGYLGLDEFITSNIPKEQQDKMQGYFYEMLYGVMNAALDETIRRYGLPEWQQDEARNRFLLHSMDAYTGLTEYPAPMLLQLDGFSEVRSSGLQMTRSPGALLVYLGSVLLVLGTVLMFYVREKRAWVLFSDGKIRFAMSSARSERDLQKEFPKHVESLQRLGKDLNHD

SEQ ID NO: 26121 - protein, 346 aa, Neisseria meningitidis
MDISDFDFTLPEKLIAQHPPEVRGSSRLLVALPDMPLQDRVFGDLQDYVEAGDVLVFNNTKVMKARLFGQKDSGGRIEALIERVLDNHTALAHIRSSKSPKPGMGLVFEGGIRAVTVGREGELFCLRFEGGQTVYELLEQNGHLPLPPYIERAADADDDSRYQTVYAKYQGAVAAPTAGLHFTEELLRRLKDKGAVTAEVTLHVGAGTFQPVRVDKIEEHKMHSEWFEVPSETAAAVEAAKARGNKVWAVGTTSMRALESAARATGRLKAGQGDTDIFITPGYRFNVVDRLVTNFHLPKSTLLMLVSAFSGMGHIRAAYRYAVEREYRFFSYGDAMVLGRNEGVVR

SEQ ID NO: 26122 - protein, 76 aa, Neisseria meningitidis
VEDFSVVIGYDEIKAKNHSLSAGQYFEVKIDYVDISADEFAQKMAGFSADLDKLFAESAELEKEIKDRLAMLKFNS

SEQ ID NO: 26123 - protein, 494 aa, Neisseria meningitidis; identical to SEQ ID NO: 7079

SEQ ID NO: 26124 - protein, 431 aa, Neisseria meningitidis
MSVIQDLQSRGLIAQTTDIEALDALLNEQKISLYCGFDPTADSLHIGHLLPVLALRRFQQAGHTPIALVGGATGMIGDPSFKAAERSLNSAETVAGWVESIRSQLTPFLSFEGGNAAIMANNADWFGKMNCLDFLRDIGKHFSVNAMLNKESVKQRIDRDGAGISFTEFAYSLLQGYDFAELNKRHGAVLEIGGSDQWGNITAGIDLTRRLNQKQVFGLTLPLVTKSDGTKFGKTEGGAVWLNAKKTSPYQFYQFWLKVADADVYKFLKYFTFLSIEEIDAVEAKDQASGSKPEAQRILAEEMTRLIHGEEALAAAQRISESLFAEDQSSLTESDFEQLALDGLPTFEVSESLNVVETLVKTGLASSNKEARGFVNNKAVLLNGKPAEANNPNHAAERPDDACLLTDEHKRFGKYTILRRGKRNHALLVWK

SEQ ID NO: 26125 - protein, 151 aa, Neisseria meningitidis; identical to SEQ ID NO: 4206

SEQ ID NO: 26126 - protein, 205 aa, Neisseria meningitidis
MNMKNNDCFRLKDSQSGMALIEVLVAMLVLTIGILALLSVQLRTVASVREAETQTIVSQITQNLMEGMLMNPTIDSDSNKKNYNLYMGNHHTLSAVDGDFQVDAIKTKTQLAEAQLKRFSYELKNALPDAAAIHYAVCKDSSGNAPTFSGNAFSSNCDNKANGDTLIKVLWVNDSAGDSDISRTNLEVSGDNIVYTYQARVGGRE

SEQ ID NO: 26127 - protein, 462 aa, Neisseria meningitidis
MSTRTEHDTMGNVEVPSEAYWGAQTQRSRNNFKIGGETLPQPLIYALALVKKAAAATNVSLGRIKPEQADLITQAADDVLNGRLDGQFPLVVWQTGSGTQSNMNMNEVLANRANEIAGTGLAAYQPVHPNDHVNHAQSTNDAFPTAIHVAAAIEINRHLIPAVKALRDTLDKKAQAFAPIVKIGRTHLQDATPLTLGQEFSGYVSQLDHGLGRLNDALKDLYELALGGTAVGTGLNSHPEYAEKAAAKLAELSGLPFVSAPNKFEALGGRDAAVAASGALKTLAASLNKIANDIRWLASGPRCGLGEIKIPENEPGSSIMPGKVNPTQCEAMTMVCCQVFGNDVTIGMAGASGNFELNVYMPVIAYNLLQSIRLLGDACNSFNEHCAVGIEPVPEKIDYFLHHSLMLVTALNRKIGYENAAKVAKTAYKNNKSLRETAVELGLLTGEEFDELVVPADMVHPR

SEQ ID NO: 26128 - protein, 263 aa, Neisseria meningitidis; identical to SEQ ID NO: 4116

SEQ ID NO: 26129 - protein, 322 aa, Neisseria meningitidis
MAKKTTKTIHYLRAQQNHSLFDLEVALRRVLSAAPTVQDTQIEQYNQLTQIMHRTLDPKDVKGNSIGGLLIHIGSGTKDEHIRTMSNRPVQQDDHGGTQAPPSGYSFLRKEAFLYIVGHHVIFCGHGFLSASTVASYLSLLSNKLRENNPDIVQFNIEFKAVGNCDKLSLIQQHGVKSILLDASAYQLSRNRLYQDSRSTIAKALGKVGSVFTSELSDEELEAQSEIHINLEVLLNGNSRASIEAQSLMQEQAEEIIDDETVNQGFSITTQQGEVIQPSDVKLSKSVRIGRYDEANSLLPDSAFTAISEYFLELQSRNLTEQ

SEQ ID NO: 26130 - protein, 363 aa, Neisseria meningitidis; identical to SEQ ID NO: 22857

SEQ ID NO: 26131 - protein, 394 aa, Neisseria meningitidis; identical to SEQ ID NO: 19878

SEQ ID NO: 26132 - protein, 658 aa, Neisseria meningitidis
MHPIETPDKTFHDGDGVSELGTILPAWWLNQVQSELLAVLTAAGIQPDKSQPNQLLAALNRLAVVTTGDQTITGQKTFTAQTQFQSGIHLSANQTNWNGGHKAYIGADADNAHIVFGDDTLRLHGANNRISYNNHDIFHKANKPRFAEDIEGKPNTLSGYGIGNFKVETFRGDLNTLKTDGIYSLPTAGGSSNLPVENTACHIQVIAGTKHGWCRQLGYPAYTSDVYERHQTSSANDNWSAWKKLNSDGIPVGAIVSFPKAVRNPAGYLKANGTTFAQNTFPDLYRALGNSNRLPDLSRTDIGITAWFPSDQIPTGWLAFDDIRTRVTETAYPELYRLLTGKYGSIQNVPQAEDRFIRNAANGLAVGTKQEDEIKRHVHKVFSHWVNHPHAAALGYEDHNERQRSALVSTWTDENLNDNGFLTPRPDSKMATGGDENRPKALVLKLCIKAADTLGEAVFWIKSHGETVNAGALDAGTLAQNLQDKADRAHTHTAAQIQGLDEKISTAVAAQFTRQTIGGVDIVRFPDGTMIQTGSYRFTRSGSPIENEVVFPVAFADGNVKCFVSERHSGRVTGDRRQHNWLFIRAKNHAAAIITNWYEGSCDWMAIGKAASGNAASSLIVPEIPETNEEPQRESGRTSTGPRNRRRHRDGLLEALQD

SEQ ID NO: 26133 - protein, 118 aa, Neisseria meningitidis
MNEHNLLIFCLKDNVSISEYTEMIDWAYKNIQSETVVEITENQIIEYQNRGLWRLVSEITDNWLFGPSEGDWLIDKESILAVKEKLQNSDFSTEPLVKNIIHVLEYAIKNKKTVIFHF

SEQ ID NO: 26134 - protein, 301 aa, Neisseria meningitidis; identical to SEQ ID NO: 1112

SEQ ID NO: 26135 - protein, 347 aa, Neisseria meningitidis
MSKKIKVGIVGATGYTGVELLRLLAAHPDVEVAAVTSRSEAGTAVADYFPSLRGVYGLAFQTPDEAGLEQCDIVFFATPNGIAMKDAPRLIEQGVRVIDLSADFRIRDIPTWEHWYGMTHAAPGLVSQAVYGLSELNREAVAQARLVANPGCYPTCVSLPLVPLLRQCRLKPGMPLIADCKSGVSGAGRKGNVGSLLCEVGDNFKAYGIAGHRHLPEIRQTIAGLQDGIAEGFVFTPHLVPMIRGMHATVYLHLSDGICPETVLRDYYRDSPFVDILPAGSTPETRSVRGANLCRISIQQAAQSDVWVVLSVIDNLVKGAAGQAVQNMNIMFGLKETHGLDAIPLLP

SEQ ID NO: 26136 - protein, 230 aa, Neisseria meningitidis; identical to SEQ ID NO: 1058

SEQ ID NO: 26137 - protein, 321 aa, Neisseria meningitidis; identical to SEQ ID NO: 6649

SEQ ID NO: 26138 - protein, 138 aa, Neisseria meningitidis; identical to SEQ ID NO: 671

SEQ ID NO: 26139 - protein, 52 aa, Neisseria meningitidis
MKTFEKTWSAQYRDMEISVRIFWNLERTGAEVYINGRRVYHNEAEMASASLR

SEQ ID NO: 26140 - protein, 419 aa, Neisseria meningitidis; identical to SEQ ID NO: 12451

SEQ ID NO: 26141 - protein, 549 aa, Neisseria meningitidis; identical to SEQ ID NO: 4417

SEQ ID NO: 26142 - protein, 157 aa, Neisseria meningitidis
MKKQITEATMMLSIIAPAMANGLDNQAFEDQVFHTRADAPMQLAELSQKEMKETEGAFLPIVAGALMGGAISAWANHGISKIKTGQFASTRSTLAATAGGMIGGGYSSAMLRGAGITTSVFARSAWKGGNAIPNAVIRANGAALNQSSSAAMGKHRR

SEQ ID NO: 26143 - protein, 753 aa, Neisseria meningitidis
LKVTKRDGRLEAIDLDKIHRVVTWAAEGLENVSVSQVELKSHIQFYNGIRTDDIHETIIKAAADLISEDTPDYQYLAARLAIFHLRKIAYGEYEPPHLYDHVKKLTDAGKYDRHILEDYSREEFDELNAYIDHERDMSFSYAAVKQLEGKYLVQNRVTRQIYETPQFLYVLVAMCLFSKYPKETRLDYVKRFYDAVSTFKVSLPTPIMSGVRTPTRQFSSCVLIECDDSLDSINATTSAIVKYVSQRAGIGINAGRIRGLDSEIRGGEARHTGCIPFFKMFQAAVKSCSQGGVRGGAATLFYPLWHIEAESLLVLKNNRGVEDNRIRQLDYGVQINRLLYIRLIKGGNITLFSPNEVPGLYEAFFADQDEFERLYTKYEQDPDIRKRIIPAADLFSTLMQERAGTGRIYIQNVDHCNTHSPFDPRVAPVHQSNLCMEIALPTKPLDNINDPNGEIALCTLSAFNLGALNSLDELEGLADLTVRALDALLDYQGYPVEAARTSTMGRRSLGIGVINYAYYLAKNGVRYSDGSALGLTHRTFEAIQYYLLKASANLAKEYGACTLFNQTVYSQGKLPIDTYKKDLDAVCNEPLHYDWESLRADIVKYGLRNSTLTALMPSETSSQIANATNGIEPPRGLVTVKASKDGILKQVVPEFETLKNAYETLWQLPGNEGYLKLVGVMQKFVDQAISANTAYDPGKFEGGKVSMKQMLKDLLTAYKYGVKTLYYHNTRDGADDTQTDIQDDGCAGGACKI

SEQ ID NO: 26144 - protein, 260 aa, Neisseria meningitidis
MKIYTKETLIAALKEIRDLNWVKSARPGNDGSVGNTLEDLLGIEENNLPIPNAAEWELKAQRKDSSSLLTLFHMEPSPTSLKLVPNLLLPNYGWPHKNAGEKYPNTEKSFRQTINAKNYSNRGFKVHVNRDEEKVEVSFNQQFITEENILWKQYVNEKIGLNELSPQPYWGFNDLFHKAGTKLHNCFYIQAARKRANGEEYFHYQDIFMLKELSKEKFIQAIEDGHVYVDFDARTGHNHGTKFRIKPSLIPSLYSEVIIL

SEQ ID NO: 26145 - protein, 55 aa, Neisseria meningitidis; identical to SEQ ID NO: 2625

SEQ ID NO: 26146 - protein, 287 aa, Neisseria meningitidis; identical to SEQ ID NO: 14097

SEQ ID NO: 26147 - protein, 154 aa, Neisseria meningitidis
MKCPFCAHPDTRVADSRLMEERNAVRRRRHCPSCGKRFGTLETAELKMPAVIGPDKKRSPFNAQRLRNDLTAAARKSALTPEQIDETVRLTEHRLYTSGLRDIPSAELADMVLKELLEHNTEAAVRFAALHKRFDNPADFASWLAQAVKTGGKA

SEQ ID NO: 26148 - protein, 298 aa, Neisseria meningitidis
MFRLQFGLFPPLRTAMHILLTALLKCLSLLPLSCLHTLGNRLGHLAFYLLKEDRARIVANMRQAGMNPDPKTVKAVFAETAKGGLELALAFFKKPEDIETMFKSVHGWEHVQQALDKGEGLLFITPHIGSYDLGGRYISQRLPFPLTAMYKPPKIKAIDKIMQAGRVRGKGKTAPTSIQGVKQIIKALRSGEATIVLPDHVPSPQEGGEGVWVDFFGKPAYTMTLAAKLAHVKGVKTLFFCCERLPGGQGFDLHIRPVQGELNGDKAHDAAVFNRNAEYWIRRFPTQYLFMYNRYKMP

SEQ ID NO: 26149 - protein, 162 aa, Neisseria meningitidis; identical to SEQ ID NO: 2752

SEQ ID NO: 26150 - protein, 287 aa, Neisseria meningitidis; identical to SEQ ID NO: 14921

SEQ ID NO: 26151 - protein, 384 aa, Neisseria meningitidis; identical to SEQ ID NO: 4652

SEQ ID NO: 26152 - protein, 160 aa, Neisseria meningitidis; identical to SEQ ID NO: 515

SEQ ID NO: 26153 - protein, 354 aa, Neisseria meningitidis; identical to SEQ ID NO: 4529

SEQ ID NO: 26154 - protein, 213 aa, Neisseria meningitidis
MPSEKPMNRRIFLLGAGALLLTACGRKSARTHAKIPEGSTVLALGDSLTFGYGANPGESYPAQLQKLTGWNIVNGGVSGDTSAQALSRLPALLARKPKLVLVGIGGNDFLRKVPEEQTRANIAKIIETVQKENIPAVLVGVPHITLGALFGHLSDHPLYEDLSEEYGIPLFGGAWAEILGDNNLKSDQIHANGKGYRKFAEDLNQFLRKQGFR

SEQ ID NO: 26155 - protein, 247 aa, Neisseria meningitidis
MPDAVKKVYLIHGWGANRHVFDDLMPRLPATWAVSAVDLPGHGDAPFVQPFDIEAAADAVAAQIDTPADILGWSLGGLVALYLAARHPDKVRSLCLTASFARLTAAEDYPEGLAAPALGKMVGAFRSDYAKHIKQFLQLQLLHTPDADGIIGRILPDLARCGTPSALQEALDAAERADARHLLDKIDVPVLLVFGGKDAITPPRMGEYLHRRLKGSRLVVMEKAAHAPFLSHAEAFAALYRDFVEGV

SEQ ID NO: 26156 - protein, 248 aa, Neisseria meningitidis
VQPETSAQYQHRFAQAIRGGEAADGLPQDRLNVYIRLIRNNIHSFIDRCYTETRQYFDSEEWSRLKEGFVRDAHAQTPYFQEIPGEFLQYCQSLPLSDGILALMDFEYTQLLAEVAQIPDIPDIHYSNDSKYTPSPAAFIRQYRYDVTDDLHEAETALLIWRNAEDDVMYQTLDSFDMMLLEIMGSSALSFDTLAQTLVEFMPEDDNWKNILLGKWSGWTEQRIIIPSLSAISENMEGNSPGQNHLSA

SEQ ID NO: 26157 - protein, 278 aa, Neisseria meningitidis
MIDLHCHSTVSDGMLSPAEVVRLAHQNGCTLLALTDHDHTGGIAEARAEADRLGLRLINGVEISVTWRGRTIHVVGLDFDEQDENLQNLLAQVRQGRLKRLEAIAAKLEKRGISGAYDGALALAANKEMVSRTHVAEFLIRVGHVKNKQQAFTKYLGDGKSCAVRHEWATLEDCVSAVNGAGGMAVIAHPMRYDLSATAKRNLFEEFKNLGGAGIEVHSGNCCKNDRLNYAFLAERFGMLASAGSDFHRLNDFSGGILGACPELPENCRPVWAHFSRH

SEQ ID NO: 26158 - protein, 375 aa, Neisseria meningitidis; identical to SEQ ID NO: 17081

SEQ ID NO: 26159 - protein, 279 aa, Neisseria meningitidis
MKQLRDNKAQGSALFTLVSGIVIVIAVLYFLIKLAGSGSFGDVDATTEAATQTRIQPVGQLTMGDGIPVGERQGEQIFGKICIQCHAADSNVPNAPKLEHNGDWAPRIAQGFDTLFQHALNGFNAMPAKGGAADLTDQELKRAITYMANKSGGSFPNPDEATPADNAASGTASAPADSAAPAEAKAEDKGAAAPAVGVDGKKVFEATCQVCHGGSIPGIPGIGKKDDWAPRIKKGKETLHKHALEGFNAMPAKGGNAGLSDDEVKAAVDYMANQSGAKF

SEQ ID NO: 26160 - protein, 202 aa, Neisseria meningitidis; identical to SEQ ID NO: 597

SEQ ID NO: 26161 - protein, 100 aa, Neisseria meningitidis; identical to SEQ ID NO: 1023

SEQ ID NO: 26162 - protein, 485 aa, Neisseria meningitidis; identical to SEQ ID NO: 3359

SEQ ID NO: 26163 - protein, 436 aa, Neisseria meningitidis
MNTPHPRPKIAVIGAGWAGLSAAVTLARHADVTLFEAGRQAGGRARTLAGNTDGFGFLDNGQHILLGAYRGVLRLMKTIGSDPRAAFLRVPLHWHMHGGLQFRALPLPAPLHILGGVLLARRVPSAFKAKLLADMSDLQKSARLGQPDTTVAQWLKQRNVPRAAVMQFWQPLVWGALNTPLETASLRVLCNVLSDGVLTKKSGSDYLLPKQDLGAIVAEPALAELQRLGADIRLETRVCRLNTIPDGKVLVNGEAFDAAVPATAPYHAAALLPEGTPEHVQTAYQNLRYHAITTVYLRYAEPVRLPAPLTGLADGTAQWLLCRGRLGLPENEVSAVISVSDRVGAFTNRAWADKVHADLKRILPHLGEPEAVRVITEKRATTAADAPPPDLSWLHRHRIFPAGDYLHPDYPATLEAAVQSGFAAAETCLQSLSDAV

SEQ ID NO: 26164 - protein, 463 aa, Neisseria meningitidis
MTPSALKKTVLLLGTAFAAASAQASGYHFGTQSVNAQSTANAAAAEAADASTIFYNPAGLTKLDSSQISVNANIVLPSIHYEADSATDFTGLPVQGSKSGKITKTTVAPHIYGAYKVNDNLTVGLGVYVPFGSATEYEKDSVLRHNINKLGLTSIAVEPVAAWKLNDRHSFGAGIIAQHTSAELRKYADWGIMEKAKALKETPPNPTKAAQIKADGHADVKGSDWGFGYQLAWMWDINDRARVGVNYRSKVSHTLKGDAEWAADGAAAKAMWSTMLAANGYTANEKARVKIVTPESLSVHGMYKVSDKADLFGDVTWTRHSRFDKAELVFEKEKTVVKGKSDRTTITPNWRNTYKVGFGGSYQISEPLQLRAGIAFDKSPVRNADYRMNSLPDGNRIWFSAGMKYHIGKNHVVDAAYTHIHINDTTYRTAKASGNDVDSKGASSARFKNHADIIGLQYTYKFK

SEQ ID NO: 26165 - protein, 321 aa, Neisseria meningitidis; identical to SEQ ID NO: 12372

SEQ ID NO: 26166 - protein, 165 aa, Neisseria meningitidis
VFQTAFNLQKYTMITDTISNATRYAALHPDFAEAFHLLQTLDFAKLPDGQVPCKNPNIRIFIGSEPMRTKGEAKPEAHLKHIDIQTPIDGSETYGWIDRGRLKNGLGYNEKRDIEFFNCEPETWLTLEPGEFALFFPNDAHAPLVGDKANIRKAVFKIRIETERL

SEQ ID NO: 26167 - protein, 264 aa, Neisseria meningitidis; identical to SEQ ID NO: 6469

SEQ ID NO: 26168 - protein, 178 aa, Neisseria meningitidis; identical to SEQ ID NO: 2084

SEQ ID NO: 26169 - protein, 591 aa, Neisseria meningitidis; identical to SEQ ID NO: 15053

SEQ ID NO: 26170 - protein, 193 aa, Neisseria meningitidis; identical to SEQ ID NO: 1600

SEQ ID NO: 26171 - protein, 124 aa, Neisseria meningitidis
MFLEGQLNWKDDDVKVLLVNTTSYTVNVATHKFLSDISSSARVTQPALLTAKTTTGGAADANDVTFTSVSGETVGAIVGFKDTGTESTSPLLFFIDTATGLPLTPNGGDVIVTWDNGINKIFRL

SEQ ID NO: 26172 - protein, 300 aa, Neisseria meningitidis
MDTAKKDILGSGWMLVAAACFTIMNVLIKEASAKFALGSGELVFWRMLFSTVALGAAAVLRRDTFRTPHWKNHLNRSMVGTGAMLLLFYAVTHLPLATGVTLSYTSSIFLAVFSFLILKERISVYTQAVLLLGFAGVVLLLNPSFRSGQETAALAGLAGGAMSGWAYLKVRELSLAGEPGWRVVFYLSVTGVAMSSVWATLTGWHTLSLSSAVYLSGIGVSALIAQLSMTRAYKVGDKFTVASLSYMTVVFSALSAAFFLGEELFWQEILGMCIIILSGILSSIRPTAFKQRLQSLFRQR

SEQ ID NO: 26173 - protein, 394 aa, Neisseria meningitidis
MTPQVLTILGSTGSIGESTLDVVSRHPEKFRVFALAGHKQVEKLAAQCQTFRPEYAVVADAEYAARLEALLKRDGTATQVLHGAQALVDVASADEVSGVMCAIVGAVGLPSALAAAQKGKTIYLANKETLVVSGALFMETARANGAAVLPVDSEHNAVFQVLPRDYTGRLNEHGIASIILTASGGPFLTADLNTFDSITPDQAVKHPNWRMGRKISVDSATMMNKGLELIEAHWLFNCPPDKLEVVIHPQSVIHSMVRYRDSSVLAQLGNPDMRTPIAYCLGLPERIDSGVGDLDFDALSALTFQKPDFDRFPCLKLAYEAMNAGGAAPCVLNAANEAAVAAFLDGQIKFTDIAKTVAHCLSQDFSDGIGDIGGLLAQDARTRAQARAFIGTLR

SEQ ID NO: 26174 - protein, 120 aa, Neisseria meningitidis; identical to SEQ ID NO: 6941

SEQ ID NO: 26175 - protein, 230 aa, Neisseria meningitidis; identical to SEQ ID NO: 675

SEQ ID NO: 26176 - protein, 156 aa, Neisseria meningitidis; identical to SEQ ID NO: 955

SEQ ID NO: 26177 - protein, 165 aa, Neisseria meningitidis
MNNLPVADLLVFAIIAACIVLSAMRGVIAEAGSMAAWVVSFFFAKLFAAPFADLAFASFQPRLFALALSFISLFVIACLIQKMLRSLLTGAVSAVGLGFANRILGGVFGALKGVLIVTLLVMLASKTDLPDTEEWQQSYTIPFFVSLSEAVLNHSGGTAETPEDD

SEQ ID NO: 26178 - protein, 143 aa, Neisseria meningitidis
MSSNAWLFWALASAGFASLTAIFAKMGLQGIDSDFATFIRTLVILAALLLFLTYTGKWQGVNGFTGRNWTFLILSGLATGASWLAYFKALQLGNASQVAPVDKFSLVLVALMAVVFLDERPNTQEWIGLGLVTAGVLVLALKR

SEQ ID NO: 26179 - protein, 153 aa, Neisseria meningitidis; identical to SEQ ID NO: 19769

SEQ ID NO: 26180 - protein, 246 aa, Neisseria meningitidis; identical to SEQ ID NO: 24130

SEQ ID NO: 26181 - protein, 83 aa, Neisseria meningitidis; identical to SEQ ID NO: 5347

SEQ ID NO: 26182 - protein, 118 aa, Neisseria meningitidis; identical to SEQ ID NO: 423

SEQ ID NO: 26183 - protein, 502 aa, Neisseria meningitidis
MTTTPANILASVDLGSNSFRLQICENNNGQLKVIDSFKQMVRFAAGLDEQKNLSAASQEQALDCLAKFGERLRGFRPEQVRAVATNTFRVAKNIADFLPKAEAALGFPIEIIAGREEARLIYTGVIHTLPPVGGKMLVIDIGGGSTEFVIGSTLNPDITESLPLGCVTYSLRFFQNKITAKDFQSAISAARNEIQRISKNMRREGWDSAVGTSGSAKSIRDVLAAEMPQEADITYKGMRALAERIIEAGSVKKAKFENLKPERIEVFAGGLAVMMAAFEEMKLDRMTVTEAALRDGVFYDLIGRGLNEDMRGQTVAEFQHRYHVSLNQAKRTAETAQTFMDSLCHAKNVTVQELALWQQYLGRAAALHEIGLDIAHTGYHKHSAYILENADMPGFSRKEQTILAQLVIGHRGDMKKMSGIIGTNEMLWYAVLSLRLAALFCRSRQDLSFPKNMQLRTDTESCGFILRIDREWLERHPLIADALEYESVQWQKINMPFKVEVV

SEQ ID NO: 26184 - protein, 103 aa, Neisseria meningitidis; identical to SEQ ID NO: 392

SEQ ID NO: 26185 - protein, 126 aa, Neisseria meningitidis
MPLKFQPQERSVVMCDFRGYEEPEMVKKRPVVVIARNRHNGKLVTVVPLSSTEPVPLADYHHKMSGNPLPDKPHIQCWAKCDMTATVGLARLDRYKPKGRDRCIPIISEEDFQAIKTAVAKAFKLY

SEQ ID NO: 26186 - protein, 315 aa, Neisseria meningitidis
MTDITPFANRLGKNIKHLMKWAKRNGIEAWRIYDRDIPQFPFAADVYGDRIHLQEYDTGWLMQPEEYEAWLAEVLEAVVFVTGFAPEQIHLKRRERQKGLQQYEKTGKTGDDFVITENGRKFWVNLDKYLDTGLFLDHRNTRKKVGETAAGKRFLNLFSYTGSFTVYAATGGAASSETVDLSNTYLDWAKRNFELNGIDTERHKIVRADVFQYLQTAYGEGRQFDLIVMDPPSFSNSKKMSDILDIQRDHKKLIDGAVKLLASDGILYFSNNLRSFVLDDLVSEQYAVKDISKQSVPEDFRNKKIHRCWEIRHKS

SEQ ID NO: 26187 - protein, 73 aa, Neisseria meningitidis; identical to SEQ ID NO: 5285

SEQ ID NO: 26188 - protein, 221 aa, Neisseria meningitidis; identical to SEQ ID NO: 11037

SEQ ID NO: 26189 - protein, 338 aa, Neisseria meningitidis
MIFSIIVPIYNVEKYLRCCVDSVLAENFADYEMILVDDGSPDGCGKICDEYAGKYPHIKVIHQENGGLSDARNAGIRAAKGDYLIFLDSDDYWADTNRSKNARGGGILFDLQQLADKKVDLILHPSSFNYRDIPKGADFSDNDFVRHFETLVEGRYYIANAWTKIVRREIIIKNNLFFPKGYIHEDFPYSLQLARFIKTFAFYDNPFYQYRVLGNSISHNIKYKNFSDMLTHLDRGVDFLVENKNSPIYGGLQKFVFDNIGYLRSISVRLYFSKNIIVVYREYFSFKEKCRKIFGAKAIHPVFIGKTAFIIGLPILRLLVPPMLYPAIKAVYQKFFSE

SEQ ID NO: 26190 - protein, 498 aa, Neisseria meningitidis
MFSNYLLSLAIWIPIAAGVLVLATGKDSRAPLARVLAFMGALAGFLVTLPLFTGFDRLSGGYQFTEFHEWIPLLKINYALGVDGISVLFIILNAFITLLVVLAGWEVIQKRPAQYMAAFLMMSGLINGAFAAQDAILFYVFFEGMLIPLYLIIGVWGGPRRVYASVKLFLYTLMGSLLMLVAMVYLYYQTGSFSIVDFQNIKQIPLGVQQLLFAAFFLSFAVKVPMFPVHTWLPDAHVEAPTGGSMVLAAITLKLGAYGFLRFILPIMPDAARYFAPVIIVLSLIAVIYIGMVALVQTDMKKLVAYSSISHMGFVTLGMFLFVDGQLDDWALKGAVIQMISHGFVSAAMFMCIGVMYDRLHTRNIADYGGVVNVMPKFAAFMMLFGMANAGLPATSGFVGEFMVIMGAVKVNFWVGALAAMTLIYGASYTLWMYKRVIFGAIHNPHVAEMKDINCREFAILAVLAVAVLGMGLYPNAFIEVVHQAANDLIAHVAQSKM

SEQ ID NO: 26191 - protein, 331 aa, Neisseria meningitidis
MKKSLIALTLAALPVAAMADVTLYGTIKAGVETSRSVAHNGAQAASVETGTGIVDLGSKIGFKGQEDLGNGLKAIWQVEQKASIAGTDSGWGNRQSFIGLKGGFGKLRVGRLNSVLKDTGDINPWDSKSDYLGVNKIAEPEARLISVRYDSPEFAGLSGSVQYALNDNAGRHNSESYHAGFNYKNGGFFVQYGGAYKRHHQVQENVNIEKYQIHRLVSGYDNDALYASVAVQQQDAKLVKENYSHNSQTEVAATLAYRFGNVTPRVSYAHGFKGSFDATNYNNDYDQVVVGAEYDFSKRTSALVSAGWLQEGKGESKFVSTAGGVGLRHKF

SEQ ID NO: 26192 - protein, 354 aa, Neisseria meningitidis
MIKSFWLENFGPISLLKADNLGKINLIIAENSKGKTFILKALYSVLKSHEEAHKGKNIRDFSEELRDKLYWTFQVEEIGDLVTRGKENPNERPLKLSMTLEDSSSVLFSFGRTTKKLIKPELYELSPRINANSIFLPPKEVLSLFDVIKKSEEEKRFGFDATYIDLVKALDIKPTKGRNYPEAAEARKDLEALFGGYVSYNDKKKAWVYEKDRQTFSINSTAEGVKKIGILDTLLGNRFLSPGSILFIDEPEANLHPKAINQFLEILFSLSKSKLGIQIFMSTHSYFVIKKLCLLARKHSESIPVFMPGKEKGQTTWVQENLQNSMPDNEIIGESIRLFREEIGVLSPETAWIG

SEQ ID NO: 26193 - protein, 527 aa, Neisseria meningitidis
MNAFTRAWHALERHYQDTRHVLLRDRFACEPDRFERMHERLDGMLFDYSKNRLGEDTLQLLCNLADAADLEGKMRALRTGAKVNNSEGRAALHTALRLPDGAGAVYADGRDVLPEIRRELNRALKFAHSLDDGSYQGTTGKRITDFVHIGIGGSDLGPAMCVQALEPFRRHIAVHFAANADPACLDAVLCRLNPETTVFCVASKSFKTPETLLNAQAVKAWYRGAGFSESETACHFCAVSADTAAAAAFGIAAERVFAMYDWVGGRYSVWSSVGLPVMVAVGGARFRELLAGAHAMDSHFFHTPPRRNIPVLMALIAVWYNNFQHADGQTAVPYSHNLRLLPAWLNQLDMESLGKSRASDGSPAVCKTGGIVFGGEGVNCQHAYFQLLHQGTRLIPCDFIVPMTAQGVEEGSSRFTVANAFAQAEALMKGKTLDEARAELADLPEAERERLTPYNLGMLMAAYEHKTFVQGAIWNVNPFDQWGVEYGKQLAKTIIGELEGGTSVHDASTEGLMAFYRECRLKGGGAA

SEQ ID NO: 26194 - protein, 597 aa, Neisseria meningitidis; identical to SEQ ID NO: 4965

SEQ ID NO: 26195 - protein, 312 aa, Neisseria meningitidis
MSIHTLKRLPSSLLLGLCLSLPSAHLFADNDILGQFLEQNMLTSSDPIEIFAESTIHPTNTQAITGGLILSSQSALVVNNKTGQILYQKNADRIMPIASISKLMSAMVVLDANLDMNETVTITPDEIDRLKGTGSRLAIGTALTRKELLHLSLMSSENRATHALGRTYPGGMGAFVAAMNRKAQSLGMYSSRFYEPTGLNFQNVSTAKDLSLMVNAAAQYPQIRTNSTSNYASVQTKNGQQNYKNSNALVREGMWNIELQKTGYIREAGRSMVVKANIQNQPVTIVLLNSPTSATRVNDARKIESWMLQQRS

SEQ ID NO: 26196 - protein, 269 aa, Neisseria meningitidis
MAKIGDFAAKSMIEIRSKRMITLLSLNNLPSKWDEIRYWLETRVCECGVMPHPNLTECEAGQFERDFWDNIGCAPEEYVRIRRAIRLLEASYPDSLNELVCAAIATPLGEMLAVFGSKGLCLLEFVGQKHLEQEIAAVQKALRGRFVFREDERTQLLRQELDLYFKGRLKTFATPLEQIGTEFQKQAWDALLAIPYGETRSYKEQAQRLGNPNAVRAVAAANGQNKVSILIPCHRVIGSDGKLTGYAGGLNRKQFLLALERGEVQTALF

SEQ ID NO: 26197 - protein, 336 aa, Neisseria meningitidis; identical to SEQ ID NO: 23140

SEQ ID NO: 26198 - protein, 304 aa, Neisseria meningitidis
MQNFGKVAVLMGGFSSEREISLDSGTAILNALKSKGIDAYAFDPKETPLSELKAQGFQTAFNILHGTYGEDGAVQGALELLGISYTGSGVAASAIGMDKYRCKLIWQALGLPVPEFAVLHDDTDFDAVEEKLGLPMFVKPAAEGSSVGVVKVKEKGRLKSVYEELKHLQGEIIAERFIGGGEYSCPVLNGKGLPGIHIIPATEFYDYEAKYNRNDTIYQCPSEDLTEAEESLMRELAVRGAQAIGAEGCVRVDFLKDTDGKLYLLEINTLPGMTSHSLVPKSAAVTGVGFADLCIEILKTAHVG

SEQ ID NO: 26199 - protein, 544 aa, Neisseria meningitidis
MTKFIFVTGGVVSSLGKGIAAASIAAILESRGLNVTMLKLDPYINVDPGTMSPFQHGEVFVTDDGAETDLDLGHYERFIDSTMTRRNSFSTGQVYENVIAKERRGDYLGGTVQVIPHITDEIKRRIHEGAAGYDVAIVEIGGTVGDIESLPFLEAIRQMRSQLGRNNTLFAHLSYVPYIAAAGEIKTKPTQHTVKEMLSIGLQPDILICRMDRTMPADERRKIALFCNVEERAIVGSYDVDSIYECPEMLHDQGIDNIITEQLQLNVQQADLTAWKKIVHAIQNPKHTVKIAMVGKYVDLTESYKSLIEALKHAGIHTETDVQITFVDSESIEKNKGDVSMLKDMDAILVPGGFGSRGVEGKIAAVRYARENNVPYLGICLGMQIALIEYARDVAGLKGANSTEFDLKCAAPVVALIDEWQTADGSVETRDESADLGGTMRLGAQEVELKAGSLAAKIYGSGHIRERHRHRYEVNNNYVPTLEQAGLVIGGVSAGRERLVETIELPNHPWFFACQFHPEFTSNPRKGHPLFTAFVKAALNNKKA

SEQ ID NO: 26200 - protein, 488 aa, Neisseria meningitidis; identical to SEQ ID NO: 2117

SEQ ID NO: 26201 - protein, 630 aa, Neisseria meningitidis; identical to SEQ ID NO: 5130

SEQ ID NO: 26202 - protein, 281 aa, Neisseria meningitidis
MNIADGRQAFPAPAKLNLDLRITGKREDGYHNIESIFCLIDLQDTVYLKLRDDGKIILHNPVDGMPQEVDLSYRAASLLQKYARNPAGVEIWLDKKIPTGAGLGGGSSDAATVLLVLNRWWQCGLTQRQLIDSGAALGADVPFFIFGKNAFARGIGDRLDEMDIPKQWYVIVKPPVHVSTAKIFTHEGLTRNSASSIMPTFQNLQPFRNDMQAVVFKEYPEVWKAYSELSRYGFALMTGSGACVFTACQDRNSAYNIYRQVSDLYEAYLAEGLSKHPWLSV

SEQ ID NO: 26203 - protein, 259 aa, Neisseria meningitidis
MFFVLSPAKNLNEKDPASVSEFTQPDLLAESEILMQQLRELALQQIAELMHVSDKIALLNAQRNAEWHTPFTPENAKQAVFMFNGDVYEGMDANTLDIGQIRYLQNHVRLLSGLYGLLRPLDLIQPYRLEMGTAFANLRGKNLYEFWGDIITNLLNDTLAQAGSNTLVNLASQEYFKSVNTKKLRTRLITPIFKDEKNGKYKIISFYAKRARGLMVRYAAEHHITDPEMLKNFNYEGYAFNDAASNESEWVFMRSEQIK

SEQ ID NO: 26204 - protein, 473 aa, Neisseria meningitidis
MTTIYNTLTRQKEPFAPIDPENVRMYVCGMTVYDYCHLGHARVMVVFDMIARWLRECGYPLTYVRNITDIDDKIIARAAENGETIGELTARFIQAMHEDADALGVLRPDIEPKATENIPQMIAMIETLIQNGKAYPAANGDVYYAVREFAAYGQLSGKSLDDLRAGERVEVDGFKRDPLDFVLWKAAKAGEPAWESPWGRGRPGWHIECSAMSENLFGDTFDIHGGGADLQFPHHENEIAQSVGASGHTCGHNHAQTHHGQSIASHVKYWLHNGFIRVDGEKMSKSLGNFFTIREVLKQYDLEVVRFFILRAHYRSPLNYSDAHLDDAKGALTRLYTTLKNTPAAEFDLSENANGYTRRFYAAMNDDFGTVEAVAVLFELAGEVNKTNDAQLAGCLKALGGIIGLLQRDPTAFLQGSAASDGLSNEEIEDLIARRKQARADKNWAESDRIRDLLNEHKIILEDNAGGTTWRRG

SEQ ID NO: 26205 - protein, 1777 aa, Neisseria meningitidis
MKTKRFKINAISLSIFLAYALTPYSEAALVRDDVDYQIFRDFAENKGKFFVGATDLSVKNKQGQNIGNALSNVPMIDFSVADVNKRIATVVDPQYAVSVKHAKAEVHTFYYGQYNGHNDVADKENEYRVVEQNNYKPHKAWNASNLGRLEDYNMARFNKFVTEVAPIAPTDAGGGLDTYKDKNRFSSFVRVGAGRQLVYEKGAYHQEGKEKGYDLRDLSQAYRYAIAGTPYKDINIDQTMNTEGLIGFGNHNKQYSAEELKQALSQDALTNYGVLGDSGSPLFAFDKQKNQWVFLGTYDYWAGYGKKSWQEWNIYKKEFADKIKQRDNAGTIKGNGEHHWNITSGTNSKIGSTAVRLAGNEKDANNGQNVTFENNGTLVLDQNINQGAGGLFFKGDYTVKGANNGITWLGAGIDVADGKKVVWQVKNPNGDRLAKIGKGTLEINGTGVNQGQLKVGDGTVILNQQADADKKVQAFSQVGIVSGRGTLVLNSPDQINPNNLYFGFRGGRLDANGNDLTFEHIRNVDEGARIVNHNTDRASTITLTGKSLITNPNSLSVHSIQNDYDEDDYSYYYRPRRPIPQGKDLYYKNYRYYALKSGGSVNAPMPENGVTENNDWVFMGYTQEEAKKNAMNHKNNQRISGFSGFFGEENGKGHNGALNLNFNGKSAQNRFLLTGGANLNGKISVTQGNVLLSGRPTPHARDFVNKSSARKDARFSKNNEVVFEDDWINRTFKATEITVNQSASLSSGRNVSNITANITATDNAKVNLGYKNGDEVCVRSDYTGYVTCNTGNLSDKALNSFGATQINGNVNLSQNAALTLGKAALWGQIQGQGNSSVSLNQHSKWHLTGDSQVHNLSLADSHIHLNNASDAQSANKYHTLKINHLSGNGHFHYLTHLAKNLGDKVLVKESASGHYQLHVQDKTGEPNQEGLNLFDASSVRDRSHLSVSLANNHVDLGALRYTIKTENGITRLYNPYAENRRRVKPAPSPATNTASQAQTDSAQIAKPQNIVVAPPSPQANQAEEAKRQQAKAEQVKRQQAEAERKSAELAKQKAEAEREARELATRQKAEQERSSAELARRHKKEREAAELSAKQKAEAEREAQALAVRRKAEAEEAKRQAAELARRHEKEREAAELSAKQRVGEEERRQTAQSQPQRRKRRAAPQDYMAASQDRPKRRGHRSVQQNNVEIAQAQAELARRQQEERKAAELLAKQRAEAEREAQALAAHRKAEAEEAKRQAAELAHRQEAERKAAELSANQKAAAEAQALAARQQKALARQQEEARKAAELAVKQKAETERKTAELAKQRAAAEAAKRQQEARQTAELARRQEAERQAAELSAKQKAETDREAAESAKRKAEEEEHRQAAQSQPQRRKRRAAPQDYMAASQNRPKRRGRRSTLPAPPSPSFDSSAYAAPRALHNPDWYENDYEEIPLDALEDEDVSESVDTSDKQPQDNTELHEKVETVSLQPRAAQPRAQAAAQADAVSTNTNSALSDAMASTQSILLDTGASLTRHIAQKSRADAEKNSVWMSNIGYGRDYASAQYRRFSSKRTQTQIGIDRSLSENMQIGGVLTYSDSQHTFDQASGKNTFVQANLYGKYYLNDAWYVAGDIGAGSLRSRLQTQQKANFNRTSIQTGLTLGNTLKINQFEIVPSAGIRYSRLSSADYKLGNDSVKVSSMSVKTLTAGLDFAYRFKVGNLTVKPLLSAAYFANYGKGGVNVGGNSFVYKADNQQQYSAGAALLYRNVTLNVNGSITKGKQLEKQKSGQIKIQIRF

SEQ ID NO: 26206 - protein, 96 aa, Neisseria meningitidis; identical to SEQ ID NO: 11797

SEQ ID NO: 26207 - protein, 171 aa, Neisseria meningitidis; identical to SEQ ID NO: 18791

SEQ ID NO: 26208 - protein, 39 aa, Neisseria meningitidis; identical to SEQ ID NO: 6291

SEQ ID NO: 26209 - protein, 336 aa, Neisseria meningitidis; identical to SEQ ID NO: 25612

SEQ ID NO: 26210 - protein, 107 aa, Neisseria meningitidis; identical to SEQ ID NO: 4856

SEQ ID NO: 26211 - protein, 328 aa, Neisseria meningitidis; identical to SEQ ID NO: 372

SEQ ID NO: 26212 - protein, 218 aa, Neisseria meningitidis
MDFEKARFNMVEQQIRPWDVLDFDVLDALAEIPRERFVDASLQGLAYADTELPLANGHKMLEPKVVARLAQGLKLTKNDTVLEIGTGSGYAAALLAKLAGRVVSDDIDAEQQNRAKAVLDGLGLDNIDYVQNNGLTELSAGAPFDAVYVGGAVNIVPDVLKEQLKDGGRMVVIVGRKPVQRALLITRKGDVFEEKVLFDTLVAHLDDKDADPFGGFDF

SEQ ID NO: 26213 - protein, 385 aa, Neisseria meningitidis; identical to SEQ ID NO: 5812

SEQ ID NO: 26214 - protein, 469 aa, Neisseria meningitidis; identical to SEQ ID NO: 8025

SEQ ID NO: 26215 - protein, 308 aa, Neisseria meningitidis
MSFAFFFPGQGSQSLGMMNGFAGHAVVKNTFAEASAILGQDLWAMINGSDAEIIGQTVNTQPIMLAAGVAVYRAYLEAGGKTPAAVAGHSLGEYTALVAAGALIFADAVKLVRLRAELMQSAVPQGVGAMAAILGLEDEQVKAICAEAAQSEVVEAVNFNSPGQIVIAGNAAAVGRAMAAAKEAGAKRALPLPVSVPSHCSLMKPAADKLAEALKTVEIKQPQIRVIHNADVAAYDDADKIKDALVRQLYSPVRWTETVNALVSDGIAESAECGPGKVLAGLAKRINKAAACSALTDAGQVAAFIETH

SEQ ID NO: 26216 - protein, 230 aa, Neisseria meningitidis
MNEILRQPSVLLFLTLAVYALAIIVRTRTGNIFCNPVLVSTVVLIAYLKILDIDYAVYHNAAQFIDFWLKPAVVVLAVPLYQNRRKIFNQWLPVIVSQLAGSVTGIVTGMYFAKWLGAEREVVLSLASKSVTNPIAIEITRSIGGIPAITAATVIIAGLVGQIAGYKMLKNTVVMPSSVGMSLGTASHAMGIAASLERSRRMAAYAGLGLTFNGVLTALIAPLLIPVLGF

SEQ ID NO: 26217 - protein, 157 aa, Neisseria meningitidis
MEQKGFTLIEMMIVVAILGIISVIAIPSYQSYIEKGYQSQLYTEMVGINNISKQFILKNPLDDNQNIKSKLEIFVSGYKMNPKIAEKYNVSVHFVNKEKPRAYSLVGVPKTGTGYTLSVWMNSVGDGYKCRDAASARAHLKTLSADAGCEAFSNRKK

SEQ ID NO: 26218 - protein, 316 aa, Neisseria meningitidis
LLNEAVDALAVREDGVYVDGTFGRGGHSRLILSRLGDAGRLIVFDKDPQAIAVAEELARSDKRVGVVHGGFASFQTALDGLGIGKVDGALFDLGISSPQIDDGSRGFSFRFDAPLDMRMDTTRGMSAAEWIAVASEQDLHEVIKNYGEERFSRQIARAIVAQRAESPIDTTRKLAQIVAQNVRTRERGQDPATRTFQAVRIFINRELEEVGAVLPQVMCRLKEGGRLAVIAFHSLEDRIVKQFVKKYSQHAPLPRWAAVREADLPEPPLKIAGRALKPGEAEIAANPRARSAVLRVAERTAGPIPEQSQRKTSEWQ

SEQ ID NO: 26219 - protein, 160 aa, Neisseria meningitidis; identical to SEQ ID NO: 4185

SEQ ID NO: 26220 - protein, 123 aa, Neisseria meningitidis; identical to SEQ ID NO: 130

SEQ ID NO: 26221 - protein, 73 aa, Neisseria meningitidis; identical to SEQ ID NO: 227

SEQ ID NO: 26222 - protein, 392 aa, Neisseria meningitidis; identical to SEQ ID NO: 633

SEQ ID NO: 26223 - protein, 284 aa, Neisseria meningitidis
MPPIPAPSAPSEHTVAWVFGQPVTDLPQDLFIPPDALKVVLGSFQGPLDLLLYLIRKQNIDVLDIPMVKITEQYLHYIAQIETYQFDLAAEYLLMAAMLIEIKSRLLLPRTEAVEDEEADPRAELVRRLLAYEQMKLAAQGLDALPRAGRDFAWAYLPLEIAVEAKLPEVYITDLTQAWLGILSRAKHTRSHEVIKETISVRAQMTAILRRLNGHGICRFHDLFNPEQGAAYVVVNFISLLELAKEGLVRIVQEVGFGEIRISLNHEGAHSDGISGTRGGRDVF

SEQ ID NO: 26224 - protein, 244 aa, Neisseria meningitidis; identical to SEQ ID NO: 1832

SEQ ID NO: 26225 - protein, 248 aa, Neisseria meningitidis; identical to SEQ ID NO: 7207

SEQ ID NO: 26226 - protein, 1041 aa, Neisseria meningitidis
MQNMKNQVRGSGMDARSNPANVSDGLQNSSGHIGTNTRYRLTKLGEQMARLPIDPKIARILLAAKKHDCMAEILVIASALSIQDPRERPLEARDAAAKAHERFTDKQSDFLAYLNIWDSFQRERDKGLSNKQLVQWCRQYFLSHLRMREWRELHHQLAQTAIEMGLTTKEAAFRRPPEIRQLTSSENQGDQDLSAKLKQKQLDKKQHRAQIRAAKEAGYEQIHRALLTGLIANVGMKSPDGNDYTGARGSRFHLFPASALFKAKPKWVMAAELVETTRLYARDVAAIQPEWIEQEAPHLVRYHYFEPHWEQKRGEVVAGERVTLYGLTVLPRRPVSYGKVAPEEAREIFIRSALVAQECDLKADFFVHNKKLIKEITELEHKSRKQDVLVDDEALFAFYHERLPDFYTADAVSDGLRPANPQQTAPSPVGEGRGEGKTVASQTNFSATTANPLPNPLPQEREQSAAASTFSDDLRPANLQQTAPSPVGEGRGEGKTVASQTNFSATTANPLPNPLPQEGEQSAAASAVSNDPQPQKQPAPQKDRLKPLPLADIRTFQAWLKTAERENPRLLFLSRDDLMQHAAAHITEEQFPKFWQTADGKFKLSYRFEPHHPLDGVTMTVPLTVLNRLHAPSLEWLVPGMLREKIQLLIKALPKQIRRICVPVPDFITKFLENNPDRQAAIIPQLAHFIAKSASDMRILEQIDQDAWAAQDLPEHCYLNLRIIDDGGQELAGGRKLHELQQQLGKAAATTFRDNTQEFERDNVTTWDIGILPESIKFARGKQQLTGYLGLQKEKDGRIALRLFDTTEAAEQAHRQGVIELMKLQLKEQVKDLNKGIQGFTQAAMLLKHINADTLRDDLTQAVCDRAFIGEDELPRNEKAFKEQIKRARSRLPAVKEALSRYLQETAAAYAELNGKLGKHPLTHLLRLRLQTLLAAGFATRTPWAQWPRLPIYLKAMTLRLEKYSSNPARDAAREADIQELEQMWQEKNDGLVKQGLPVSDDLTAFKWMIEELRVSLFAQELKTPYPVSVKRLLKMWEDLN

SEQ ID NO: 26227 - protein, 157 aa, Neisseria meningitidis; identical to SEQ ID NO: 140

SEQ ID NO: 26228 - protein, 92 aa, Neisseria meningitidis; identical to SEQ ID NO: 600

SEQ ID NO: 26229 - protein, 362 aa, Neisseria meningitidis
LTAKEREQILAYSKLVAGTVSGVVGGDVNAAAKAAEVAVKNNQLSDKEGREFDNEMTACAKQNNPQLCRKNTVKKYQNVADKRLAASIAICTDISRSTECRTIRKQHLIDSRSLHSSWEAGLIGKDDEWYKLFSKSYTQADLALQSYHLNTAAKSWLQSGNTKPLSEWMADQGYTLISGVNPRFIPIPRGFVKQNTPITNVKYPESISFDTNLKRHLANADGFSQKQGIKGAHNRTNFMAELNSRGGRVKSETQTDIEGITRIKYGIPTLDRTGKPDGGFKEISSIKTVYDPKKFSDDKILQMAQKAASQGYSTASKIAQNERTKSISERKNVIQFSETFDGIKFRSYFDVNTGRITNIHPE

SEQ ID NO: 26230 - protein, 177 aa, Neisseria meningitidis
MADFNQILTTGDVDGGIINVVNEIPAGSNHKIEWNRKLAAFQLDRVEPAIFAKPTNYGFIPQTLDEDGDELDVLLVTEQPLATGVFLEARVIGVMKFVDDGEVDDKIVCVPADDRNNGNAYKTLSDLPQQLIKQIEFHFNHYKDLKKAGTTKVESWGDAEEAKKVIKESIERWNKQA

SEQ ID NO: 26231 - protein, 503 aa, Neisseria meningitidis
MKWLKRLTVIVGTFYRYRLAGLCASLMGSGWICALLKMMPQSSKLKNEPPAVRLRLALESLGPIFIKFGQVLSTRPDLIPHDYAVELAKLQDKVPPFDARLSREQIEKSLGQPIEKLYAEFETEPVASASIAQVHKARLHSGERVAVKVLRPNLLPVIEQDLSLMRFGAGWVERLFADGKRLKPLEVVAEFDKYLHDELDLMREAANAGQLGRNFQNSNMLIVPKVFYDYCTSDVLTIEWMDGTPVADIAKLKADGIDLHKLADYGVEIFFTQVFRDGFFHADMHPGNILVAADNRYIALDFGIVGTLTDYDKRYLAINFLAFFNRDYRRVATAHIESGWVPADTRAEELEAAVRAVCEPVFNKPISQISFGLVLMRLFEVSRRFNVEIQPQLVLLQKTLLNIEGLGRQLDPDLDLWKTAKPFLVKWMNGQVGPKALWRNLKNEAPDWAQIIPSLPRKISALIDENRQQEMRDAYIHLVKVQQRQSLWLAVIAVVLLLILLLK

SEQ ID NO: 26232 - protein, 149 aa, Neisseria meningitidis
MDVQLPIEAKDIQKLIPHRYPFLQLDRITAFEPMKTLTAIKNVTINEPQFQGHFPDLPVMPGVLIIEAMAQACGTLAILSEGGRKENEFFFFAGIDEARFKRQVIPGDQLVFEVELLTSRRGIGKFNAVAKVNGQVAVEAVIMCAKRVV

SEQ ID NO: 26233 - protein, 109 aa, Neisseria meningitidis
LQALANSRTFVYDSPEDQDFFDTEKFRQRYEDWVANLCRNLGYKTRRALFKNMMSVDIWLHNGCLKISPSRHVKLEAWDAIDADDVILSLDNSPEEIGAGLKLALSRCR

SEQ ID NO: 26234 - protein, 85 aa, Neisseria meningitidis
MMKHDCINDKPKTPNQRQRILARLRQGSVTSWELTQMGILCYNTRIMELRQQGHNIVTTMEEIQNQFGETVKRGRFSLVSEGRQS

SEQ ID NO: 26235 - protein, 183 aa, Neisseria meningitidis
VNYCEFAASLPENTDNPNKHYHDTQYGFPIEDDNELFERLVLEINQAGLNWTLMLKKQQAFQTAFEGFDINTVAAFDDTDRERLLADAGIVRNRLKIDAAIFNARQIQALQQEYGSFKNWLDAHHPRSKDEWVKLFKKHFKFVGGEIVGEFLMSTGYLKGAHAESCPVYRKTLKYHPKWLDAV

SEQ ID NO: 26236 - protein, 49 aa, Neisseria meningitidis; identical to SEQ ID NO: 5144

SEQ ID NO: 26237 - protein, 287 aa, Neisseria meningitidis
MKTLLPFFGVVRVSGEDRQTFLHGQLSNDINHLQTGQACYATYNTPKGRVIANMIVVNRGGDLLLIMAQDLLEATVKRLRMFVLRAKAVFEILEDYAVGAELEASAEPLAAQEPNLAFATQQDSDGICSIALPHGGILRIAPETALPPYDAAAESAWRLHEIRSGYPWICAATKETAVAQMLNQHIIGGVHFKKGCYPGQEIIARAQYRGQVKRGLAVLSGNSAVEAGTLLTADGEEAGIVLDSVQDSENFTALTVIKFSAAQKELTAPNGSIFKAVHPFFKTENAE

SEQ ID NO: 26238 - protein, 262 aa, Neisseria meningitidis; identical to SEQ ID NO: 256

SEQ ID NO: 26239 - protein, 335 aa, Neisseria meningitidis
MSTFFRQTAQAMIAKHIDRFPLLKLDQVIDWQPIEQYLNRQKTRYLRDHRGRPACPLLSMFKAVLLGQWHSLSDPELEHSLITRIDFNLFCRFDELSIPDYSTLCRYRNWLAQDDTLSELLELINCQLTEKGLKVEKASAAVIDATIIQTAGSKQRQAIEVDEEGQISGQTTPSKDSDARWIKKNGLYKLGYKQHTRTDAEGYIEKLHITPANAHECKHLSPLLEGLPKGTTVYADKGYDSAENRQHLEEHQLQDGIMRKACRNRPLSETQTKRNRYLSKTRYVVEQSFGTLHRKFRYARAAYFGLLKVSAQSHLKAMCLNLLKAANRLSAPAAA

SEQ ID NO: 26240 - protein, 558 aa, Neisseria meningitidis; identical to SEQ ID NO: 11199

SEQ ID NO: 26241 - protein, 219 aa, Neisseria meningitidis
MSNQKALVIFSGGQDSTTCLIQAIQIYGRENVQAITFQYGQRHAVELERARWIAQDLGVKQTVLDLSLMRQITHNALMDDTAAIETAENGVPNTFVDGRNALFLLYAAIYAKGQGIRHIIAGVCETDFSGYPDCRDVFVKSMNVTLNLAMDYDFQIHTPLMYLTKAQTWALADEMGALDYIREQTHTCYKGIVGGCRECPSCILRERGLAEYLESKKAV

SEQ ID NO: 26242 - protein, 185 aa, Neisseria meningitidis
LEVLKNRALKEGLDKDKDVQNRFKIAEASFYAEEYVRFLERSETVSESALRQFYERQIRMIKLQQVSFATEEEARQAQQLLLKGLSFEGLMKRYPNDEQAFDGFIMAQQLLEPLASQFAAMNRGDVTRDPVKLGERYYLFKLSEVGKNPDAQPFELVRNQLEQGLRQEKARLKIDAILEENGVKP

SEQ ID NO: 26243 - protein, 106 aa, Neisseria meningitidis; identical to SEQ ID NO: 2510

SEQ ID NO: 26244 - protein, 375 aa, Neisseria meningitidis
MLECTINYCSGEIMSQTIDELLLPHRNAIDTIDAEILRLLNERAQHAHAIGELKGTGAVYRPEREVAVLRRIQDLNKGPLPDESVARLFREVMSECLAVERPLTIAYLGPQGTFTQQAAIKHFGHAAHTMACPTIDNCFKQVETRQADYLVAPVENSTEGSVGRTLDLLAVTALQACGEVVLRIHHNLLRKNNGSTEGITKVFSHAQALAQCNDWLGRHLPNAERIAVSSNAEAARLVAESDDGTVAAIAGRTAAEIYGLDMVAECIEDEPNNTTRFLVMGHHETGASSSDKTSLAVSAPNRAGAVASLLQPLTESGISMTKFESRPSKSVLWEYLFFIDIEGHRQDAQIQTALERLGERASFVKVIGSYPTAVL

SEQ ID NO: 26245 - protein, 361 aa, Neisseria meningitidis
MTVPHIPRGPVMADIAAFRLTEEEKQRLLDPAVGGIILFRRNFQNIEQLKTLTAEIKALRTPELIIAVDHEGGRVQRFIEGFTRLPAMNVLGQIWDKDGASAAETAAGQVGRVLATELSACGIDLSFTPVLDLDWGNCPVIGNRSFHHNPEAVAHLALALQKGLAKGGMKSCGKHFPGHGFVEGDSHLVLPEDRRSLSELEAADLAPFHIMSREGMAAVMPAHVVYPQVDTKPAGFSEIWLKQILRRDIGFKGVIFSDDLTMEGACGVGGLKERARISFEAGCDIVLVCNRPDLVDELREDFRIPDNPALAQRWQYMANTLGSAAAQAVIQTADFQAAQAFVAGLASPQDTAGGVKVGEAF

SEQ ID NO: 26246 - protein, 218 aa, Neisseria meningitidis; identical to SEQ ID NO: 22841

SEQ ID NO: 26247 - protein, 423 aa, Neisseria meningitidis
MFQWLYDALWLLAPIWIRRYLDKRSGSAPAYRAHRDERFGKPYPNPVTGAVWIHAVSVGETRAAQPLIRELRQRFPDAPLLMTQMTPTGRETAQVLFPDAQCRYLPYDKKTWVRQFLREHRPMFGILMETEIWPNLMKECRRAGVPLFLANARLSEKSLNGYLKVRRLIRPAAASLTGCLAQTEADAARLAKLGAASVQVCGNTKYDLMPSEQMKTLAGQFEKRIGGRPVAVCGSTRVYRGEDEAEKLLAAWQQYRGDALLVVVPRHPEHFQTVFETAQRFGFKVQRRSDGLPVEPDTQVWIGDSMGELYAYYLCADVAFVGGSLVDSGCQNIIEPLSCGVPTIFGFSTYNFSEACRHALASGAAVQVESADAWREAVEKTLSAEGGGMQMQARVDGFIAQHRGAGARIAKAVREAVCGHRGR

SEQ ID NO: 26248 - protein, 298 aa, Neisseria meningitidis; identical to SEQ ID NO: 9176

SEQ ID NO: 26249 - protein, 206 aa, Neisseria meningitidis
MNSTASKTLKGLSLVFFASGFCALIYQVSWQRLLFSHIGIDLSSITVIISVFMVGLGVGAYFGGRIADRFPESIIPLFCIAEASIGLFGLVSRGLISGLGHLLVEADLPIIAAANFLLLLLPTFMMGATLPLLTCFFNRKIHNVGESIGTLYFFNTLGAALGSLAAAEFFYVFFTLSQTIALTACFNLLIAASVWLRYRKDGYSEH

SEQ ID NO: 26250 - protein, 463 aa, Neisseria meningitidis; identical to SEQ ID NO: 6277

SEQ ID NO: 26251 - protein, 317 aa, Neisseria meningitidis; identical to SEQ ID NO: 13544

SEQ ID NO: 26252 - protein, 261 aa, Neisseria meningitidis
MSRIRQAFAALNGEKALIPYITVGDPDIGATLAIMHSMVANGADILELGVPFSDPMADGPVIQRAAERALANGISLRDVLDVVRKFRETDTQTPVVLMGYLNPVHKMGYREFAQEAAKAGVDGVLTVDSPVETIDPLYRELKDNGVDCIFLIAPTTTEDRIKTIAELAGGFVYYVSLKGVTGAASLDTDEVSRKIEYLHQYIDIPIGVGFGISNAESARKIGRVADAVIVGSRIVKEIENNAGNEAAAVGALVKELKDAVR

SEQ ID NO: 26253 - protein, 709 aa, Neisseria meningitidis; identical to SEQ ID NO: 9021

SEQ ID NO: 26254 - protein, 394 aa, Neisseria meningitidis; identical to SEQ ID NO: 6041

SEQ ID NO: 26255 - protein, 456 aa, Neisseria meningitidis
MLDNLTGRFSNVFKNIRGQVKLTEDNIKEALREVRLALLEADVALPVVKEFVNNVKEKALGQEVAGSLTPDQAFIGVVNQALTELMGRENKTLDLSVSPPAIVLMAGLQGAGKTTTVGKLARLLKNDQKKKVLVVSADVYRPAAIEQLRLLAEQVGVDFFPSDTNQKPVEIATAAVDYAKKHFYDVLMVDTAGRLAIDEEMMNEIKALHAAVNPVETLFVIDAMLGQDAVNTAQAFNEALPLTGVVLTKMDGDSRGGAALSVRHVTGKPIKFIGVGEKINGLEPFHPDRLASRILGMGDVLTLIEDVQKGIDEEAAAKMAKKLHKGKGFDLNDFKEQIQQMRNMGGLENLMSKMPGELGQISKQIPEGTAEKAMGKVEAIINSMTPKERANPALLKAGRKRRIAMGAGTTVQEVNKLLKQFEQMQQMMKMFSGNGLGKLMRMAKGMRGIKGMFPGL

SEQ ID NO: 26256 - protein, 418 aa, Neisseria meningitidis
MNAAQLDHTAKVLAEMLTFKQPSDAVLSAYFREHKKLGRQDRHEIAETAFAALRHYQKISTALRRPHAQPRKAALAALVLGRSTNISQIKDLLDEEEIEFLGNLKARKTEFSDGLNTAAELPQWLVEQLQQHWREEEILAFGRSINQAAPLDIRVNTLKGKRDKVLPLLQAESADAEATPYSPWGIRLKNKIALNKHELFLDGTLEVQDEGSQLLALLVGAKRGEIIVDFCAGAGGKTLAVGAQMANKGRIYAFDIAEKRLANLKPRMTRAGLTNIHPERISSEHDSRIARLAGKADRVLVDAPCSGLGTLRRNPDLKYRQSAETVANLLEQQHSILDAASKLVKPQGRLVYATCSILPEENELQVERFLSEHPEFEPVNCVELLQNLKIDLDTGKYLRLDSAKHQTDGFFAAVLQRK

SEQ ID NO: 26257 - protein, 338 aa, Neisseria meningitidis
MYRKLIALPFALLLAACGREEPPKALECANPAVLQGIRGNIQETLTQEARSFAHEDGRQFVDADKIIAAAYGLAFSLEHASETQEGGRTFCIADLNITVPSETLADAKANSPLLYGETALSDIVRQKTGGNVEFKDGVLTAAVRFLPVKDGQTAFVDNTVGMAAQTLSAALLPYGVKSIVMIDGKAVKKEDAVRILSGKAREEEPSKPTPEDILEHNAAGGDAGVPQAAEGAPEPEILHPDDGERADTVTVSRGEVEEARVQNQRAESEITKLWGGLDTDVQKELVGEQRKWAQEKISNCRQAAAQADRQEYAEYLKLQCDTRMTRERIQYLRGYSID

SEQ ID NO: 26258 - protein, 223 aa, Neisseria meningitidis
MTTQDELKRIAAEKAVEFVPENEYIGIGTGSTINFFIEALGKSGKKIKGAVSTSKKSSELLAQYDIPVVSLNEVSGLAVYIDGADEVNHALQMIKGGGGAHLNEKIVASASEKFVCIADESKYVSRLGKFPLPVEVVESARSLVSRKLLAMGGQPELRIGYTTFYGNQIVDVHGLNIDKPLTMEDEINKITGVLENGIFARDAADVLILGTEEGAKVIYPCQG

SEQ ID NO: 26259 - protein, 146 aa, Neisseria meningitidis
MMQTFRKISLYAATLWLGMQIMAGYIVAPVLFKMLPKMQAGEIASVLFDILSWSGLAVWGAVLAAAFAALTRRQTALLLFLLSALAANRFLITPVIEALKYGHENWLLSFVGGSFGMWHGISSIVFMATALLSAVLSWQLSGKEAV

SEQ ID NO: 26260 - protein, 340 aa, Neisseria meningitidis; identical to SEQ ID NO: 2046

SEQ ID NO: 26261 - protein, 201 aa, Neisseria meningitidis
MTRQSLQQAAESRRSIYSLNKNLPVGKDEVVQIVEHAVLHTPSSFNSQSARVVVLFGEEHDKVWQFVEDALRAAVPADSFEPTAQKLNLFKAGAATILFYEDQNVVKGLQEQFPAYAANFPVWADQANAMVQYAVWTTLAAVGVGANLQHYNPLPDAAIAKAWNIPENWLLRAQMVIGGIEGAAGEKTFEPVAERLKVFGA

SEQ ID NO: 26262 - protein, 336 aa, Neisseria meningitidis
MNHTVTLPDQTTFAANDGETVLAAAARQNLNLPHSCKSGVCGQCKAELVSGDIQMGGHSEQALSEAEKAQGKILMCCTTAQSDISINIPGYKADALPVRTLPARIENIIFKHDVALLKLALPKAPPFAFYAGQYIDLLLPGNVSRSYSIANPPDQEGILELHIRRRENGVCSEMIFGSEPKVKEKGIVRIKGPLGSFTLQEDSGKPVILLATGTGYAPIRSILLDLIRQDSGRAVHFYWGARHQDDLYALEEAQGLACRLKNACFTPVLSRPGEGWQGRKGHVQDIAAQDHPDLSEYEVFACGSPAMTEQAKNLFVQQHKLPENLFFSDAFTPSAS

SEQ ID NO: 26263 - protein, 135 aa, Neisseria meningitidis; identical to SEQ ID NO: 13520

SEQ ID NO: 26264 - protein, 253 aa, Neisseria meningitidis; identical to SEQ ID NO: 15245

SEQ ID NO: 26265 - protein, 187 aa, Neisseria meningitidis
LSLGGVRLEPLDVHHETGLREAVCDGEVWKLGVTSAPHPDRVADYIGTALATRLAFAVVDEEAGRVVGTTAYYHFEPQIPRLDIGFTWYAASARRTRINTCCKIMLLDYAFDVLACRCVGWRTDILNLASQRAIERLGAEKDGVLRMHMLRKDGSVRDTVVYSMLREDWCKNREILTGRLAGYGVQV

SEQ ID NO: 26266 - protein, 398 aa, Neisseria meningitidis; identical to SEQ ID NO: 5408

SEQ ID NO: 26267 - protein, 962 aa, Neisseria meningitidis
MSNTTVEQFAAELKRPVEDLLKQLKEAGVSKNSGSDSLTLDDKQLLNAYLTKKNGSNGGTISIRRTKTEVSTVDGVKVETRKRGRTVNIPSAEELAAQVKAAQTQAAPVRPEQTAEDAAKARAEAAARAEARAKAEAEAAKLKAAKAGNKAKPAAQKPTEAKAETAPVAAETKPAEESKAEKAQADKMPSKKPAEPKEKAAKPKHERNGKGKDAKKPAKPAAPAVPQPVVSAEEQAQRDEEARRAAALRAHQEALLKEKQERQARREAMKQQAEQQAKAAQEAKNGRQRPAKPAEKPQAAAPAVENKPVNPAKAKKEDRRNRDDEGQGRNAKGKGGKGGRDRNNARNGDDERVRGGKKGKKLKLEPNQHAFQAPTEPVVHEVLVPETITVADLAHKMAVKGVEVVKALMKMGMMVTINQSIDQDTALIVVEELGHIGKPAAADDPEAFLDEGAEAVEAEALPRPPVVTVMGHVDHGKTSLLDYIRRAKVVQGEAGGITQHIGAYHVKTPRGVITFLDTPGHEAFTAMRARGAKATDIVILMVAADDGVMPQTIEAIAHAKAAGVPMVVAVNKIDKEAANPERIRQELTAHEVVPDEWGGDVQFIDVSAKKGLNIDALLEAVLLEAEVLELTAPVDAPAKGIIVEARLDKGRGAVATLLVQSGTLKKGDMLLAGTAFGKIRAMVDENGKSITEAGPSIPVEILGLSDVPNAGEDAMVLADEKKAREIALFRQGKYRDVRLAKQQAAKLENMFNNMGETQAQSLSVIIKADVQGSYEALAGSLKKLSTDEVKVNVLHSGVGGITESDVNLAIASGAFIIGFNVRADASSRKLAENENVEIRYYNIIYDAIDDVKAAMSGMLSPEEKEQVTGTVEIRQVISVSKVGNIAGCMVTDGVVKRDSHVRLIRNNVVIHTGELASLKRYKDDVKEVRMGFECGLMLKGYNEIMEGDQLECFDIVEVARSL

SEQ ID NO: 26268 - protein, 228 aa, Neisseria meningitidis
MTVLQERYCEVSDRIGKLVLQAGRKPHSVSLIAVGKTFPSDGIREVYAAGQRDFGENYIQEWYGKTEELADLTDIVWHVIGDVQSNKTKFVAERAHWVHTVCRLKTAVRLSEQRPSSMPPLQVCIEVNIAGEAVKHGVAPEEAVALAVEVAKLPNIVVRGLMCVAKANSSETELKVQFQTMRKLLADLNTAGVKADVLSMGMSDDMPAAIECGATHVRIGSAIFGKRG

SEQ ID NO: 26269 - protein, 332 aa, Neisseria meningitidis
MSENKQNEVLSGYEQLKRRNRRRLVTASCLVAASCILLAAALSSGPAEQTAGETSGVENKAAGAAQTPALKSAADKPQDLAGEDKPSAADSEISEPENVGAPLVLINDRLEDSNIKGLEASEKLQQAETAKTAPKQAKQRAAEKVPATADSTDTVAVEKPKRTAETKPQKAERTAKAKPKAKETKTAEKVADKPKTAAEKTKPDTAKSDSAVKEAKKADKAESRKTAEKDRSDGKKHETAQKTDKADKTKTAEKEKSGKKAAIQAGYAEKERALSLQRKMKAVGIDSTITEIMTDNGKVYRVKSSNYKNARDAERDLNKLRVHGIAGQVTNE

SEQ ID NO: 26270 - protein, 301 aa, Neisseria meningitidis; identical to SEQ ID NO: 7688

SEQ ID NO: 26271 - protein, 76 aa, Neisseria meningitidis; identical to SEQ ID NO: 374

SEQ ID NO: 26272 - protein, 207 aa, Neisseria meningitidis; identical to SEQ ID NO: 243

SEQ ID NO: 26273 - protein, 41 aa, Neisseria meningitidis; identical to SEQ ID NO: 6542

SEQ ID NO: 26274 - protein, 286 aa, Neisseria meningitidis; identical to SEQ ID NO: 19802

SEQ ID NO: 26275 - protein, 156 aa, Neisseria meningitidis; identical to SEQ ID NO: 14045

SEQ ID NO: 26276 - protein, 1975 aa, Neisseria meningitidis
MNKGLHRIIFSKKHSTMVAVAETANSQGKGKQAGSSVSVSLKTSGDLCGKLKTTLKTLVCSLVSLSMVLPAHAQITTDKSAPKNQQVVILKTNTGAPLVNIQTPNGRGLSHNRYTQFDVDNKGAVLNNDRNNNPFLVKGSAQLILNEVRGTASKLNGIVTVGGQKADVIIANPNGITVNGGGFKNVGRGILTTGTPQIGKDGALTGFDVRQGTLTVGTSGWNDKGGADYTEVLARAVALQGKLQGKNLAVSIGPQKVDYASGEISAGTAAGTKPTIALDTAALGGMYADSITLIANEKGVGVKNAGTLEAAKQLIVTSSGRIENSGRIATTADGTEASPTYLSIETTEKGAAGTFISNGGRIESKGLLVIETGEDISLRNGAVVQNNGSRPATTVLNAGHNLVIESKTNVNNAKGSANLSAGGRTTINDATIQAGSSVYSSTKGDTELGENTRIIAENVTVLSNGSIGSAAVIEAKDTAHIEAGKPLSLETSNVASNIRLNNGSIKGGKQVVLMADDDIQAKASHLNASGNLYVHTGKDLNLNVDKDLSAASIHLKSDNAAHITGTSKTLTASKDMGVEAGSLNVTNTNLRTNSGNLHIQAAKGNIQLRNTKLNAAKALETTALQGNIVSDGLHAVSADGHVSLLANGNADFTGHNTLTAKADVNAGSVGKGRLKADNTNITSSSGDITLVAGNGIQLGDGKQRNSINGKHISIKNNGGNADLKNLNVHAKSGALNIHSDRALSIENTKLESTHNTHLNAQHERVTLNQVDAYAHRHLSITGSQIWQNDKLPSANKLVANGVLALNARYSQIADNTTLRAGAINLTAGTALVKRGNINWSTVSTKTLEDNAELKPLAGRLNIEAGSGTLTIEPANRISAHTDLSIKTGGKLLLSAKGGNAGAPSAQVSSLEAKGNIRLVTGETDLRGSKITAGKNLVVATTKGKLNIEAVNNSFSNYFPTQKAAELNQKSKELEQQIAQLKKSSPKSKLIPTLQEERDRLAFYIQAINKEVKGKKPKGKEYLQAKLSAQNIDLISAQGIEISGSDITASKKLNLHAAGVLPKAADSESAAILIDGITDQYEIGKPTYKSHYDKAALNKPSRLTGRTGVSIHAAAALDDARIIIGASEIKAPSGSIDIKAHSDIVLEAGQNDAYTFLKTKGKSGKIIRKTKFTSTRDHLIMPAPVELTANGITLQAGGNIEANTTRFNAPAGKVTLVAGEELQLLAEEGIHKHELDVQKSRRFIGIKVGKSNYSKNELNETKLPVRVVAQTAATRSGWDTVLEGTEFKTTLAGADIQAGVGEKARADAKIILKGIVNRIQSEEKLETNSTVWQKQAGRGSTIETLKLPSFESPTPPKLSAPGGYIVDIPKGNLKTEIEKLAKQPEYAYLKQLQTAKNVDWKQVQLAYDKWDYKQEGLTGAGAAIVVIIVTALTYGYGAAAAGSVTAAGSSTAAAATTTAAATTTVSTAAAMQTAALASLYSQAAVAIINNKGDVGKALKDLGTSDTVKQIVTSALTAGALNQMGADIAQLNSKVRTELFSSTGNQTIANLGGRLATNLSNAGISAGINTAVNGGSLKDNLGNAALGALVNSFQGEAASKIKTTFSDDYVAKQFAHALAGCVSGLVQGKCKDGAIGAAVGEIVAESILGGRNPATLSDAEKHKVISYSKIIAGSVAALNGGDVNTAANAAEVAVVNNALNFDSTPTNAKKHQPQKPDKTALEKIIQSIMPAHAAGAMTNPQDKDAAIWISNIRNGITGPIVITSYGVYAAGWTAPLIGTAGKAAISTCMANPSGCTVMVTQAAEAGAGIATGAVTVGNAWEAPVGALSKAKAAKQAIPTQTVKELDGLLQESKNIGAVNTRINIANSTTRYTPMRQTGQPVSAGFEHVLEGHFHRPIANNRSVFTISPNELKVILQSNKVVSSPVSMTPDGQYMRTVDVGKVIGTTSIKEGGQPTTTIKVFTDKSGNLITTYPVKGN

SEQ ID NO: 26277 - protein, 239 aa, Neisseria meningitidis; identical to SEQ ID NO: 8012

SEQ ID NO: 26278 - protein, 389 aa, Neisseria meningitidis
MTAHKILPVLLSIILGVSHATAASPAPNKPAVHAAPTFQTPETLTAAHIVIDLQSRQTLSAKNINTPVEPAALTQLMTAYLVFKNMKSGNIQSEENLKIPESAWASEGSRMFVRPGDTVSTDKLLKGMIALSANDAALTLAGRLGNGSIENFVQQMNKEARRLGMKNTVFKNPTGLSREGQVSTAKDLAQLSEALMRDFPEYYPLFSIKSFKFKNIEQNNRNILLYRDNNVNGLKAGHTESGGYNLAVSYSGNGRHILVITLGSESAETRASDNSKLLNWALQAFDTPKIYPKGKTVAQIQISGGSKKTVRAGFLKEAYITLPHKEAKMAEQILETIQPIPAPVKKGQILGKIKIRQNGYTIAEKEIVALENVEKRSRWQRLWVRLTGQ

SEQ ID NO: 26279 - protein, 163 aa, Neisseria meningitidis; identical to SEQ ID NO: 3672

SEQ ID NO: 26280 - protein, 280 aa, Neisseria meningitidis
MDIKINDITLGNNLPFVLFGGINVLESLDSTLQTCAHYVEVTRKLGIPYIFKASFDKANRSSIHSYRGVGLEEGLKIFEKVKAEFGIPVITDVHEPHQCQPVAEVCDVIQLPAFLARQTDLVAAMAETGNVINIKKPQFLSPSQMKNIVEKFHEAGNGKLILCERGSSFGYDNLVVDMLGFGVMKQTCGNLPVIFDVTHSLQTRDAGSAASGGRRAQALDLALAGMATRLAGLFLESHPDPKLAKCDGPSALPLHLLEDFLIRIKALDDLIKSQPILTIE

SEQ ID NO: 26281 - protein, 219 aa, Neisseria meningitidis
MTPPKLIIFDWDGTLADTTQPIIDTMRRSFAECGFPPPEAERVRRLIGYSLPEIIRALLEMPSETAVADIARTYSAHYLNPNNRNMTLFPDALPCLDKLKAQGYWLAVATGKGRAGLDNAISQTATGSYWLATACAGEHPSKPSPEMVFGICGELGLNPKEALVVGDTAHDLHMAANAGAAAVGVTTGAHSREQLRTAPHLAVLDGLSELPGFLAQHYA

SEQ ID NO: 26282 - protein, 487 aa, Neisseria meningitidis; identical to SEQ ID NO: 9402

SEQ ID NO: 26283 - protein, 188 aa, Neisseria meningitidis; identical to SEQ ID NO: 6079

SEQ ID NO: 26284 - protein, 672 aa, Neisseria meningitidis
MNKSLSGSVEEYRELTLRGMILGALITVIFTASNVYLGLKVGLTFASSIPAAVISMAVLKFFKGSNILENNMVQTQASAAGTLSTIIFVLPGLLMAGYWSGFPFWQTTLLCIAGGILGVIFTIPLRYAMVVKSDLPYPEGVAAAEILKVGGHEEGDNRQGGSGIKELAAGGALAGLMSFCAGGLRVIADSASYWFKSGTAIFQLPMGFSLALLGAGYLVGLTGGIAILLGISIAWGIAVPYFSSHIPQPSDMEMAAFAMKLWKEKVRFIGAGTIGIAAVWTLLMLLKPMVEGMKMSFKSFGGGAPAAERAEQDLSPKAMIFWVLAMMFVLGVSFYHFIGDSHITGGMAWLLVVVCTLLASVIGFLVAAACGYMAGLVGSSSSPISGVGIVSVVVISLVLLLVGESGGLLADEANRKFLLALTLFCGSAVICVASISNDNLQDLKTGYLLKATPWRQQVALIIGCIVGALVISPVLELLYEAYGFTGAMPREGMDAAQALAAPQATLMTTIASGIFAHNLEWVYIFTGIAIGAVLIAADLVLKKSSGGKLALPVLAVGMGIYLPPSVNMPIVAGAVLAAVLKHIIGKKAENREGRLKNAERIGTLFSAGLIVGESLIGVIMAFIIAFSVTNGGSDAPLALNLQNWDAAASWLGLAFFVTGMFFFAQRVLKAGR

SEQ ID NO: 26285 - protein, 123 aa, Neisseria meningitidis; identical to SEQ ID NO: 616

SEQ ID NO: 26286 - protein, 175 aa, Neisseria meningitidis; identical to SEQ ID NO: 5

SEQ ID NO: 26287 - protein, 354 aa, Neisseria meningitidis
MEKEFRILNIVSAKIWGGGEQYVYDVSKALGLRDCTMFTAVNKNNELMHRRFSEVSSVFTTRLHTLNGLFSLYALTRFIRKNRISHLMIHTGKIAALSILLKKLTGVRLIFVKHNVVANKTDFYHRLIQKNTDRFICVSRLVYDVQTADNPFKEKYRIVHNGIDTGRFPPSQEKPDSRFFTVAYAGRISPEKGLENLIEACVILHRKYPQIRLKLAGHGHPDYMCRLKRDVSASGAEPFVSFEGFTEKLASFYRQSDVVVLPSLVPEAFGLSLCEAMYCRTAVISNTLGAQKEIIEHHQSGILLDRLTPESLADEIERLVLNPETKNALATAGHQCVANRFTINHTADKLLDAI

SEQ ID NO: 26288 - protein, 421 aa, Neisseria meningitidis; identical to SEQ ID NO: 346

SEQ ID NO: 26289 - protein, 327 aa, Neisseria meningitidis
MKHFLSLFTSILMSALIAVWFSQNPINAYWQQTYHRNSPLEPLAAYGWWRSGAALQENAYAFSDGIKTFLSGETPPTAQDGGSADMPSEAATSEAVPQTGETEWKQDTDTAAVRSGDKVFFVGDSLMQGVAPFVQKSLKQQYGIESVNLSKQSTGLSYPSFFDWPKTIEETLQKHPEISVLAVFLGPNDPWDFPVGKRYLKFASDEWAQEYLKRVDRILEAAHTHRVQVVWLGIPYMKKAKLDGQMRYLDKLLSEHLKGKIILIPTAHTLSGGKDRYTDSVNVNGKPVRYRSKDGIHFTAEGQKLLAAKIMEKIVFEPSTQPSSTQP

SEQ ID NO: 26290 - protein, 149 aa, Neisseria meningitidis; identical to SEQ ID NO: 4552

SEQ ID NO: 26291 - protein, 248 aa, Neisseria meningitidis; identical to SEQ ID NO: 639

SEQ ID NO: 26292 - protein, 275 aa, Neisseria meningitidis; identical to SEQ ID NO: 67

SEQ ID NO: 26293 - protein, 88 aa, Neisseria meningitidis
MDFEFGFRTLWPIATAAFWFWVNGISGRLKEADKRIDDLKEELHAVKLSYHTKQDAQADRKNIAASLERIENKLEKVNEKLDRKADKS

SEQ ID NO: 26294 - protein, 113 aa, Neisseria meningitidis; identical to SEQ ID NO: 9778

SEQ ID NO: 26295 - protein, 485 aa, Neisseria meningitidis
MHKILPIAHVLSRLGMLFSFILLIPAALSYAFSDGAYTAFATTATVTLSGSCIVRLATLRFRRELRPRDGFTLVLMLWLAFAAMAAMPMYLYFPNMGFTDAFFESMSGLTTTGATVIPHVDGLAPSVNFWRHMLNWLGGMGIIVLAVAILPMLGVGGTQLFKAEIPGIDKESKMSPRISQVAKKLWFGYTLITILAAACLHFAGMGWFDAVCHAMATLSLGGFSTHDASIAYYNSPLIEAVIIVFTIVGGINFANHFAALNSRSLKTYWKDEECRTMLLLLSGSILAAALYLWHTGYYAGFTESLRYTAFNFVSIGLANGLANTDFAQWPLLISLWMFFLANILANSGSTGGGIKTIRALVLFKFSLREMMVLLHPKAVRTVKISGKAIPDRLALTVMSFIFIYFMIVVLFSFLLMASGMEFTTAFTAVIACITNAGPGLGEVGPAGNYAGLDVMQKWICVTAMLLGRLEIFTVFILFTPAYWKK

SEQ ID NO: 26296 - protein, 63 aa, Neisseria meningitidis; identical to SEQ ID NO: 1437

SEQ ID NO: 26297 - protein, 299 aa, Neisseria meningitidis; identical to SEQ ID NO: 5443

SEQ ID NO: 26298 - protein, 230 aa, Neisseria meningitidis
MKLIKYLQYQGIGSRKQCQWLIRGGYVSINGTCMDDTDADIDSSSVETLDIDGEAVTVVPEPYFYIMLNKPEDYETSHKPKHYRSVFSLFPDNMRNIDMQAVGRLDADTTGVLLITNDGKLNHNLTSPSRKIPKLYEVTLKHPTGETLCETLKNGVLLHDENETVCAADAVLKNPTTLLLTITEGKYHQVKRMIAAAGNRVQHLHRRRFAHLETENLKPGEWKFIECPKF

SEQ ID NO: 26299 - protein, 371 aa, Neisseria meningitidis; identical to SEQ ID NO: 849

SEQ ID NO: 26300 - protein, 221 aa, Neisseria meningitidis
VDNMMKFKYVFLLACVVVSLSYRLNAAPMFNDNPVVYGKIKVQSWKARRDFNIVKQDLDFSCGAASVATLLNNFYGQTLTEEEVLEKLDKEQMRASFEDMRRIMPDLGFEAKGYALSFEQLAQLKIPVIVYLKYRKDDHFSVLRGIDGNTVLLADPSLGHVSMSRAQFLDAWQTREGNLAGKILAVVPKKAETISNKLFFTHHPKRQTEFAVGQIRQARAE

SEQ ID NO: 26301 - protein, 140 aa, Neisseria meningitidis; identical to SEQ ID NO: 2595

SEQ ID NO: 26302 - protein, 96 aa, Neisseria meningitidis; identical to SEQ ID NO: 25742

SEQ ID NO: 26303 - protein, 222 aa, Neisseria meningitidis
MKNLAIFDLDNTLINTDSDHAWPQYLIKKGLVDAAETEAQNEKFYRDYQNGCLDIDAFLKFHLAPLARYSKEELAEFHREFMAEYIIPHISPMQRMLVQSHQMAGDETLVISSTNEFIITPVCRLFGITNIIGTQLETGPDGRYTGNYVGTPSLKEGKITRLNQWLAERGETLESYGKTYFYSDSKNDLPLLRLVDEPVAVNPDAELEKEAKEKGWPVLNFK

SEQ ID NO: 26304 - protein, 335 aa, Neisseria meningitidis
MSTFFQQTAQAMIAKHIDRFPLLKLDRVIDWQPIEQYLNRQRTRYLRDHRGRPAYPLLSMFKAVLLGQWHSLSDPELEHSLITRIDFNLFCRFDELSIPDYSTLCRYRNWLAQDNTLSELLKLINRQLTEKGLKIEKASAAVIDATIIQTAGSKQRQAIEVDEEGQISGQTTPSKDSDARWIKKNGLYKLGYKQHTRTDAEGYIEKLHITPANAHECNHLLPLLEGIAEGTTVYADKGYDSAENRQHLEERQLLDGIMRKACRNRPLSETQTKHNQYLSKTRYVVEQSFGTLHRKFCYVRAAYFGLIKVSAQSHLKAMCLNLLKAANRLSAPAAA

SEQ ID NO: 26305 - protein, 674 aa, Neisseria meningitidis
MNDMTLYLIIALVPLAGSLIAGLFGNKIGRAGAHTVTILGVAVSAVLSAYVLWGFIDGSRAKFDENVYTWLTMGGLDFSVGFLVDTMTAMMMVVVTGVSLMVHIYTIGYMHDEKVGYQRFFSYISLFTFSMLMLIMSNNFIQLFFGWEAVGLVSYLLIGFYFKRPSATFANLKAFLINRVGDFGFLLGIGLVLAYFGGSLRYQDVFAYLPNVQTATIQLFPGVEWSLITVTCLLLFVGAMGKSAQFPLHVWLPDSMEGPTPISALIHAATMVTAGLFMVSRMSPIYEMSSTALSVIMVIGAITALFMGFLGVIQNDIKRVVAYSTLSQLGYMTVALGASAYSVAMFHVMTHAFFKALLFLAAGSAIIGMHHDQDMRHMGNLKKYMPVTWLTMLIGNLSLIGTPFFSGFYSKDSIIEAAKYSTLPGSGFAYFAVLASVFVTAFYAFRQYFMVFHGEEKWRSLPEHHDDHHGEEHHGLGKNDNPHESPLVVTLPLILLAIPSVIIGYVAIEPMLYGDFFKDVIFVNTDAHPTMHIMKEEFHGALAMVSHSLHSPVLYLAIAGVLSAWLLYVKLPHLPAKIAQTFRPIYVLFENKYYLDALYFNVFAKGTRALGTFFWKVGDTAIIDNGIVNGSAKLVGAIAAQVRKAQTGFIYTYAAAMVFGVLVLLGMTFWGLFR

SEQ ID NO: 26306 - protein, 259 aa, Neisseria meningitidis
MLKIISANVNGIRSAYKKGFYEYIAASGADIVCVQELKAQEADLSADMKNPHGMHGHWHCAEKRGYSGVAVYSKRKPDNVQIGMGIEEFDREGRFVRCDFGRLSVISLYLPSGSSAEERQQVKYCFLDAFYPMLEAMKNEGRDIVVCGDWNVAHQNIDLKNWKGNQKNSGFLPEEREWIGKVIHKLGWTDMWRTLYPDVPGYTWWSNRGQAYAKDVGWRIDYQMVTPELAAKAVSAHVYKDEKFSDHAPLVVEYDYAAE

SEQ ID NO: 26307 - protein, 544 aa, Neisseria meningitidis
MAAKDVQFGNEVRQKMVNGVNILANAVRVTLGPKGRNVVVDRAFGGPHITKDGVTVAKEIELKDKFENMGAQMVKEVASKTNDVAGDGTTTATVLAQSIVAEGMKYVTAGMNPTDLKRGIDKAVAALVDELKNIAKPCDTSKEIAQVGSISANSDEQVGAIIAEAMEKVGKEGVITVEDGKSLENELDVVEGMQFDRGYLSPYFINDAEKQIAGLDNPFVLLFDKKISNIRDLLPVLEQVAKASRPLLIIAEDVEGEALATLVVNNIRGILKTVAVKAPGFGDRRKAMLQDIAILTGGQVISEEVGLSLEKATLEDLGQAKRIEIGKENTTIIDGFGDAAQIEARVAEIRQQIETATSDYDKEKLQERVAKLAGGVAVIKVGAATEVEMKEKKDRVEDALHATRAAVEEGVVAGGGVALLRARAALENLHTGNADQDAGVQIVLRAVESPLRQIVANAGGEPSVVVNKVLEGKGNYGYNAGSGEYGDMIEMGVLDPAKVTRSALQHAASIAGLMLTTDCMIAEIPEEKPAMPDMGGMGGMGGMM

SEQ ID NO: 26308 - protein, 221 aa, Neisseria meningitidis
MNLFQNAKFFTTVNHLKDLPDTPLEIAFVGRSNAGKSSAINTLTNHVRLAYVSKTPGRTQHINFFELQNGNFMVDLPGYGYAQVPEAVRAHWVNLLGDYLRHRKQLIGLVLIMDARHPLKELDIRMLDFFHTTGRPVHILLSKADKLSKNEQIKTLSQVKKLLKPYSDRQNISVQLFSSLKKQGIDEANRTVGSWFDAADAAASSPKENLPQLYGNRISPT

SEQ ID NO: 26309 - protein, 392 aa, Neisseria meningitidis
MAFLKLTEQNVQGKTVLIRADMNVPFKDGKISDDTRIRASIASVKYCVDNGASVIVMTHLGRPTEGEFHPEDDVAPVAAHLGSLLGKDVKVLNDWRENKPALNAGDVVMLQNVRINKGEKKNDLELGKAYAALCDVFVNDAFGTAHRAQASTEAVAQAAPVACAGVLMAGELDALGKALKQPARPMVAIVAGSKVSTKLTILESLADKVDQLIVGGGIANTFLLAEGKAIGKSLAEHDLVEESKKIMAKMAAKGGSVPLPTDVVVAKAFAADAEAVVKDIADVAEDEMILDIGPKSAAALADLLKAADTVVWNGPVGVFEFDQFAGGTKALTEAIAQSKAFSIAGGGDTLAAIAKFGVTDQIGYISTGGGAFLEFLEGKELPAVAALEKRGA

SEQ ID NO: 26310 - protein, 140 aa, Neisseria meningitidis; identical to SEQ ID NO: 1135

SEQ ID NO: 26311 - protein, 2252 aa, Neisseria meningitidis
LGNFAKVSGGMYAGKITLISTDRDASVRNQGQWFASAGNVAVNAEGKLVNTGMIAATGENHAVSLHARNVHNSGTVASQDDANIHSQTLDNSGTVLSSGQLTVRNLGRLKNHNNGTIQAARLDISTGGLDNTGNITQTGSQALDLVSAGKFDNSGKIGVSDVPQTGLNPNPSVIPQIPSTATGSGSSTISASKPGSNNPVSPTAPAKNYAGGRIQTTGAFDNAGSINAGGQIDIAAQNGLENSGSLNAAKLRVSGDSFNNTVKGKLQAHDLAVNTQTAKNSGHLLTLTGKIDNRELHNAGEIAANNLTLIHSGRLSNDKKGNIRAAYLQLDTAGLHNAGNILADSGTVTTKNNLHNTGKVSVARLNTEGQTLDNTHGHIEAETVNIQSQQLTNQSGHITATEQLTINSRNVDNQNGKLLSANQAQLAVSDGLYNQHGEIATNRQLSIHDKNQNTLALNNADGTIQSAGNVSLQAKSLANNGTLTAGNKLDIALTDDFVVERDLTAGKQLNLSIKGRLKNTHTLQAGHTLKLNAGNIDNQVTGKIIGGEQTDITSEQHVDNRGLINSDGLTHIGAGQTLTNTGTGKIYGNHIALDAQILLNREETTEGSTKAGAIAARKRLDIGAKEIHNQEGALLSSEGIFAVGNRLDEQHHAAGMADTFVNGSAGLEVQGDALMSVRNMQNINNHFKTETYLAKAEKQVRDYTVLGQNTYYQAGKDGLFDNSQGQKDQTTATFHLKNGSRIEANQWHVRDYHIETYKERIIENRPAHITVGGNLTASGQNWLNKDSRIVVGGRIITDDLNQKEITNQSTTGKGRTDAVGTQWDSVTKKGWYSGRKRQRRTERNHTPYHDTQLFTHDFDTPVSVIQQNAASPSFQPAASAIKLIDGVSTAAVNGQRIHTGNVVSLNNATVTLPNSSLYTTHPDNKGWLVETDPQFADYRRWLGSDYMLQQLKLDTNHLHKRLGDGYYEQKLVNEQIHQLTGYRRLDGYRSDEEQFKALMDNGLTAAKTFGLTPGIALSAEQVARLTSDIVWMENQTVTLSDGSTQTVLVPKVYALARKGDLNTSGGLISAEQVLLKLQNGNLTNSGTIAGRQAVLIQARNINSNGNIQADQIGLKAEKSINIDGGQVQAGRLLTAQAQNINLNGTTQTSGNERNGNTAIDRMAGINVVGSHTEQVDNRASDGILSLHADNDINLNAATVSNQVKGGTTQITAGNNLNLDTIRTEHREAYGALDDKNHRHVRQSAEVGSSIRTQNGAMLRAGNDLKIRQGELEADEGKTVLAAGRDVNISEGRQITELDASVSGKSKGILSSTKTHDRYRFSHDEAVGSNIGGGKMIVAAGQDINVRGSNLISDKGTVLKAGNDIDISTAHNRYTGNEYHESKKSGVMGTGGLGFTIGNRKTTDDTDRTNIVHTGSIIGSLNGDTVTVAGNRYRQTGSTVSSPEGRNTVTAKSIDVESANNRYATDYVHTREQKGLTVALNVPVVQAAQNFVQAAQNVGKSKNKRVNAMAAANAAWQGYQAAQQMQQFAPSSSAGQGQNNNQSSGISVSVTYGEQKSRNEQKSRYTEAAASQIIGKGQTTLAATGSGEQSNINITGSDVIGHAGTALIADNHIRLQSAKQDGSEQSKNKSSGWNAGVAVKIGNGIRFGITAGGNIGKGKEQGGNTTHRHTHVGSTAGQTTIRSGGDTTLKGAQLIGKGIQADTRNLHIESVQDTETYQSKQQNGNVQVTVGYGFSASGSYRQSKVKADHASVTEQSGIYTGEDGYQIKVRDNTDLKGGIITSTRSAESKGKNRFQTATLTHRDIQNHSRYEGRSFGIGGSFDLNGGWDGTVTDKQGRPTDRISPAAGYGSDGDSKNSTTRSGINTRNIHITDEAGQLARTGRTAKETEARIYTGIDTETADQHTGRLKNSFDKDAVAKEINLQREVTKEFGRNAAQAVAAVADKLGNTQSYERYQEARTLLEDELQNTDSEAEKAAIRASLGQVNAYLAENQSRYDTWKEGGIGRSILHGAAGGLTTGSLGGILAGGGTSLAAPYLDKAAENLGPAGKAAVNALGGAAIGYATGGSGGAVVGANVDWNNRQLHPSEYKLAEQYADIVASRLNISKEEALGRIIRHMQRTVDYATAKADNFRTDDAIISILGANNLPKQDQHYTNPNYNKQYIQNYVRDFNLANKYNYFGKTPTQSRDYKVGVVTDIGKAALNSGIGIFESAANLATGEIDPNSWAYVHMGRIGYTHPEYGNAWIRISSATLVY

SEQ ID NO: 26312 - protein, 202 aa, Neisseria meningitidis
LNTLYLGSNSPRRMEILTQLGYQVVKLPANIDETVRQNEDPARYVQRMAEEKNRTALTLFCETNGTMPDFPLITADTCVVSDGIILGKPHSQAEAIEFLNRLSGKQHTVLTAVCIHYRGNAENRVQTNRVVFKPLSSEEISAYVQSGEPMDKAGAYAVQGIGGIFIQSIEGSFSGIMGLPVYETVSMLQDLGYRSPLSALKP

SEQ ID NO: 26313 - protein, 410 aa, Neisseria meningitidis; identical to SEQ ID NO: 19060

SEQ ID NO: 26314 - protein, 290 aa, Neisseria meningitidis; identical to SEQ ID NO: 11858

SEQ ID NO: 26315 - protein, 604 aa, Neisseria meningitidis
MPAETTVSGARPAAKLPIYILPCFLWIGIIPFTFALRLQPSPDFYHDAAAAAGLIVLLFLTAGKKLFDVKIPPISFLLFAMAAFWYLQARLMNLIYPGMNDIVSWIFILLAVSAWACRSLVAHYGQERIVTLFAWSLLIGSLLQSCIVVIQFAGWEDTPLFQNIIVYSGQGVIGHIGQRNNLGHYLMWGILASAYLNGQRKIPAALGVICLIMQTAVLGLVNSRTILTYIAAIALILPFWYFRSDKSNRRTMLGIAAAVLLTALFQFSMNTILETFTGIRYETAVERVANGGFTDLPRQIEWNKALAAFQSAPIFGHGWNSFAQQTFLINAEQHNIYDNLLSNLFTHSHNIVLQLLAEMGISGTLLVAATLLTGIAGLLKRPLTPASLFLICTLAVSMCHSMLEYPLWYVYFLIPFGLMLFLSPAEASDGIAFKKAANLGILTASAAIFAGLLHLDWTYTRLVNAFSPAPDDSAKTLNRKINELRYISANSPMLSFYADFSLVNFALPEYPETQTWAEEATLKSLKYRPHSATYRIALYLMRQGKVAEAKQWMRATQSYYPYLMPRYADEIRKLPVWAPLLPELLKDCKAFAAAPGHPEAKPCK

SEQ ID NO: 26316 - protein, 522 aa, Neisseria meningitidis; identical to SEQ ID NO: 8560

SEQ ID NO: 26317 - protein, 380 aa, Neisseria meningitidis; identical to SEQ ID NO: 314

SEQ ID NO: 26318 - protein, 77 aa, Neisseria meningitidis; identical to SEQ ID NO: 3979

SEQ ID NO: 26319 - protein, 950 aa, Neisseria meningitidis
MKLSELFNPDEFAARHLSFGDEAALLAAVGEKSMDDFVGNTVPQSIRMPSELDLPEALTEADALAKLKGIASKNVINKSYIGLGYYPTRVPNVILRNVLENPGWYTAYTPYQAEIAQGRLEALLNFQQVCIDLTGFPVAGASLLDEATAAAEAMAMAHRVGKVKSERFFVDARVYPQTLDVMKTRAKYFDFELVVGDFAQADEGEYFGALFQYVGKDGDVQDLQDVIGRLKAKGTIVAVSADIMSLVLLKSPAELGADIALGNTQRFGVPMGFGGPHAAYFAFKDEFKRSAPGRIIGVSKDASGKPALRMALSTREQHIRREKATSNICTAQALLANLAGMYAVYHGPEGVKRIANRIHALASAFADALVSDGLNVVHKVFFDTVTVDFGNKEKADQVFAAALESGYNLRRVNDTQVAAAFHETSACEDLVDLYRAFTGKDAFAFADDVKGRLNAELLRQDDILQHPVFNRYHTEHEMLRYLKKLEDRDLAMNRSMISLGSCTMKLNATAEMLPITWAEFSDIHPYAPEAQTVGYRELLADMENSLKAITGFDAISFQPNSGAQGEYSGMLSIRRYQEANGEGHRNICLIPKSAHGTNPATAAMLGLKVVVVDTDEHGNVNIDDLKAKAEQHRDTLSAIMITYPSTHGVYEEGIRDICRIIHENGGQVYMDGANLNAQIGIMQPAEVGADVLHMNLHKTFCIPHGGGGPGMGPIGLKAHLAPFAPGHVVTDMHNASADQTAVAAAAFGSASILPITWMYLTMMGKQGMEQATRWALLNANYVAKRLSEDYPILYTGKNGRVAHECIVDLRPLKAESGITETDIAKRLMDYGFHAPTVSFPVAGTLMIEPTESESKAELDRFIAALKQIKQEVLKVERGEWPKEDNPLVNAPHTASDVTGEWTHPYSREEAVFPLPFVREHKFWPSVNRVDDVYGDRNLVCSCPPMENYED

SEQ ID NO: 26320 - protein, 131 aa, Neisseria meningitidis; identical to SEQ ID NO: 3391

SEQ ID NO: 26321 - protein, 288 aa, Neisseria meningitidis
MKGIILAGGSGTRLYPITRGVSKQLLPVYDKPMIYYPLSVLMLAGIRDILVITAPEDNASFKRLLGDGSDFGISISYAVQPSPDGLAQAFIIGEEFIGNDNVCLVLGDNIFYGQSFTQTLKQAAAQTHGATVFAYQVKNPERFGVVEFNENFRAVSIEEKPQRPKSDWAVTGLYFYDNRAVEFAKQIKPSARGELEITDLNRMYLEDGSLSVQILGRGFAWLDTGTHESLHEAASFVQTVQNIQNLHIACLEEIAWRNGWLTKKNVETRAKPLEKTAYGQYLLRLIGK

SEQ ID NO: 26322 - protein, 475 aa, Neisseria meningitidis; identical to SEQ ID NO: 16513

SEQ ID NO: 26323 - protein, 490 aa, Neisseria meningitidis
MNQTSRDLTRISHNTKIVATLGPGSNNVELLEDMIRVGGLNVVRFNFSHGTPEFHQENARIVREAAKRTGQEIAIIADLQGPKIRVGKIAGGGIELNKGETLVLDAALEGEGTREAVGLDYRDLPDDVAAGDVLWLDDGLLTLTVESVEGSRIITRVENSHVLKSNKGINKRGGGLSAGALTEKDFRDLKTAIAIGCDYLAISFVKSAEDLHIARAKVEEEMKGSTAVRPGLVSKIERVEAIENLDEIILAGDGIMVARGDLAVEVGHAAVPALQKRMIRRARELRRFSITATQMMESMITNPVPTRAEVSDVANAVLDGTDAVMCSAETAVGAYPFETVSQMAIICAAAEKEQDSLNGVAEQAEYPEAVSTNLAVAGGAVSVARAVHAKAIVALTESGSTAFEISRHNITLPIFALTPSVSAQRRMAMYRGVRPLILATSTDHDTALNEVETMLVEHNILHSGDQYIITSGSQMRESGSTNTLEVLRVK

SEQ ID NO: 26324 - protein, 127 aa, Neisseria meningitidis; identical to SEQ ID NO: 1080

SEQ ID NO: 26325 - protein, 429 aa, Neisseria meningitidis
MKKLNTQSPDFQAGLKALLAFETAQNPETERIVADICADVQKRGDAALIEYTNKFDQTNAKSIDDLILTQADLKAAFERIPNDVQTALQTAARRVESYHQRQKMESWSYTDEDGTLLGQQITPLDRVGIYVPGGKAAYPSSVIMNAMPAHVAGVKEIIMVVPTPKGERNDIVLAAAYVAGVTKVFTVGGAQAVAALAYGTETIPQVDKITGPGNAFVAAAKRRVFGVVGIDMVAGPSEILVIADGTTPADWVAMDLFSQAEHDEIAQAILIGTSQAYLDEVEAAMDRLIETMPRRDIIEASLGNRGAMILAKDLDEACEIANYISPEHLELSVENPQEWAKKIRHAGAIFMGRYTGESLGDYCAGPNHVLPTSRTARFSSPLGTYDFQKRSSLIQVSEQGAQKLGETASVLAHGESLTAHARAAEFRMK

SEQ ID NO: 26326 - protein, 119 aa, Neisseria meningitidis
MLSNIIPLSIGAALGTTARWLLNLAVPASLSPATGNLFANWTGALLIGIFAETVNHPQWKLLLITGFLGSLTTLSGFSLETVTLLQSNRPASALANIFLHTAGSLLLTWLGLKIGTAVK

SEQ ID NO: 26327 - protein, 259 aa, Neisseria meningitidis
MSATIPPKIIRYDSNPTDVYFFGTCVLDLFMPEAGMDAITLIEQQGIRVHFPMAQSCCGQPAYSSGHPTEAFDVARAQLDLFPEEWPIVVPSGSCGGMMKHHWPTLFKGSEYEERAVDCADRIIEFTHFLLAIGFKPEDKGEPLKVAVHTSCAARREMNVHLSGWQLIDGMENVERIVHDHESECCGFGGTFSVKQADISGAMVTDKVAALKETGATEIISADCGCMMNIGGKIAKDEPDMPRPKHIASFLLERTGGKA

SEQ ID NO: 26328 - protein, 160 aa, Neisseria meningitidis; identical to SEQ ID NO: 2526

SEQ ID NO: 26329 - protein, 305 aa, Neisseria meningitidis
MNLTKTQRQLHNFLTLAQEAGSLSKLAKLCGYRTPVALYKLKQRLEKQAEDPNARGIRPSLMAKLEKHTGKPKGWLDRKHRERTVPETAAESTGTAETQIAETASAAGCRSVTVNRNTCETQITVSINLDGSGKSRLDTGVPFLEHMIDQIARHGMIDIDISCKGDLHIDDHHTAEDIGITLGQAIRQALGDKKGIRRYGHSYVPLDEALSRVVIDLSGRPGLVYNIEFTRALIGRFDVDLFEEFFHGIVNHSMMTLHIDNLSGKNAHHQAETVFKAFGRALRMAVEHDPRMAGQTPSTKGTLTA

SEQ ID NO: 26330 - protein, 84 aa, Neisseria meningitidis
LSAQNYARELEQARAEAKKYEVKAHAVGMALAKKQAEVSRLKTENKKEIENVLTQDRKNAGGGCIDGFGSHGLQLYKRALGYGN

SEQ ID NO: 26331 - protein, 58 aa, Neisseria meningitidis; identical to SEQ ID NO: 903

SEQ ID NO: 26332 - protein, 185 aa, Neisseria meningitidis
MDALKLLTNRRSSKKLKHPAPDAAELEQIFQAATQVPDHGNMRPFRFTVIQGEVGLQRFRDVLKQTVAELNFGDDAMKKAEKVGNMAPMVIGVTFAPNQKVAKPKPEWEQMLTAGCAAYALQLAATAQGFDNVWITGMWVNSPLLREAFGCADKDKIIGLMMVGTPTEEVHKPKNTDLEAFVSHW

SEQ ID NO: 26333 - protein, 276 aa, Neisseria meningitidis
MFKAVLLGQWHSLSDPELEHSLITRIDFNLFCRFDELIIPDYSTLCRYRNWLAQDDTLSELLKLINCQLTEKGLKIEKASAAVVDATIIQTAGSKQRQAIEVDEEGQISGQTTPSKDSDARWIKKNGLYKLGYKQHTRTDAEGYIEKLHITPANAHECKHLSPLLEGLPEGTTVYADKGYDSAENRQHLEEHQLLDGIMRKACRNRPLTEAQTKRNRYLSKPRYVVEQSFGTLHRKFRYARAAYFGLIKVSAQSHLKAMCLNLLKAANRLSAPATA

SEQ ID NO: 26334 - protein, 475 aa, Neisseria meningitidis; identical to SEQ ID NO: 3229

SEQ ID NO: 26335 - protein, 133 aa, Neisseria meningitidis
MKDKHHSSAMRLDKWLWAARFFKTRSLAQKHIELGRVQVNGSKVKNSKTIDIGDIIDLTLNSLPYKIKVKGLNHQRRPASEARLLYEEDTKTATLREERKQLDQFSRITSAYPDGRPTKRDRRQLDRLKKGDW

SEQ ID NO: 26336 - protein, 483 aa, Neisseria meningitidis
VNYFPIFANLAGRPVLVVGGGAVAARKISLLLKAGAEVRVAAKHLNAELSALAAENKILWLAEEFRAEHIRTVFLIIAASSDQALNRRVFHLAESCQKPVNVVDDRDHCSFIFPSVIDRNPVQIAVSSSGSAPVLARLLRERLEALLPPSLGDMAEISGRWRDAVKGKLKSVTERRRFWEKQFNGRFAALVKNRQNTLAERELAGQLEQSRQNDQGGSVSLVGAGPGDAGLLTLKGLQEIQQADVVLYDALVSDGILSLVRRDAERIFVGKRARGDRTPQEDTNALMVRLAREGRRVVRLKGGDPFVFGRGGEELETLARHQIPFSVVPGITAAVGATAYAGIPLTHRDYAQSAVFVTGHRKADAPDIEWQTLARSRQTLVIYMGALKAALIAERLQQHGRSPDTPAAVISQGTLPAQKTATGTLANLAELAETAPNPALIVIGEVVGLHEKLAWFGENGEGENRVGQAYPALGGLNAGQRAA

SEQ ID NO: 26337 - protein, 133 aa, Neisseria meningitidis
MRRALIAKIKIAQKELGLDDATYRAVLERVTGKRSCTECSIPELERVVEDLRQHGFTPKKTAGRRPNRRSSADPMMRKIEALLLDNGWTWNYAHGTAKKMFKVDRVEWLSDGNMHKLVAALQIAANRRKKGAV

SEQ ID NO: 26338 - protein, 218 aa, Neisseria meningitidis
MTIKIILIDDHTLFRSGIKALLSRQHGFEVIGEAADGLSGIKMINRLQPDVVLLDLDMPGMNGREALSQIISINPQQAVIMLTVSEDNDDLTECMRIGARGYLLKNINADFLLESIRKAAEGDNVFSPEMTAKLVKSLISPQPAQGTQALSSLTPRELEILGYLAAGHSNKIIARHLDLAESTVKVHVQNLLRKLNLSSRVQAAVYAIRHNVPQPMLE

SEQ ID NO: 26339 - protein, 173 aa, Neisseria meningitidis
MAKTRIKQPAIEAAQDKTEVTAFIRQIGDLQREVKRLETEAGDKKAAIEEEYAAKAAPMCAEIMSLTERVAAYCEAHKDELTENGKTKTVDFTTGLIKWRIRPPSVKVTGVAAVLAWLSEKSAFAEFVRTKKEIDKDAILNQKERFSDGQVPGIKIVSGLEDFVIEPTEQELA

SEQ ID NO: 26340 - protein, 307 aa, Neisseria meningitidis; identical to SEQ ID NO: 1349

SEQ ID NO: 26341 - protein, 90 aa, Neisseria meningitidis; identical to SEQ ID NO: 1115

SEQ ID NO: 26342 - protein, 635 aa, Neisseria meningitidis
MNPSPLLDLIDNPQDLRRLDKKQLPQVAAELREFLLESVGQTGGHFASNLGAVELTVALHYVYHTPEDKLVWDVGHQSYPHKILTGRKNQMHTMRRYGGLAGFPKRSESEYDAFGVGHSSTSIGAALGMAAADKILGSDRRSVAIIGDGAMTAGQAFEALNCAGDMDVNLLVILNDNEMSISPNVGALPKYLASNVVRDMRGLLSTIKAQSSKVLDKLPGAMELAQKVEHKIKTLAGEAEHARQSLSLFENFGFRYTGPVDGHNVEHLVDVLKDLRSRKGPQLLHVITKKGNGYKLAENDPVKYHAVANLPKESAAQMPSENKPAAKPTYTQVFGKWLCDRAAADSRLVAITPAMREGSGLVEFEQRFPDRYFDVGIAEQHAVTFAGGLACEGMKPVVAIYSTFLQRAYDQLVHDIALQNLPVLFAVDRAGIVGADGPTHAGLYDLSFLRCVPNMIVAAPSDENECRLLLSTCYQADAPAAVRYPRGTGTGVPVSDGMETVEIGKGIIRREGEKTAFIAFGSMVAPALAVAEKLNATVADMRFVKPIDEELIVRLARSHDRIVTLEENAEQGGAGGAVLEVLAKHGICKPVLLLGVADTVTGHGDPKKLLDDLGLSAEAVERRVRAWLSDRDAAN

SEQ ID NO: 26343 - protein, 100 aa, Neisseria meningitidis
LGFNNLVSLAALIEKAFPIRYTPAGIPVLDIILKHESWQKENGQQCFVQLEIPARILGRQAEEWQYRQGVYVHVEGFLAQKSRRSLMPMLRIQNIKEYKG

SEQ ID NO: 26344 - protein, 250 aa, Neisseria meningitidis
MFQTTFLLDSSSLACVPHLTCRFNVGYGLLKIKLLRNLANMEKIEKFKSELLDDIFEYIQCISIFVHKKKIYYLIDYKENFILNMKLDLDFDFKNGNITLEQYQDEINSCYYRNGIWQLTKDNFESYLQSDSVIVLKKDELKELMFQGFTSDEAVRLYSVVENKLSYNDPISDSGRQSDFLKINQISSRLPLFYVNFDTEVYLHMDWDRCHEDYVYDGWFAKAMDFGYLIPDEFCYWKIEGRDYWKFGQL

SEQ ID NO: 26345 - protein, 559 aa, Neisseria meningitidis
MENFAQLLEESFTLQEMNPGEVITAEVVAIDQNFVTVNAGLKSESLIDVAEFKNAQGEIEVKVGDFVTVTIESVENGFGETKLSREKAKRAADWIALEEAMENGNILSGIINGKVKGGLTVMISSIRAFLPGSLVDVRPVKDTSHFEGKEIEFKVIKLDKKRNNVVVSRRAVLEATLGEERKALLENLQEGSVIKGIVKNITDYGAFVDLGGIDGLLHITDLAWRRVKHPSEVLEVGQEVEAKVLKFDQEKQRVSLGMKQLGEDPWSGLTRRYPQGTRLFGKVSNLTDYGAFVEIEQGIEGLVHVSEMDWTNKNVHPSKVVQLGDEVEVMILEIDEGRRRISLGMKQCQANPWEEFAANHNKGDKISGAVKSITDFGVFVGLPGGIDGLVHLSDLSWTESGEEAVRKYKKGEEVEAVVLAIDVEKERISLGIKQLEGDPFGNFISVNDKGSLVKGSVKSVDAKGAVVALSDEVEGYLPASEFAADRVEDLTTKLKEGDEVEAVIVTVDRKNRSIKLSVKAKDAKESREALNSVNAAANANAGTTSLGDLLKAKLSGEQE

SEQ ID NO: 26346 - protein, 445 aa, Neisseria meningitidis
MLPSSRSSKEAESKTVIPAERHNIRAEMLSFAAENVIRRLKEAGFQAYVVGGAVRDLLLGIEPKDFDVATDATPEQVHKLFRRSRIIGRRFQIVHVMNGAEIIEVTTFRGGAKVHQNAHGRIMKDNTYGSIEEDAMRRDFTCNALYYDPEKEEILDFHNGIADVAARRLVMIGDAAERYQEDPVRILRAIRLSGKLGFDLSEETAAPIAESICRLKHEPVARLFDEIMKLLFSGHARECLKRLNGFDIPDDIHPLLNALRVSDGIAGKMTVLALKNTDERLRADKSVSVGFVLAALMWPELERHWKSNLQQGLKPAPALSDAINTMRETVERGWGVPQRFSATMREIWMFQPQFENRKGARPHKLFAQARFRAAYDFLLLRAETGNADRALAEWWTAFQTASAEQRSEMTKNEAAARHEKNEGQAKKRRRRRRKPKPKVEGTDWE

SEQ ID NO: 26347 - protein, 179 aa, Neisseria meningitidis; identical to SEQ ID NO: 4252

SEQ ID NO: 26348 - protein, 287 aa, Neisseria meningitidis
MELNEFFDKAYAVLRRLDAVLPPEPGHTDWNALAFRWQSAGKKGFLEHLPDPHTFPLVRLAGVGRQTELLVRNTEQFIVGRPANNVLMSGARGTGKSSLVKALLHEYADKGLRLIEVDKSDLIGLPYLLTLLKERPEKFIVFCDDLSFESGDETYKALKTALDGGLSQRCANVLVYATSNRRHLMPEYFDENAGTTGMRGEIHQKEAVEEKISLSDRFGLWLSFYPFDQNDYLAAVQNWLEDFGVPYDETAQMAALQWAQTRGSRSGRSAWQFACDWAGRLPKQRAL

SEQ ID NO: 26349 - protein, 238 aa, Neisseria meningitidis
MKTKLPLFIIWLSVSAACSSPVSRNIQDMRPEPQAEAGSSDAIPYPVPTLQDRLDYLEGRIVRLSNEVETLNGKVKALEHAKTHPSGRAYVQKLDDRKLKEHYLNTEGGSASAHTAETAQNLYNQALKHYKSGRFSAAASLLKGADGGDGGSIAQRSMYLLLQSRARMGNCESVIEIGGRYANRFKDSPTAPEAIFKIGECQYRLQQKDIARATWRSLIQAYPSSPAAKRAAAAVRKR

SEQ ID NO: 26350 - protein, 163 aa, Neisseria meningitidis; identical to SEQ ID NO: 684

SEQ ID NO: 26351 - protein, 310 aa, Neisseria meningitidis; identical to SEQ ID NO: 18494

SEQ ID NO: 26352 - protein, 333 aa, Neisseria meningitidis
MKRKIWLLPLLAVSAYLQAQTEVRLAVHKSFSLPKGLIARFERANDAKVSIIQAGGANEMLNKLILSRANPIADAVYGLDNANIGKAREMGILAAAQPESAPVAVGLPSALAVDYGYVSINYDKKWFEGKKLPLPQTLQDLTRPEYKNLLVVPSPATSSPGLGFLMANISGMGEEGAFKWWAQMRQNGVKVAKGWSEAYYTDFSHNGGAYPLVVGYAASPAAEVYFSKGKYSEPPTGNLFLKGGVFRQVEGAAVLKGAKQPELAAKLVQWLQSREVQQAVPSEMWVYPAVKNTRLPDVFRFAQAPTHTTAPAQRDIDANQRGWVSRWIRTVLK

SEQ ID NO: 26353 - protein, 141 aa, Neisseria meningitidis; identical to SEQ ID NO: 7081

SEQ ID NO: 26354 - protein, 168 aa, Neisseria meningitidis
MFEQEDEWISKTQMKKQMNDLQDLGMALTKLSNDTLKKIGLDADLYEAVTAYKKITSNGALKRQAQFIGRLMRDTDPAPIEAFLAKLRGDDAAHNAFLQRVEQARVRLLADDGALTQFMSDFPHADAGKLRTLVRNTKKEQEQNKPPKNFRALFQELKTVMENGDAEI

SEQ ID NO: 26355 - protein, 223 aa, Neisseria meningitidis; identical to SEQ ID NO: 2385

SEQ ID NO: 26356 - protein, 128 aa, Neisseria meningitidis; identical to SEQ ID NO: 9112

SEQ ID NO: 26357 - protein, 333 aa, Neisseria meningitidis
MIDGQTNKPKQKTRIILAPMQGLVDDVMRDLLTRIGGYDECVSEFVRITHTVHSRSIWLKYVPEIANGNKTFSGTPCTVQLLGSDADNMAENALEAVRFGANKIDLNFGCPAPTVNKHKGGAILLKEPELIFHIVKTLRGRLPAHIPLTAKMRLGYEDKSRALECACAIAEGGACGLTVHARTKAEGYEPPAHWEWIRKIRDSVNIPVTANGDVFSLQDYIGIKTISGCNSVMLGRGAVIRPDLARQIKQYENGGPVKDTDFAEVSKWIRQFFELCLTKEANNKYPIARLKQWLGMMKKTFDPAQTLFDRVRTVKDADEVRNILAEFEREMNT

SEQ ID NO: 26358 - protein, 459 aa, Neisseria meningitidis; identical to SEQ ID NO: 4291

SEQ ID NO: 26359 - protein, 295 aa, Neisseria meningitidis
MYTGRFAPSPTGLLHIGSLLTAAASYADARSNGGKWLVRMEDLDPPREMPGAASHILHTLEAFGFEWDGEVAYQSHRYALYEETLCRLQTAGLVYPCHCSRKDWQAGARRGADGFVYNGRCRHPGQRPAPQGKQPAWRIRVPDRIIGFSDGIVGGYAQNLARDIGDFVLLRADGYWAYQLAVVADDAEQGVTHIVRGQDLLVSTPRQIYLQQCLGVPTPQYAHLPLLTNAQGQKWSKQTLAPALDLNRREQLLRQVFRYLKLPEAPETDRPAELLDWAVAHWDMDKVPKHAITTP

SEQ ID NO: 26360 - protein, 394 aa, Neisseria meningitidis
MIIDVKVPMLSESVSEGTLLEWKKKVGEAVARDEILIDIETDKVVLEVPSPQAGVLVEIVAQDGETVVADQVLARIDTAATAAAEAPAAAPAEATPAAAAPDAAQNNAAMPAAAKLAAETGVDVNALQGSGRDGRVLKEDVQNAAAKPAAASAPAVALPAGARPEERVPMSRLRARVAERLLASQQENAILTTFNEVNMKPIMDLRAKYKEKFEKEHGVKLGFMSFFVKAAVAALKKYPVVNASVDGKDIVYHGYFDIGIAIGSPRGLVVPILRDADQMSIADIEQAIVDYAKKAKDGKIAIEDLTGGTFSITNGGTFGSMMSTPIINPPQSAILGMHATKERAVVENGQVVVRPMMYLALSYDHRIIDGREAVLTLVAIKDALEDPARLLLDL

SEQ ID NO: 26361 - protein, 268 aa, Neisseria meningitidis
MPTVFIFLTAVYAGLGAFAWHCQQQGRGRDYPWKTELPVLGAALTVHGAALLMPVIQDKIIIMGFGYSGSLIVWMMLFIYFAGSFFYSLRGVQLLLYPCAALMLLSGLVFPGKFSGYEITDLPFMLHIGTSLLAYGLFGIATLLSVLTLLLNRSLHRRSFSKLAGFLPSLLSLEKLMFQVMWAGFILLTYSVVSGTFFAEAVFGKPMTFTHKTVFGILSWLIYGGLLLKHSMTAWRGKKAAVWTIIGFVSLMIAYMGSKFVLEIILNR

SEQ ID NO: 26362 - protein, 170 aa, Neisseria meningitidis; identical to SEQ ID NO: 1267

SEQ ID NO: 26363 - protein, 321 aa, Neisseria meningitidis
MSYTQLTQGERYHIQYLSRHCTVTEIAKQLNRHKSTISREIRRHRTQGQQYSAEKAQRQSQTIKQRKRQPYKLDSQLIQHIDTLIRRKLSPEQVCAYLCKHHQITLHHSTIYRYLRQDKSNGSTLWQHLRICSKPYRKRYGSTWTRGKVPNRVGIENRPAIVDQKSRIGDWEADTIVGKGQKSALLTLVERVTRYTIICRLDSLKAEDTARAAVRALKAHKDRVHTITMDNGKEFYQHTKITKALKAETYFCRPYHSWEKGLNENTNGLIRQYFPKQTDFRNISDREIRRVQDELNHRPRKTLGYETPSVLFLNLFQPLIH

SEQ ID NO: 26364 - protein, 293 aa, Neisseria meningitidis
MPSENTLFPLPDPLLRPMVEQALSEDLGRRGDITSAAVIAPDKTAKLFLVSREDGVIAGMDLARLAFQTMDPSVRFQAEIRDGQVVRAGQTLAAVEGNARALLAAERTALNYLTHLSGISTATARAVAEVAKYGTDIVCSRKTIPLLRVLQKYAVRAGGGVNHRMGLDDAVLIKDNHLAYCGSIAQAVRQAKQAVGALTCVEIEVDTLAQLDEAIAAGAERILLDNMDDETLKEAANRCHTQTAHPHTVYCEASGGIGFDRLKRVAQTGVDGIALGYLTHSSRSLDIGLDFLA

SEQ ID NO: 26365 - protein, 324 aa, Neisseria meningitidis
MLENLPYFQRHLPEDLAKVNEVINRAVQSDVALISQIGTYIISAGGKRLRPIMTILAGKAVGYDDEKLYSLAAMVEFIHTSTLLHDDVVDESDLRRGRATANNLFGNAAAVLVGDFLYTRAFQLMVASGSMRVLEVMADATNIIAEGEVMQLMNIGNTDITEEQYIQVIQYKTAKLFEAAAQVGAILGKASPEHERALKDYGMYVGTAFQIIDDVLDYSGETEETGKNVGDDLAEGKPTLPLIYLMRQGSEQVANDVRTALENADRSYFEKIHDYVVRSDALAYSIGEARKAVDCAVAALDALPDSEVKDAMIQLAKESLVRVS

SEQ ID NO: 26366 - protein, 281 aa, Neisseria meningitidis
VNRTAFCCLFLTTALILTACSSGGGGSGSGGVAADIGTGLADALTTPLDHKDKGLKSLTLEDSIPQNGTLTLSAQGAEKTFKAGDKDNSLNTGKLKNDKISRFDFVQKIEVDGQTITLASGEFQIYKQDHSAVVALQIEKINNPDKIDSLINQRSFLVSGLGGEHTAFNQLPGGKAEYHGKAFSSDDAGGKLTYTIDFAAKQGHGKIEHLKTPEQNVELAAAELKADEKSHAVILGDTRYGSEEKGTYHLALFGDRAQEIAGSATVKIGEKVHEIGIAGKQ

SEQ ID NO: 26367 - protein, 205 aa, Neisseria meningitidis
MPYTEDMQPGDTTSPYGASKSMVERILTDIQKADPRWSMILLRYFNPIGAHESGLIGEQPNGIPNNLLPYICQVAAGKLPQLAVFGDDYPTPDGTGMRDYIHVMDLAEGHVAAMQAKSNVAGTHLLNLGSGRASSVLEIIRAFEAASGLTIPFEIKPRRAGDLACFYADPSYTKAQIGWQTQRDLTQMMEDSWRWVSNNPNGYDD

SEQ ID NO: 26368 - protein, 152 aa, Neisseria meningitidis; identical to SEQ ID NO: 2635

SEQ ID NO: 26369 - protein, 162 aa, Neisseria meningitidis; identical to SEQ ID NO: 911

SEQ ID NO: 26370 - protein, 394 aa, Neisseria meningitidis
MGKHILLGVTGSIAAYKSCELVRLLKKQGHSVTVVMSRSATEFVSPLTFQALSGNPVLTDTHGGNGSNGMEHINLTRNADVFLIAPASMNTVAKICNGVADNLLTSLAAARKCPLAIAPAMNVEMWLNPANQRNIAQLVSDGITVYMPGLGEQACGENGMGRMPEPAELLDLLPDLWTPKILRGKKILITAGATFEAIDPVRCITNTSSGKMGVALARACRAAGAEVSLIHGQLQTALPFGISNRVQTVSAEDMHRAVHRLIDKQDAFISVAAVSDYKVKNRSTQKFKKDKNAKPLSIELDENPDILASIASLPNPPFCIGFAAETENVMAYAREKRIKKKIPVIVANDVSIAMGKPTNRITIIGDDEELSFPETSKDEAAMQIVERLAVYLNK

SEQ ID NO: 26371 - protein, 476 aa, Neisseria meningitidis
MTWETVIGLEIHVQLNTKSKIFSGASTAFGAEPNAHAGVVECALPGVLPVMNREVVEKAIKLGLALDAKINRKNVFDRKNYFYPDLPKGYQISQLDLPIVEHGKLEIVVGDDVKTINITRAHMEEDAGKSVHEGLNGATGIDLNRAGTPLLEVVSEPELRSAAEAVAYAKALHSLVTWLDICDGNMAEGSFRVDANVSVRPKGQEEFGTRREIKNLNSFRFLEQAINYEAEAQIEILEDGGKVQQATMLFDPEKGETRVMRLKEDAQDYRYFPDPDLLPVIISDAQMQKAKAEMPELPKEMAARFVADYGVSEYDARLLTASRAQAAYFEEAAKESGQGKPTANWMNGELAAALNKAGLELADSPITAPRLAALVGKIADGTLSGKLAKKAFEAMWAEPESTIAEIIEKHGLQQMTDTGAVEAIVDEVLANNAKAVEQFKSGNEKALNAIVGQVMKASKGKANPAQVQELIKAKLA

SEQ ID NO: 26372 - protein, 217 aa, Neisseria meningitidis; identical to SEQ ID NO: 5286

SEQ ID NO: 26373 - protein, 296 aa, Neisseria meningitidis; identical to SEQ ID NO: 64

SEQ ID NO: 26374 - protein, 477 aa, Neisseria meningitidis; identical to SEQ ID NO: 3214

SEQ ID NO: 26375 - protein, 237 aa, Neisseria meningitidis
LGACSTSYRPSRAEKANQVSNIKTQLAMEYMRGQEYRQATASIEDALKSDPKNELAWLVRAEIYQYLKVNDKAQESFRQALSIKPDSAEINNNYGWFLCGRLNRPAESMAYFDKALADPTYPTPYIANLNKGICSAKQGQFGLAEAYLKRSLAAQPQFPPAFKELARTKMLAGQLGDADYYFKKYQSRVEVLQADDLLLGWKIAKALGNAQAAYEYEAQLQANFPYSEELQTVLIGQ

SEQ ID NO: 26376 - protein, 122 aa, Neisseria meningitidis
MVFLRDELERRIGALKDGAMPSETREWDKPAPAVLSVAGADASGFGEIGGGAPRYDWAALCARAPFQMFVAEVYPSFPDARSFVMGRVCSPEDEADVAAAYCAWFEDKKLWGGDDPLGGVNV

SEQ ID NO: 26377 - protein, 72 aa, Neisseria meningitidis; identical to SEQ ID NO: 1579

SEQ ID NO: 26378 - protein, 170 aa, Neisseria meningitidis
MNTLQKGFTLIELMIVIAIVGILAAVALPAYQDYTARAQVSEAILLAEGQKSAVTEYYLNHGEWPGGNSDAGVASSSTIKGKYVQSVTVANGVITAQMASSGVNKEIQGKKLSLWAKRQNGSVKWFCGQPVTRTAPTTTNDDVKADTAANGKQIDTKHLPSTCRDASSAS

SEQ ID NO: 26379 - protein, 130 aa, Neisseria meningitidis; identical to SEQ ID NO: 425

SEQ ID NO: 26380 - protein, 154 aa, Neisseria meningitidis
MQTLDGEMASGNRPPKSITSEGKANAATYPQLVNQLTEQNLKNIAAQDSRLASAVNDWKTIQPNKKGEINFGIGSATRQEAEQLGKIWVGDGAKPVNSPSCQGCMLSADGTRLYRPPTTKSNTPESLNPTGVQANFVTRSVDGKTLTNGHLNIK

SEQ ID NO: 26381 - protein, 268 aa, Neisseria meningitidis
MNMKKWIAAALACSALALSACGGQGKDAAAPAANPDKVYRVASNAEFAPFESLDSKGNVEGFDVDLMNAMAKAGNFKIEFKHQPWDSLFPALNNGDADVVMSGVTITDDRKQSMDFSDPYFEITQVVLVPKGKKISSSDDLKNMNKVGVVTGYTGDFSVSKLLGNDNPKIARFENVPLIIKELENGGLDSVVSDSAVIANYVKNNPAKGMDFVTLPDFTTEHYGIAVRKGDEATVKMLNDALEKVRESGEYDKIYAKYFAKEDGQAAK

SEQ ID NO: 26382 - protein, 799 aa, Neisseria meningitidis
LGISRKISLILSILAVCLPMHAHASDLANDSFIRQVLDRQHFEPDGKYHLFGSRGELAERSGHIGLGNIQSHQLGNLMIQQAAIKGNIGYIVRFSDHGHEVHSPFDNHASHSDSDEAGSPVDGFSLYRIHWDGYEHHPADGYDGPQGGGYPAPKGARDIYSYDIKGVAQNIRLNLTDNRSTGQRLADRFHNAGSMLTQGVGDGFKRATRYSPELDRSGNAAEAFNGTADIVKNIIGAAGEIVGAGDAVQGISEGSNIAVMHGLGLLSTENKMARINDLADMAQLKDYAAAAIRDWAVQNPNAAQGIEAVSNIFTAVIPVKGIGAVRGKYGLGGITAHPIKRSQMGAIALPKGKSAVSDNFADAAYAKYPSPYHSRNIRSNLEQRYGKENITSSTVPPSNGKNVKLANKRHPKTKVPFDGKGFPNFEKDVKYDTRINTAVPQVNPIDEPVFNPKGSVGSAHSWSITARIQYAKLPRQGRIRYIPPKNYSPSAPLPKGPNNGYSAGNLSKKVLTLVYINGKLKFGPSSLPSSALKAPVPIVGKAEAPPGKAVPVGEARIPSNPKAVKGTTVTLSQEQRLANGELIPKGSVVTWSDNAVKVVRPDGKKRRFNSRDWEQKALPKPQLPKDYRDDINIGGNNPRFNQQRHEKIESHNPNRIEEIRQRNAVSSAERQADALKRMQTSGRTRLPGQPQKGKPGAAREMSSSDNPNQTAEAFARRYLGRKPTLMERVEGEKLYGGKCVGCWKAQMPDGTFVVYRPAGNASMTKGTTASVDINNPTLNNLNINLKGKPTELKFKFPAR

SEQ ID NO: 26383 - protein, 1056 aa, Neisseria meningitidis
VRRDGDGVGPLPFGDGGGRFFVWFKLGDTSAFGRASVWNWETPVFDAQASDGVERFGAAVFISNLPFYPVGFAPSVFGDRSKIYNRDFLVVSEGWDSFYQGEGAAKSLGRFRRHLVVERVLPLVFALPLSAKNAKTELPFGFKSEVSYLFFPGLYGSDAGTPRVYSTIQDVRRVSLGDVSAAGGAVSVRNAGQRLRQRPHGDDLAFPFPIVFNRTYRVLATVENRFAWGVARVFDPLQKVGRGADFDSLVFGQAWFSHFLRHIEIGQGVIGGFFEQRRTVRVSFGRQYVVLPANSFRRRQFSRNHTVGFPPEIRPLGWDSAAYLTRIVPPGQAVRVDAGMRVRVSFGVSSVRQSVLRVSAWSIPPWVNNWAHILRNVRQYVRPSDQVQEQIDGMVFGAAYPYNRDRVVRPSRFAAVRWGYTVLLLAGERVVPATLPPPKPGKPSVTNRVRYAAPSGWDGARIPTGAAVWTNGQVLLPPGTDMAVHTRGAYVWKNRRFLRRFRGIEGEAYGTAFAAYAVRHIFQDDGSLSFMIRPPDMRMPSVALLKRYVPVRGTDSAAFGTGVFRIRRNMIAPSWPPDDGGRDFGLAYLKKRNAEVYLHGFGGFAFSDGAAVQYWVRTLGVETFNRHTLGRLTWIGRRVRFIGMGGIGTMRVPDGHDVWTDSTPPFGTKLILLDAWSSEDGASSGSGNGWDSVLFGGTGLTDMSVRDAGGFAPSLFSIGTRFFNNGILVRQGIPVGTAGRCAVSHRHRPIVAKGWRMDFALGRPRVTPHTVWVMYSPPPKAAENNGGGGYHAPSEGIRTGYPYIVFNSGRVEQYAAYPQYRAGKVSGYCLIENARQSVRAKGIFHFRAGWNTFYPYTQYVELFSQGDVNADYMAFGVLKAGFLDVFDWRIAAAGVRFAGFGDQTVRNRNQDVRPAGADMLEAGKSRWNDTPFMWQGLRVGERIPTAIGGGDLLRFGGFGSVSYRNRTVRAEGMDMFASEGEARRFDDRMTVRRASGMPPDNRVGRKGEDARPVQFVGVPPFGFAPFGRCDIGNKVRFIRPDGYADQFRKGASVWQR

SEQ ID NO: 26384 - protein, 678 aa, Neisseria meningitidis
MTDNALLHLGEEPRFDQIKTEDIKPALQTAIAEAREQIAAIKAQTHTGWANTVEPLTGITERVGRIWGVVSHLNSVADTPELRAVYNELMPEITVFFTEIGQDIELYNRFKTIKNSPEFDTLSPAQKTKLNHDLRDFVLSGAELPPEQQAELAKLQTEGAQLSAKFSQNVLDATDAFGIYFDDAAPLAGIPEDALAMFAAAAQSESKTGYKIGLQIPHYLAVIQYADNRELREQIYRAYVTRASELSDDGKFDNTANIDRTLANALQTAKLLGFKNYAELSLATKMADTPEQVLNFLHDLARRAKPYAEKDLAEVKAFARESLNLADLQPWDLGYASEKLREAKYAFSETEVKKYFPVGKVLNGLFAQIKKLYGIGFTEKTVPVWHKDVRYFELQQNGETIGGVYMDLYAREGKRGGAWMNDYKGRRRFSDGTLQLPTAYLVCNFAPPVGGREARLSHDEILILFHETGHGLHHLLTQVDELGVSGINGVEWDAVELPSQFMENFVWEYDVLAQMSAYEETGVPLPKELFDKMLAAKNFQRGMFLVRQMEFALFDMMIYSEDDEGRLKNWQQVLDSVRKEVAVIQPPEYNRFALSFGHIFAGGYSAGYYSYAWAEVLSADAYAAFEESDDVAATGKRFWQEILAVGGSRSAAESFKAFRGREPRIDALLRHSGFDNAA

SEQ ID NO: 26385 - protein, 227 aa, Neisseria meningitidis
MPSEKCSDGISYNLLFAAHNQSVFPIPFRNAYHAPVPNICEQGKKMARLTVHTLETAPEAAKARVEAVLQNNGFIPNLIGVLSNAPEALAFYQEVGKLNAANSLTAGEVEVIQIIAARTNQCGFCVAGHTKLATLKKLLSEQSVKAARALAAGEFDDAKLGALAAFTQAVMAKKGAVSDEELKAFFDAGYNQQQAVEVVMGVALATLCNYVNNLAQTEINPELQAYA

SEQ ID NO: 26386 - protein, 471 aa, Neisseria meningitidis
LSRLQKAAQQILIVRGYLTSQAIIQPQNMDSGILKLRVSAGEIGDIRYEEKRDGKSAEGSISAFNNKFPLYRNKILNLRDVEQGLENLRRLSSVKTDIQIIPSEEEGKSDLQIKWQQNKPIRFSIGIDDAGGKTTGKYQGNVALSFDNPLGLSDLFYVSYGRGLVHKTDLTDATGTETESGSRSYSVHYSVPVKKWLFSFNHNGHRYHEATEGYSVNYDYNGKQYQSSLAAERMLWRNRLHKTSVGMKLWTRQTYKYIDDAEIEVQRRRSAGWEAELRHRAYLNRWQLDGKLSYKRGTGMRQSMPAPEENGGGTIPGTSRMKIITAGLDAAAPFMLGKQQFSYETAIHAQWNKTPLVAQDKLSIGSRYTVRGFDGEQSLSGERGFYWQNTLGWHFHPRHQFYLGADYGRVSGESAQYVSGKQLMGAVVGFRGGHKVGGMFAYDLFAGKPLHKPKGFQTTNTVYGFNLNYSF

SEQ ID NO: 26387 - protein, 145 aa, Neisseria meningitidis; identical to SEQ ID NO: 2729

SEQ ID NO: 26388 - protein, 223 aa, Neisseria meningitidis; identical to SEQ ID NO: 8598

SEQ ID NO: 26389 - protein, 358 aa, Neisseria meningitidis; identical to SEQ ID NO: 96

SEQ ID NO: 26390 - protein, 206 aa, Neisseria meningitidis
MAQFFAIHPDNPQERLIKQAVEIVNKGGVVVYPTDSCYALGCKLGDKAAMERILSIRKIDLKHHLTLMCADLSELGTYAKIDNVQFRQLKAATPGPYTFILQATKDVPARTLHPKRKTIGLRIPDNAIAQALLGELGEPLLSCTLMLPEDGEPLTDPYEIRERLEHAVDLVIDGGWCGTEPTTVVDMTDGTELVRQGCGDTAVFGL

SEQ ID NO: 26391 - protein, 284 aa, Neisseria meningitidis
MNQTQLARGIGTSPASISMYLNGTYAEKGGNYETIEPKIEAFLEMQDSKAQREELVLGFVSTKTTRRIAEVMRDAHEGGETVVIYGQAGLGKTQAVKNYCEKNPAAILIEANPSFTALVLMRKLATAAKVSAMGSLNDLFESVSDRLRDSGRLIVVDEAENLPLRALEIVRRLHDETGCGLVLSGMPRLVANLRGKHGELVQLYSRVSVALNLGESLPDDELFEIAKAALPDADEETLLELVKHSNGNTRRMSKLMRGAVRTANKNGIKMQVGIVKKYSSLIIR

SEQ ID NO: 26392 - protein, 275 aa, Neisseria meningitidis
MDGEGMSVGHYENFPVGSLILPRRLRKPVHAVYAFARTADDMADEGSMPSEARLAGLEGLQRELDVLASGGRSAHPLIARLDAEAVVPFGLDLQPFYDLLSAFSQDVVKTRYGNFGELADYCRRSANPVGRIMLALYGKTDAVCVAQSDGICTALQLVNFWQDVAVDWQKGRVYIPQDDLLKFGVSEGQIAEGRADAAFQRLMAYECRRAFRMLKAGSPLARELKGRIGLELRMIVLGAQLILQKLDACRYDVFAQRPVLDKKDWLIMLKKALWK

SEQ ID NO: 26393 - protein, 335 aa, Neisseria meningitidis
MSTFFQQTAQAMIAKHIDRFPLLKLDQVIDWQPIEQYLNRQRTRYLRDHRGRPAYPLLSMFKAVLLGQWHNLSDPELEHSLITRIDFNLFCRFDELIIPDYSTLCRYRNWLAQDDTLSELLKLINCQLTEKGLKIEKASAAVVDATIIQTAGSKQRQAIEVDEEGQISGQTTPSKDSDARWIKKNGLYKLGYKQHTRTDAEGYIEKLHITPANAHECKHLSPLLEGLPEGTTVYADKGYDSAENRQHLEEHQLLDGIMRKACRNRPLSEVQTKRNRYLSKTRYVVEQSFGTLHRKFRYARAAYFGLIKVSAQSHLKAMCLNLLKAANRLSAPVAA

SEQ ID NO: 26394 - protein, 217 aa, Neisseria meningitidis
MKITHCKLKKKVQKELLRFFVLEVTARSAADILGIHPNSAALFYRKIRTVINHHLALAADEVFEGPVEPDESDFGGRRKGRRGRGAAGKVVVFGILKRNGRVYTVVVDNAKSETLLPVIKKKIMPDSIVYTDSLSSCDKLDVSGFIHYRINHSKEFADRQNHINGIENFWNQAKRVLRKYNGIDRKSFPLFLKECEFRFNFGTPSQQLKILRDWCGI

SEQ ID NO: 26395 - protein, 900 aa, Neisseria meningitidis
MQLHILNNPKDAALAADAEFLKQSLFNLLHEEASPLVVETVKLLSTSDDSAALIEKVLPQLDEQQTHDLTLACGLFAQILNIAEDVHHERRRQIHEEAGRGGAEGSLTETVRRLKAGKADGKSVQRQLDNTSVTAVLTAHPTEVQRQTVLSFNRRIRALLPQRERCTNADALARLRREIDTILLGLWQTSETRRHKLSVNDEINNGVSIFPMSFFEALPKLYRNMEHDFQMVYPDVCVPNILKIGGWIGGDRDGNPFVSAETLRFAFRRHADAVFRFYRGELDKLYRELPLSIRRVKVNDDVMALAALSPDEEIARTEEPYRRAIAYIMARAMGKARSLGLGMGCKFGFLEPYASAQEFLDDLKKLQRSLIDNGSRLLAEGRLADLIRSVSVFGFHMMPLDLRQHAGKHADVVTELFQHAGLEDYNSLNEEQKQAVLLRELSHQRPLYSPFITYSDHTRHELAIFNEARKIKDEFGEDAVTQSIISNCEQPSDLLALALLLKESGLLAVENGKPHSRINIVPLFETIEALENACPVMETMFRLDWYDALLESRGNIQEIMLGYSDSNKDGGYVTSSWCLYQAELGLVELFKKYDVRMRLFHGRGGSVGRGGGPSYQAILAQPAGSVAGQIRITEQGEVITAKYADPGNAQRNLETLVAATLEASILPDKKDPDAKLMQALSDVSFKYYRELITHPDFIDYFLQISPIQEIATLNLGSRPASRKTLARIQDLRAIPWVFSWMQNRLMLPAWYGFGSAVETLCEGNPDTLTALREHAQSNPFFQAMLSNMEQVMAKTDITLAENYAGLSESPDKAKIIFGMIKEEYRRSRKALLDLLQTEELLRDNRSLARSLALRIPYLNALNGLQVAMLKRLRKEPDNPHALLMVHLTINGVAQGLRNTG

SEQ ID NO: 26396 - protein, 427 aa, Neisseria meningitidis; identical to SEQ ID NO: 2761

SEQ ID NO: 26397 - protein, 152 aa, Neisseria meningitidis; identical to SEQ ID NO: 1697

SEQ ID NO: 26398 - protein, 109 aa, Neisseria meningitidis
MFDGEVEADESYFGGQRKGKRGRGAAGKVAVFGLLKRNGKVYTVTVPNTQTATLFPIIREQVKPDSIVYTDCYRSYDVLDVSEFSHFSFAETSFSYQSQHTFCRTTKPY

SEQ ID NO: 26399 - protein, 451 aa, Neisseria meningitidis
MKAPELLLPAGGLERMRTAYDYGADAVYAGSPRYSLRARNNEFAKLDVLEQGIKEAHERNKKFFLTVNTLPHNSKLKTFVSDMEPLIAMKPDALIMADPGLIMTVREKWPEMPIHLSVQANTTNYWGVKFWQNIGVERIILSRELSMEEIAEIRQQCPDIELEVFIHGALCIAYSGRCLLSGYFNHRDPNQGTCTNSCRWDYKVHNATESDAGDAQLLQGFNFEKAQEEANQNFEGINGQKRHPYADKVFLIEESNRPGEMMPIMEDEHGTYIMNSKDLRGIEVVEKLAKIGVDSLKVEGRTKSLYYVARVAQSYRKAIDDAVAGRPFDYSLLSELEGLANRGYTSGFLERHHTQDYQNYLTGHSTAKQSQYVGHVTEIDKNGWATIEVKNRFAVGDSLEIIHPNGNQTIKLEQMARKGQPVDVAPGNGIQVKIPDMQGKEKALIARVLNP

SEQ ID NO: 26400 - protein, 233 aa, Neisseria meningitidis
MSARENILAKLKKADALPMEEPAVFDYYREKGVSWDSEAERLKHWAAAMRAVKTEIYWVTKSNWMQVFREAAEGKGLKNILLPLATEHGQIARAALADSNIEPIAFEREIDTWKTEFFTNIDAGFSGAQCGIARTGTLMLFSSPEEPRTLSLVPPVHFCLFDTSKMYNEFHNAVEGEKLVENGMPTNVFLISGPSKTADIQLTLAYGAHGPRDLVILAILPDHISPADLEENA

SEQ ID NO: 26401 - protein, 102 aa, Neisseria meningitidis
MKTVPTILISILLATALPASAHGMHKSKPLTMDELPPICQQYFKRAETCYNKTGDKADFARNNTKFLFQALPAADLGQRKQMCQIAMDSFAEKTRISNSNAV

SEQ ID NO: 26402 - protein, 369 aa, Neisseria meningitidis
MDMTDRKAAIIRPGGARDIYSYYVKGTSTKTKTNIVPQAPFSDRWLKENAGAASGFLSRADEAGKLIWENDPNQNWWSNRMDDIRGIIQGAANPFLTGFQGLGVGAITDSAVSPVTDTAAQQTLQGINDLGKLSPEAQLAAASLLQDSAFAVKDGINSAKQWADAHPNITATAQTALSAAEAAGTVWRGKKVELNPTKWNWVKNTGYKTPAARPMQTLDGEMAGRNKPAKQATPNGKAGVSTQQSLQNSLVPQKNYTHTTYNGGSAITDGKYITDPLSMVRHKPDASSLDKIDSKSLFKSDVDAEKATLDAARYADKHNLWDSQNKAKVPTNDVVGYTDGKPTHIINIYRRKPNKDGIRPVHGTPGKER

SEQ ID NO: 26403 - protein, 95 aa, Neisseria meningitidis; identical to SEQ ID NO: 4938

SEQ ID NO: 26404 - protein, 206 aa, Neisseria meningitidis
LLGVVPGIGESIQAYKVAKAAKNLQGMKKALDKAATVATAQGYVSKTKIKVGQTELRVTAATDKQLLKAIGEGRDTTGKMTEQLFDSVAKQNGFRVLSGGKYGGNNGFDHVWQAADGSVVLIVESKQIRNGTVQLNPNGAGGYTQMSREWIKQVVKSLPDGSPAKAVVLKANQNGKLKTAIAGVDRQTGKAVILSVKVPSKTNIRR

SEQ ID NO: 26405 - protein, 376 aa, Neisseria meningitidis
MKQTDSTIKSRAAVAFAPNQPLQIVEIDVEMPRKGEVLIRNTHTGVCHTDAFTLSGSDPEGVFPVVLGHEGAGVVVAVGEGVSSVKPGDHVIPLYTAECGECEFCCSGKTNLCVSVRDTQGKGLMPDGTTRFSYQGQPIYHYMGCSTFSEYSVVAEVSLAKINPEANHEQVCLLGCGVTTGIGAVHNTAKVQEGDSVAVFGLGAIGLAVVQGARQAKAGRIIAIDTNPSKFELAKQFGATDCLNPNDYDKPIKDVLLDINKWGIDHTFECIGNVNVMRQALESAHRGWGQSIIIGVAGAGQEISTRPFQLVTGRVWKGSAFGGVKGRSELPKMVEDSMKGDIELEPFVTHTMTLDQINKAFDLMHEGKSIRAVIHY

SEQ ID NO: 26406 - protein, 69 aa, Neisseria meningitidis; identical to SEQ ID NO: 3057

SEQ ID NO: 26407 - protein, 136 aa, Neisseria meningitidis
MIEFVRAKKRLLWAFVLLLVWTCGYRYAADKAEAEQTALIATYRHSSMVAAEQYALQLKKAQDERQRWYDFSQKQGRKPVKKQYPPQTKKAGYLKTKEELLAELACLKAEMAALKKLDALIYGKEVRQKERNSSQG

SEQ ID NO: 26408 - protein, 867 aa, Neisseria meningitidis
MSKTVRYLKDYQTPAYRILETDLHFDIAEPQTVVKSRLTVEPQRVGEPLVLDGSAKLLSVKINGAAADYMLEGETLTIADVPSERFTVEVETEILPAENKSLMGLYASAGNLFTQCEPEGFRKITFYIDRPDVMSKFTTTIVADKKRYPVLLSNGNKIDGGEYSDGRHWVKWEDPFAKPSYLFALVAGDLAVTEDYFTTMSGRNVKIEFYTTEADKPKVGFAVESLKNAMKWDETRFGLEYDLDIFMVVAVGDFNMGAMENKGLNIFNTKFVLADSRTATDTDFEGIESVVGHEYFHNWTGNRVTCRDWFQLSLKEGLTVFRDQEFSGDRASRAVRRIENIRLLRQHQFPEDAGPTAHPVRPASYEEMNNFYTMTVYEKGAEVVRMYHTLLGEEGFQKGMKLYFQRHDGQAVTCDDFRAAMADANGINLDQFALWYSQAGTPVLEAEGRLKNNSFELTIKQTVPPTPDMADKQPMMIPVKVGLLNRNGEAVAFDYQGKRATEAVLLLTEAEQTFQFESVTEAVVPSLLRGFSAPVHLNYPYSNDDLLLLLAHDSDAFTRWEAAQTLYRRAVAANLAALSDGIGLPKHEKLLAAVEKVISDDLLDNAFKALLLGVPPEAELWDGTENIDPLRYHQAHEALLDTIAVRFLPKWHELNRQAAKQENQRCEYSPEAAGWRTLRNVCRAFVLRADPAHIETVAEKYGEMAQNMTHEWGILSAVNGNESDTRNRLLAQFADKFSDDALVMDKYFALVGSSRRSDTLQQVQTALQHPKFSLENPNKARSLIGSFSRNVPHFHAEDGSGYRFIADKVIEIDRFNPQVAARLVQAFNLCNKLEPHRKNLVKQALQRIRAQEGLSKDVGEIVGKILD

SEQ ID NO: 26409 - protein, 74 aa, Neisseria meningitidis
MMKNKYILTKAAISITAISIFYLLTQESSGKTEEPSYFLMFMFLNLLWFEENKTVMAAVTAMIAAHFIFVALSD

SEQ ID NO: 26410 - protein, 472 aa, Neisseria meningitidis; identical to SEQ ID NO: 8248

SEQ ID NO: 26411 - protein, 210 aa, Neisseria meningitidis; identical to SEQ ID NO: 22159

SEQ ID NO: 26412 - protein, 482 aa, Neisseria meningitidis; identical to SEQ ID NO: 25563

SEQ ID NO: 26413 - protein, 311 aa, Neisseria meningitidis
LTHGGNNPPFLKKGLDMWFKQVTPFRLLELPEKRYLDESLGNSWFTEPQGLDWFSEGFTPPNAFTDLAVFEAQKTMLISLMREEKVLPSAAIKHKLDEQIIKIQAHEGRNVGRKEKQELREAIIDDLLPKSLIKSSRTYGLFAGEWLFVDTANRRKAENLLTKLREALGGLPAQQPLTRQSPSALMTNWLLRGEAQGLFVLDSDVTLVGAGDVAPKVKISRKDLTAEDVVQHAKNGMTVTELGLVWNGRVAFILTQDLTLKRIQWLDVVQEEAEGSCDDAKSMSYATQLLMEAALSAILGELVDLLGGWQE

SEQ ID NO: 26414 - protein, 203 aa, Neisseria meningitidis; identical to SEQ ID NO: 352

SEQ ID NO: 26415 - protein, 245 aa, Neisseria meningitidis
MGGQKTHFGFSTVNEDEKAGKVAEVFHSVAKNYDIMNDVMSAGLHRVWKHFTINTAHLKKGDKVLDIAGGTGDLSRGWAKRVGKEGEVWLTDINSSMLTVGRDRLLNEGMILPVSLADAEKLPFPDNYFNLVSVAFGLRNMTHKDAALKEMYRVLKPGGTLLVLEFSKIYKPFEGAYDFYSFKLLPVMGKLIAKDAESYQYLAESIRMHPDQETLKQMMLDAGFDSVDYHNMSAGIVALHKGVKF

SEQ ID NO: 26416 - protein, 404 aa, Neisseria meningitidis
MDKFPKSAKLDHVCYDIRGPVHKKALQLEEEGNKILKLNIGNPAPFGFEAPDEILVDVIRNLPTSQGYCDSKGLYSARKAIVHYYQTKGLRDITVDDVYIGNGVSELITMSMQALLDDGDEILIPAPDYPLWTAAATLAGGTVRHYLCDEENGWFPNLADMEAKITPKTKAIVVINPNNPTGAVYSREILLEIAELARKHGLIIFADEIYDKILYDGAVHHHIAALAPDLLTVTFNGLSKSYRVAGFRQGWMVLNGPKHHAKGYIEGLDMLSSMRLCANTPMQHAIQTALGGYQSINEFILPGGRLLEQRNRAWELVSQIPGVSCVKPMGAMYMFPKIDTEMYRIRDDMKFVYDLLVREKVLLVQGTGFNWIKPDHFRIVTLPYVHQIEEAMGRLARFLQTYRQ

SEQ ID NO: 26417 - protein, 351 aa, Neisseria meningitidis; identical to SEQ ID NO: 2371

SEQ ID NO: 26418 - protein, 527 aa, Neisseria meningitidis
LGTIATSVFQVGKAMDGRRWAVWGAFALLPSAFLAVMVVAPLWAVAAYDGLAWRAVLSDAYMLKRLAWTVFQAAATCVLVLPLGVPVAWVLARLAFPGRALVLRLLMLPFVMPTLVAGVGVLALFGADGLLWRGRQDTPYLLLYGNVFFNLPVLVRAAYQGFVQVPAARLQTARTLGAGAWRRFWDIEMPVLRPWLAGGVCLVFLYCFSGFGLALLLGGSRYATVEVEIYQLVMFELDMAVASVLVWLVLGVTAAAGLLYAWFGRCAVSDKAVSPVMPSPPQSVGEYVLLAFAAAVLSVCCLFPLLAIVVKAWSAGESWRVLMESETWQAVWNTLRFSAAAVYAAAVLGVVYAAAARRSAWMRGLMFLPFMVSPVCVSAGVLLLYPQWTASLPLLLAMYALLAYPFVAKDVLSAWDALPPDYGRAAAGLGANGFQTACRITFPLLKPALRRGLTLAAATCVGEFAATLFLSRPEWQTLTTLIYAYLGRAGEDNYARAMVLTLLLAAFALGIFLLLDGGEGGKRTETL

SEQ ID NO: 26419 - protein, 81 aa, Neisseria meningitidis; identical to SEQ ID NO: 2079

SEQ ID NO: 26420 - protein, 189 aa, Neisseria meningitidis; identical to SEQ ID NO: 2163

SEQ ID NO: 26421 - protein, 316 aa, Neisseria meningitidis; identical to SEQ ID NO: 6852

SEQ ID NO: 26422 - protein, 468 aa, Neisseria meningitidis; identical to SEQ ID NO: 13564

SEQ ID NO: 26423 - protein, 169 aa, Neisseria meningitidis; identical to SEQ ID NO: 2049

SEQ ID NO: 26424 - protein, 428 aa, Neisseria meningitidis
MSAIVDIFAREILDSRGNPTVECDVLLESGVMGRAAVPSGASTGQKEALELRDGDKSRYSGKGVLKAVEHVNNQIAQALIGIDANEQSYIDQIMIELDGTENKGNLGANATLAVSMAVARAAAEDSGLPLYRYLGGAGPMSLPVPMMNVINGGEHANNSLNIQEFMIMPVGAKSFREALRCGAEIFHALKKLCDSKGFPTTVGDEGGFAPNLNSHKEALQLMVEATEAAGYKAGEDVLFALDCASSEFYKDGKYHLEAEGRSYTNAEFAEYLESLVNEFPIISIEDGMDENDWEGWKLLTEKLGGKVQLVGDDLFVTNPKILAEGIEKGVANALLVKVNQIGTLSETLKAVDLAKRNRYASVMSHRSGETEDSTIADLAVATNCMQIKTGSLSRSDRMAKYNQLLRIEEELAEAAYYPGKAAFYQLGK

SEQ ID NO: 26425 - protein, 92 aa, Neisseria meningitidis; identical to SEQ ID NO: 2137

SEQ ID NO: 26426 - protein, 123 aa, Neisseria meningitidis; identical to SEQ ID NO: 1296

SEQ ID NO: 26427 - protein, 498 aa, Neisseria meningitidis
MSLALVYSRALSGMNAPLVEVEAHLANGLPHFNIVGLPDTEVKESRDRVRAAIIQSGFEFPAKKITVNLAPADLPKESGRFDLPIAIGILAASGQVAPEKLEEYEFAGELALSGLLRPVRGALAMAWQGMQAKRAFVLPEENAGQAAVMRGITVYGARSLGEVAAHLNGIEPLAQTECQVPQMPFEHGGQPDLCDVKGQHTARLALEIAAAGGHSLLMMGPPGTGKSMLSQRLPGILPPLTEDELVEVWALRSLLPNHQQQLDSNRPFRSPHHSASAAAMVGGGSDPRPGEISLAHHGVLFLDELPEFDRKVLEVLREPLENGEIHISRAARQAVYPAKFQLVAAMNPCPCGYLGHPVKPCRCTPESVARYRSKISGPLLDRIDLTIEVPSLSAAELMQQEAGESSASVLERVIAARDKQYARQGKVNAALSVSELDTSARIQKEAQEALGGLLEKLSLSARSFHRIMRVARTLADLAGDEEVGRSHVMKAIGFRRAL

SEQ ID NO: 26428 - protein, 42 aa, Neisseria meningitidis; identical to SEQ ID NO: 6907

SEQ ID NO: 26429 - protein, 273 aa, Neisseria meningitidis
MTFDEWLGLSKLPKIEARMLLQYVSEYTRVQLLTRGGEEMPDEVRQRADRLAQRRLNGEPVAYILGVREFYGRRFTVNPSVLIPRPETEHLVEAVLARLPENGRVWDLGTGSGAVAVTVALERPDAFVRASDISPPALETARKNAADLGARVEFAHGSWFDTDMPSEGKWDIIVSNPPYIENGDKHLSQGDLRFEPQIALTDFSDGLSCIRTLAQGAPDRLAEGGFLLLEHGFDQGAAVRGVLAENGFSGVETLPDLAGLDRVTLGKYMKHLK

SEQ ID NO: 26430 - protein, 88 aa, Neisseria meningitidis
MQVLKKVDWKMFVARSFWRCVPVGLTAGVWCFVAGMALHSCAKEPEPVAKELTKVEKMERQADLEVKVWEEQYESMSVEEKMKGIVYE

SEQ ID NO: 26431 - protein, 794 aa, Neisseria meningitidis
MNKNIKSLNLREKDPFLSREKQRYEHPLPSREWIIELLERKGVPSKIESLARELSITEDEYVFFERRLKAMARDGQVLINRRGAVCAADKLDLVKCRVEAHKDGFGFAVPLTPAKDGDFVLYERQMRGIMHGDIVTVRPAGMDRRGRREGTVLDIVERAQSKVVGRFYMDRGVAILEPEDKRLNQSIVLEPDGVARFKPESGQVIVGEIEVYPEQNRPAVAKIIEVLGDYADSGMEIEIAVRKHHLPHQFSEACAKAVKKIPDHVRKSDLKGRVDLRDLPLVTIDGETARDFDDAVFAEKIGRNYRLVVAIADVSHYVRPDDAIDTDAQERSTSVYFPRRVIPMLPENLSNGICSLNPNVERLCMVCDMVITYAGNIKEYRFYPAVMRSHARLTYNQVWKWLSGGIGHPFKAQIDTLYKLFKILQKKRFERGAVEFDSIETQMLFDDNGKIEKIVPVVRNDAHKLIEECMLAANVCAADFLLKNKHTALFRNHLGPTPEKLAALREQFGLLGLQLGGGDNPSPKDYAALAGQFKGRPDAELLQVMMLRSMQQAVYEPHCDGHFGLAYEAYAHFTSPIRRYPDLTVHRAIKAVLNQQTYTPKKSWQALGVHTSFCERRADDASRDVENWLKTYYMRDKVGEIFEGKISGVANFGIFVTLDDIHIDGLVHISDLGEDYFNFRPEIMAIEGERSGIRFNMGDRVAIKVARADLDDGKIDFVLIAEGSGRGRKVKSSASAKPAGTAGKGKPKTAAGKKTARGGKVRGRGASAAAESGKKAKKPIPIEVQKVKKRKGKS

SEQ ID NO: 26432 - protein, 99 aa, Neisseria meningitidis; identical to SEQ ID NO: 3406

SEQ ID NO: 26433 - protein, 218 aa, Neisseria meningitidis
MNRQKVIAIDGPGASGKGTVAARVAAALGYDYLDTGALYRLTALYAQKQGVEWHDEENVSELAKKLPAVFSGSRILLGGEDVSDGIRTEAIGMGASAVAQLPKVRASLLQRQRDFLTEKGLVADGRDTGSVVFPQAELKIFLTAESKIRAERRAKQIGIPCEGLAFERILSDIEARDEADRNRKVAPLKQQPDALLLDTSRLTIEETVKKVLDWYRKV

SEQ ID NO: 26434 - protein, 118 aa, Neisseria meningitidis
MDKIFLHGIKADTLIGVYGWERERLQTLIVDLDIGIPEKAGSDDDIANTVHYAEVCETLRRHLKEQDFLLLEALAEYIADLVLGYFGAVWVRVKIVKPGILEGVREVGVEIERGKRED

SEQ ID NO: 26435 - protein, 397 aa, Neisseria meningitidis
MFFKHIEAAPADPILGLGEAFKAETRPEKVNLGIGVYKDASGATPLVKAVKEAEKRLLESETTKNYLTIDGVADYNAQTQILLFGKDHEIIASRRAKTAQSLGGTGALRIAAEFAKRQLNAQTIWISNPTWPNHNAIAKAVGIQDKPYRYYDAAKHGLDWDGMIEDLSQAQKGDIVLLHGCCHNPTGIDPTPEQWETLAKLSAEKGWLPLFDFAYQGFGNGLEEDAYGLRVFLKHNTELLIASSYSKNFGMYNERVGAFTLVAEDEETAARAHSQVKTIIRTLYSNPASHGANTIALVLKNDDLKAQWIAELDEMRGRIKAMRQKFVELLKAKGASQNFDFIIEQNGMFSFSGLTPEQVDRLKNEFAIYAVRSGRINVAGITDDNIDYLCESIVKVL

SEQ ID NO: 26436 - protein, 64 aa, Neisseria meningitidis; identical to SEQ ID NO: 19744

SEQ ID NO: 26437 - protein, 194 aa, Neisseria meningitidis
MHILTAGVDEAGRGPLVGSVFAAAVILPEIFDLPGLTDSKKLSEKKRDALAEMIKNQAVAWHVAAASPEEIASLNILHATMLAMKRAVDGLAVRPERIFIDGNRIPEHLNIPAEAVVKGDSKIIEISAASVLAKTARDAEMYALAQRHPQYGFDKHKGYGTKQHLEALKQYGVLPEHRRDFAPVRNLLAQQALF

SEQ ID NO: 26438 - protein, 268 aa, Neisseria meningitidis; identical to SEQ ID NO: 3556

SEQ ID NO: 26439 - protein, 91 aa, Neisseria meningitidis; identical to SEQ ID NO: 4707

SEQ ID NO: 26440 - protein, 251 aa, Neisseria meningitidis
VSREINAGGHHFLYGGISGGGVHYWDNKDFSEQCLHLSLGYKNRSVTRSFGIVPFVGQNLLGGSRYNFVGGFNADFSQHLSERWRLTLNAGNMWKHYQEDRTAARYDSHMPLAGATLMYSAPKDWLLYGGADWSHDLTKEAEQASVRKGLRIGAVKTFDGGLGLRANLRYTRRTFDAPGTIVYRFPRKDHEYQANLSFWHDKISWKGFTPQLNFRYLKIDSNMKSFYTRKNTQIFMSVEKDETFAKFPKIP

SEQ ID NO: 26441 - protein, 228 aa, Neisseria meningitidis; identical to SEQ ID NO: 23676

SEQ ID NO: 26442 - protein, 321 aa, Neisseria meningitidis; identical to SEQ ID NO: 6649

SEQ ID NO: 26443 - protein, 388 aa, Neisseria meningitidis
MRKKLTALVLSALPLAAVADVSLYGEIKAGVEGRNIQLQLTEQPSKAQGQTNNQVKVTKAKSRIRTKISDFGSFIGFKGSEDLGDELKAVWQLEQDVSVAGGGATRWGNRESFVGLAGEFGTLRAGRVANQFDDASQAIDPWDSNNDVASQLGIFKRHDDMPVSVRYDSPDFSGFSGSVQFVPIQNSKSAYKPAYVDEKKMVHAAVVGKPGSDVYYAGLNYKNGGFAGSYAFKYARHANVGRDAFELFLLGSTSDEAKGTDPLKNHQVHRLTGGYEEGGLNLALAAQLDLSENGDKAKTKNSTTEIAATASYRFGNAVPRISYAHGFDLIERGKKGENTSYDQIIAGVDYDFSKRTSAIVSGAWLKRNTGIGNYTQINAASVGLRHKF

SEQ ID NO: 26444 - protein, 189 aa, Neisseria meningitidis
MAAGKHTKHSNRVRIIGGQCRGRKLSFTSADGLRPTPDSVREKLFNWLGQDLTGKTVLDLFGGSGALGIEAASRNAKRVLISDNNRQTVQTLQKNSRELGLGQVQIVCSDSIAYLKTVSEQFDVVFLDPPFAWQDWQILFDALKPCLNPRAFVYLEAGRLPDIPDWLTEYREGKSGQSTFELRVFQVAE

SEQ ID NO: 26445 - protein, 375 aa, Neisseria meningitidis
MTHIKPVIAALALIGLAACSGSKTEQPKLDYQSRSHRLIKLEVPPDLNNPDQGSLYRLPAGSGAVRASDLEKRRTPAVQQPADAEVLKSVKGVRLERDGSQRWLVVDGKSPAEIWPLLKAFWQENGFDIKSEEPAIGQMETEWAENRAKIPQDSLRRLFDTVGLGGIYSTGERDKFIVRIEQGKNGVSDIFFAHKAMKEVYGGKDKDTTVWQPSPSDPNLEAAFLTRFMQYLGVDGQQAENASAKNPTLPAANEMARIEGKSLIVFGDYGRNWRRTALALDRIGLTVVGQNTERHAFLVQKAPNESNAVTEQKPGLFKRLLGKGKAEKPAEQPELIVYAEPVANGSRIVLLNKDGSAYAGKDASALLGKLHSELR

SEQ ID NO: 26446 - protein, 349 aa, Neisseria meningitidis; identical to SEQ ID NO: 328

SEQ ID NO: 26447 - protein, 167 aa, Neisseria meningitidis; identical to SEQ ID NO: 189

SEQ ID NO: 26448 - protein, 69 aa, Neisseria meningitidis; identical to SEQ ID NO: 4226

SEQ ID NO: 26449 - protein, 291 aa, Neisseria meningitidis; identical to SEQ ID NO: 22731

SEQ ID NO: 26450 - protein, 334 aa, Neisseria meningitidis
MSIKVAINGFGRIGRLALRQIEKAHDIEVVAVNDLTPAEMLLHLFKYDSTQGRFQGTAELKDDAIVVNGKEIKVFANPNPEELPWGELGVDVVLECTGFFTNKTKAEAHIRAGARKVVISAPGGNDVKTVVYGVNQNILDGSETVISAASCTTNCLAPMAAVLQKEFGVVEGLMTTIHAYTGDQNTLDAPHRKGDLRRARAAALNIVPNSTGAAKAIGLVIPELNGKLDGSAQRVPVATGSLTELVSILERPVTKEEINAAMKAAASESYGYNEDQIVSSDVVGIEYGSLFDATQTRVMTVGGKQLVKTVAWYDNEMSYTCQLVRTLEYFAGKI

SEQ ID NO: 26451 - protein, 1201 aa, Neisseria meningitidis
MFHFAFPAQTALRQAITDAYRRNEIEAVQDMLQRAQMSDEERNAASELARRLVTQVRAGRTKAGGVDALMHEFSLSSEEGIALMCLAEALLRIPDNATRDRLIADKISDGNWKSHLNNSPSLFVNAAAWGLLITGKLTATNDKQMSSALSRLISKGSAPLIRQGVNYAMRLLGKQFVTGQTIEEALQNGKEREKMGYRFSFDMLGEAAYTQADADRYYRDYVEAIHAIGKDAAGQGVYEGNGISVKLSAIHPRYSRTQHGRVMGELLPRLKELFLLGKKYDIGINIDAEEANRLELSLDLMEALVSDPDLAGYKGIGFVVQAYQKRCPFVIDYLIDLARRNNQKLMIRLVKGAYWDSEIKWAQVDGLNGYPTYTRKVHTDISYLACARKLLSAQDAVFPQFATHNAYTLGAIYQMGKGKDFEHQCLHGMGETLYDQVVGPQNLGRRVRVYAPVGTHETLLAYLVRRLLENGANSSFVNQIVDENISIDTLIRSPFDTIAEQGIHLHNALPLPRDLYGKCRLNSQGVDLSNENVLQQLQEQMNKAAAQDFHAASIVNGKARDVGEAQPIKNPADHDDIVGTVSFADAALAQEAVGAAVAAFPEWSATPAAERAACLRRFADLLEQHTPALMMLAVREAGKTLNNAIAEVREAVDFCRYYAGEAENTLPKDAKAVGAIVAISPWNFPLAIFTGEVVSALAAGNTVIAKPAEQTSLIAGYAVSLMHEAGIPTSALQLVLGAGDVGAALTNDARIGGVIFTGSTEVARLINKALAKRNDNPVLIAETGGQNAMIVDSTALAEQVCADVLNSAFDSAGQRCSALRILCVQEDVADRMLDMIKGAMDELVVGKPIQLTTDVGPVIDAEAQQNLLNHINKMKGVAKSYHEVKTAADVDSEKSTFVRPILFELNNLNELQREVFGPVLHVVCYRADELDSVIDQINSKGYALTHGVHSRIEGTVRHIRSRIEAGNVYVNRNIVGAVVGVQPFGGHGLSGTGPKAGGSFYLQKLTRAGEWVAPTLSQIGQADEAALKRLEALVHKLPFNAEEKKAAAAALGHARIRTLRRAETVLTGPTGERNSISWHAPKRVWIHGGSTVQAFAALTELAASGIQAVVEPDSPLASYTADLEGLLLVNGKPETVGISHVAALSPLNSARKQELAAHDGALIRILPSENGLDILQVFEEISCSVNTTAAGGNASLMAVAD

SEQ ID NO: 26452 - protein, 158 aa, Neisseria meningitidis; identical to SEQ ID NO: 19791

SEQ ID NO: 26453 - protein, 1144 aa, Neisseria meningitidis
MTEPTYIPLRLHTEFSITDGMVRIKKLVAKAQEYGLPALGISDLMNEFGLVKFYKACRGAGIKPIGAADVWIGNPNAPDKPFRAMLIIRNDAGYLRLSELLTAAYVGKDRNIHHAELNPEWLENGDNSGLICLSGAHYGEVGVNLLNGNEDAARAAALKYAAWFPDAFYLELQRLPERPEWEACVSGSVKLAEELGLPVVATHPTQFMSSDDFNAHEARVCIAGGWVLTDKKRPRDFTPGQFFIPPETMLERFADLPEALENTVEIAKRCNLHITLGKNFLPLFPTPDGLSRDDYLIKLSNKGLQERMVQLYPDEAERAAKMPEYQERLDFELNIIIQMKFPGYFLIVQDFINWAKTHGCPVGPGRGSGAGSLVAYSLKITDLDPLKYALLFERFLNPERVSMPDFDVDFCQANRGRVIEYVRDKYGAQAVSQIVTFGTMSSKAVIRDVGRVLELPFMLCDKLSKLIPLEANKPLSLDDAMKAEPQIQELIEAEEADELITLAKKLEDLTRGLGMHAGGVLIAPGKISDYSPVYQADESASPVSMYDKGDVEDVGLVKFDFLGLRNLTIIEMAQNNIKNTTGDIIDVGKIPLDDQAAYQIFRDANTTAVFQFESTGMKKMLKTAHTTKFEELIAFVSLYRPGPMDNIPDFVARMKGQEFQYIHPLLEGILAPTYGIMVYQEQVMQAAQIIGGYSLGGADLLRRAMGKKKPEEMVKHREIFAEGAAKQGISREKSDEIFNYMEKFAGYGFNKSHAAAYALISYQTAWLKAHYPAEFMAATMSSELDNTDQLKHFYDDCRANGIEFLPPDINESDYRFTPYPDMKIRYALGAIKGTGEAAVESITAARQSGGKFTGLLDFCERVGKEHMNRRTLEALIRGGAFDSIEPNRAMLLANIDLAMNNADQKAANTNQGGLFDMMEDAIEPVRLIDAPMWSESEKLAEEKTVIGFYLSGHPFGPYAQEVRQIAPTKLGRLKPQDSVRLAGFVTAVRTMMGKRGKIAFVSLEDLSGQVEIMVGGQTLENCADCLKADQVLIIESKVSRDDYGGGDGLRILANQVMTLQTARERYARSLSLALAPHHDIGGLVQLLAAHQLPDTPRIPLQLSYANGKASGRLQVPPKWTVTPSSALFGELETLLGSRSVRVNW

SEQ ID NO: 26454 - protein, 716 aa, Neisseria meningitidis
MLTDLEKNAIRDHYQNIGKNLPGFRPRASQREMIAAVANAFSRTLAREEGGEPPKREGESIAVIEGPTGVGKSLAYLLAGGIMAQTRGKRLIVSSATVALQEQLVDRDLPFLVEKSGLELTFALAKGRGRYLCPYKLYQLTQSNAQQNLLGFEAPAVLWDSKPKPEELKLLRDIADEFSARRFNGDRDTWPEKIDDAIWLKVTNDRHGCLKTACPNRPECPFYLARDVLETVDVVVANHDLLLADISMGGGVILPAPENSFYCIDEAHHLPKKALSRFAAEHSWNIAVWTLEKLPQLTGKIAALTDKAELANLADEAAASLLDSLHEWQFHLAEEPSLSMGPSENDRRTNSEPTWLWEDGKIPEGLETTVSNTAIAARSLLKHVVGLNDALSAARREKEQDGALLDRLTGDFGIFIARIEQISAVWDLLSTVPIEGEEPLAKWITRRADDKNDYIFNASPISSASHLANSLWRRAAGAVLTSATLQSLGNFNLMLRQTGLQWLPETTTLALKSPFDFEKQGELYIPPIYASPKDPEAHTAAIIEWLPKLISPIEAIGTLVLFSSRKQMQDVALRLPGNYLPLLLVQGELPKAVLLQKHHRAIEEGKASIIFGLDSFAEGLDLPGTACVQVIIAKLPFAMPDNPIEKTQNRWIEQRGGNPFIEITVPEAGIKLIQAVGRLIRTEQDYGRVTILDNRIKTQRYGQQLLAGLPPFKRIG

SEQ ID NO: 26455 - protein, 67 aa, Neisseria meningitidis
MICALSDYSQNKHTVVMANFLYPNEKMDWRNLDDLFNELVLEELQSSFMDWYPTIEEAISHHLEDFS

SEQ ID NO: 26456 - protein, 277 aa, Neisseria meningitidis; identical to SEQ ID NO: 3602

SEQ ID NO: 26457 - protein, 297 aa, Neisseria meningitidis
MKGFTIIEFLVAGMLSMIVLMAVGSSYFTSRKLNDAANERLSAQQDLRNAATLIVRDARMAGGFGCFNMSEHPATDVISDTTQQNSPFSLKRNGIDKLIPITESLNINYQNFFQVDSALIFQYGIDDLDASAETVVVSSCSKIAKPGKKISTLQEAKSALQITNDDKQNGNITRQRHVVNAYAVGRIAGEEGLFRFQLDDKGKWGNPQLLAKKIRHMKVRYIYVSDCPEDDDAGKEETFKYTDTFNSAKDAVTPAGVEVLLSSGTDTKIAASSDNHIYAYRIDATIRGGNVCANRTL

SEQ ID NO: 26458 - protein, 89 aa, Neisseria meningitidis; identical to SEQ ID NO: 19801

SEQ ID NO: 26459 - protein, 615 aa, Neisseria meningitidis
MHDTRTMMIKPTALLLPALFFFPHTYAPAADLSENKAAGFALFKNKSPDTESVKLKPKFPVRIDTQDSEIKDMVEEHLPLITQQQEEVLDKEQTGFLAEEAPDNVKTMLRSKGYFSSKVSLTEKDGAYTVHITPGPRTKIANVGVAILGDILSDGNLAEYYRNALENWQQPVGSDFDQDSWENSKTSVLGAVTRKGYPLAKLGNTRAAVNPDTATVDLNVVVDSGRPIAFGDFEITGTQRYPEQIVSGLARFQPGTPYDLDLLLDFQQALEQNGHYSGASVQADFDRLQGDRVPVKVSVTEVKRHKLETGIRLDSEYGLGGKIAYDYYNLFNKGYIGSVVWDMDKYETTLAAGISQPRNYRGNYWTSNVSYNRSTTQNLEKRAFSGGIWYVRDRAGIDARLGAEFLAEGRKIPGSDIDLGNSHATMLTASWKRQLLNNVLHPENGHYLDGKIGTTLGTFLSSTALIRTSARAGYFFTPENKKLGTFIIRGQAGYTLARDNADVPSGLMFRSGGASSVRGYELDSIGLAGPNGSVLPERALLVGSLEYQLPFTRTLSGAVFHDMGDAAANFKRMKLKHGSGLGVRWFSPLAPFSFDIAYGHSDKKIRWHISLGTRF

SEQ ID NO: 26460 - protein, 96 aa, Neisseria meningitidis
MWMILREDIGSAEDKKDILLPASGKFQIYAPIWEAPHPQRWKQANACKQSRQTDNGILPDCHSDIGNAEKNTQIGYNPDKHTQGQQHGSLARSKIH

SEQ ID NO: 26461 - protein, 379 aa, Neisseria meningitidis
MSQNASVGIVTPQKIPFEMPLVLENGKTLPRFDLMIETYGELNAEKNNAVLICHALSGNHHVAGRHSAEDKYTGWWDNMVGPGKPIDTERFFVVGLNNLGGCDGSSGPLSINPETGREYGADFPVVTVKDWVKSQAALTDYLGIGQWAAVVGGSLGGMQALQWTISYPERVRHALVIASAPKLSTQNIAFNDVARQAILTDPDFNEGHYRSRNTVPARGLRIARMMGHITYLAEDGLGKKFGRDLRSNGYQYGYGVEFEVESYLRYQGDKFVGRFDANTYLLMTKALDYFDPAADFGNSLTRAVQDVQAKFFVASFSTDWRFAPERSHELVKALIAAQKSVQYIEVKSAHGHDAFLMEDEAYMRAVAAYMNNVYKECQQ

SEQ ID NO: 26462 - protein, 661 aa, Neisseria meningitidis
MAKNNQYSESSITVLKGLEPVKERPGMYTRTDSPTHICQEVIDNAADEALGGFATAIDVQIHEDGSLSVRDNGRGIPVGLHPEEGVPVVELVFTRLHAGGKFNKKDGGSAYAFSGGLHGVGVSVTNALSTRLEVTVKREGKIHRIVFAGGDVVEPLAQVGKCAVKDSGTEVRVWPDGKYFESPNYSIPELERLLRAKAVLLPGVRVSLTRPVKGEDEAHTQTWHYPDGLKSYLTDLIADAQEAVPLFSCENYISDGHNGDFSIGEGAAFALTWLEEGSCANESYVNLIPTPLGGTHEAGLKQAVFNAVNNFINLHNLLPRGVKVQSDDVFGKTAFVLSARVLDPQFQGQTKDKLTNRDALKLVAAVSGDPLELWLNQNVDFGKKIAELAIRQAQARMRSVKKIEKKKGSGVAVLPGKLTDCESEDIRENELFLVEGDSAGGSAKLARDKATQAILPLRGKVLNSFEVHPDQLFGNAEIHDISVAIGVDPHGINDHPDLSGLRYGKIAILSDADVDGSHIQVLLLTLFYRHFPKLVADGHIYVAQPPLFRVDVNAQGKNKPARKFYALDQNELDSILERLQKEGFKETAYSISRFKGLGEMNPDQLKDTTMHPDTRRLLQVQILEGADDETRDIFVKLMGKGEAAARRAWMEREGDTAELDI

SEQ ID NO: 26463 - protein, 111 aa, Neisseria meningitidis; identical to SEQ ID NO: 3043

SEQ ID NO: 26464 - protein, 443 aa, Neisseria meningitidis; identical to SEQ ID NO: 6693

SEQ ID NO: 26465 - protein, 335 aa, Neisseria meningitidis
MSTFFQQTAQAMIARHIDRFPLLKLDQVIDWQPIEQYLNRQKTRYLRDHRGRPACPLLSMFKAVLLGQWHSLSDPELEHSLITRIDFNLFCRFDELIIPDYSTLCRYRNWLAQDDTLSELLKLINCQLTEKGLKIEKASAAVVDATIIQTAGSKQRQAIEVDEEGQISGQTTPSKDSDARWIKKNGLYKLGYKQHTRTDAEGYIEKLHITPANAHECKHLSPLLEGLPEGTTVYADKGYDSAENRQHLEEHQLLDGIMRKACRNRPLTEAQTKRNRYLSKTRYVVEQSFGTLHRKFRYARAAYFGLIKVSAQSHLKAMCLNLLKAANRLSAPAAA

SEQ ID NO: 26466 - protein, 110 aa, Neisseria meningitidis
MLPELRRLSHKRIAGLAGIAPHPREGGETKFKSRCFGGRSAVRKALYMATVAATRFEPLIRDFYQRLLSEGKPYKVAVTACMRKLLTISNARMRDYFAENDTAENGIRTA

SEQ ID NO: 26467 - protein, 210 aa, Neisseria meningitidis
MLNIQNPMFLMLMSDSPQLREFLVRNIDNIANDTEAFVNRYDLNRHMIYNTLLMVEGKQLDRLKQRSEKVLAHPTPSKWLQKRLYDYRFFLAFAEQDAEAMKAALEPLFDKKTARMAAKETLSYFDFYLQPQIVTYAKIASMHGFDLGIDHEIAPRDLTVYDPLPADEYQDIFDFMKQYDLSYPYEYLQDWIDYYTFKTDKLVFGNAKRE

SEQ ID NO: 26468 - protein, 148 aa, Neisseria meningitidis; identical to SEQ ID NO: 4019

SEQ ID NO: 26469 - protein, 406 aa, Neisseria meningitidis; identical to SEQ ID NO: 18921

SEQ ID NO: 26470 - protein, 81 aa, Neisseria meningitidis; identical to SEQ ID NO: 2565

SEQ ID NO: 26471 - protein, 178 aa, Neisseria meningitidis; identical to SEQ ID NO: 1654

SEQ ID NO: 26472 - protein, 459 aa, Neisseria meningitidis
MLLDLNRFSFSVFLKEVRLLTALALPMLLAQVAQVGIGFVDTVMAGGAGKEDLAAVALGSSAFATVYITFMGIMAALNPMIAQLYGAGKTDEVGETGRQGIWFGLFLGVFGMVLMWAAITPFRNWLTLSDYVEGTMAQYMLFTSLAMPAAMVHRALHAYASSLNRPRLIMLVSFAAFVLNVPLNYIFVYGKFGMPALGGAGCGLATMAVFWFGALALWIYIAKEKFFRPFGLTAKFGKPDWAVFKQIWKIGAPIGLSYFLEASAFSFIVFLIAPFGEDYVAAQQVGISLSGILYMIPQSVGSAGTVRIGFSLGRREFSRARYISGVSLVLGWMLAVITVLSLVLFRSPLVSMYNNDPAVLSIAATVLLFAGLFQPADFTQCIASYALRGYKVTKVPMFIHAAAFWGCGLLPGYLLAYRFDMGIYGFWTALIASLTIAAVALVWCLELCSREMVRSHKAV

SEQ ID NO: 26473 - protein, 238 aa, Neisseria meningitidis; identical to SEQ ID NO: 945

SEQ ID NO: 26474 - protein, 63 aa, Neisseria meningitidis; identical to SEQ ID NO: 22591

SEQ ID NO: 26475 - protein, 270 aa, Neisseria meningitidis
MASKPFLKWAGGKHKLVPFIEHNLPTPTRKRLIEPFCGSAALSLALDFEQYLLNDINADLIGLFRILKEEKSGFIDYARSFFISENNSDSRFYELREQFNFSKNLHERSALFIYLNRHAFNGLCRYNSKGVFNVPFGRYKSPYFPQQEMEGFIQKSDRVELMCGDFQMILSQTDNTDTVYCDPPYAPLSPTASFTTYAKEGFNLDNQIRLAQSAQQIAPDSQGVLISNHDTEFTRDIYSFAILKTIEVQRNIAAKGSSRKKVGELLAIYD

SEQ ID NO: 26476 - protein, 355 aa, Neisseria meningitidis
MRKILVTGGAGFIGSAVVRHIIQNTQDSVVNLDKLTYAGNLESLTDIADNPRYAFEQVDICDRAELDRVFAQHRPDAVMHLAAESHVDRSIGSAGEFIQTNIVGTFNLLEAARAYWQQMPSEQREAFRFHHISTDEVYGDLGGTDDLFTETAPYAPSSPYSASKASSDHLVRAWLRTYGLPTIVTNCSNNYGPYHFPEKLIPLMILNALDGKPLPVYGDGMQIRDWLFVEDHARALYQVVTEGVVGETYNIGGHNEKANIEVVRTICALLEELVPNKPQGVARYEDLITYVKDRPGHDVRYAVDAAKIRRDLGWLPLETFESGLRKTVQWYLDNKTWWQNVLNGSYRLERLGTGK

SEQ ID NO: 26477 - protein, 123 aa, Neisseria meningitidis
MQDVLIGWTSEERVFSLRQTIQAEEQARREAAKAEAEKQEVRALPYCVIPEFETPEFETACLVVRDFWNRQAVGVAPPKAIIIQEFIKNTFKNITGVEPKEAAIRRIDSLTRPPLFKNQSKKQ

SEQ ID NO: 26478 - protein, 332 aa, Neisseria meningitidis
VIASRLSGNISSAIQEHKDGKVNINRFQNILADLYSLGGLGSTLIEKNGNMQSWGIPLAIAGDIIAATAIATGDTGTISTEEFYNFDNWKGFGYELFEDWSRWVYDWLPDGWNLWKELDRNRSGQYHIYDPLALDLDGDGIETVAAKGFSGSLFDHNGNGIRTATGWVSADDGLLVRDLNGNGIIDNGAELFGDNTKLADGSFAKHGYAALAELDSNGDNIINAADAAFQSLRVWQNLNQDGISQTNELRTLEELGIQSLDLAYKDVNKNLGNGNTLAQQGSYTKTDGTTAKMGDLLLAADNLHSRFTNKMLSISHVRENTISPFVLGCLNK

SEQ ID NO: 26479 - protein, 327 aa, Neisseria meningitidis; identical to SEQ ID NO: 2154

SEQ ID NO: 26480 - protein, 103 aa, Neisseria meningitidis
MLAILLSAILGLVSTTAAAGTSEPAHRHTKHIRKANKQMLHPECRKYLERRAAWYRSQGNVQELRENKKARKAFRSLPYKEQKTQCRAAYEAFDDFDGGRFRR

SEQ ID NO: 26481 - protein, 628 aa, Neisseria meningitidis; identical to SEQ ID NO: 19899

SEQ ID NO: 26482 - protein, 570 aa, Neisseria meningitidis
  misc_feature 90: 'Xaa' is any amino acid
MKASQFFISTLKEAPAEAALASHKLMIRAGLIKANASGLYTWMPMGLRVLRKVENVVREEMARAGSVELLMPVVQPAELWQESGRWEFYXKELLRLKDRHDRDFCMGPTCEEVIADIVRKEINSYKQLPKNFYHIQTKFRDEVRPRFGVMRAREFVMKDAYSFHADYASLQTTYDAMYDAYCRIFTRLGLAFRPVAADTGSIGGTGSHEFQVLAESGEDVIAYSDTSDYAANIELAPTLPLKGERAAAQAVLTKVHTPNVKTIESLVEFLNIPVEQTLKSIVVEGENEGEIVLLLLRGDHEFNDIKAEKLAGVKSPLTMASPAAIVEQFGANGGSLGPVGFKGKVYADFATEKGADWVIGANEDGYHYTGFNFGRDAAEPEFVDLRNVVEGDESPDGQGRLKLARGIEVGHVFQLRDKYTKAMNVSFLDNNGKSQIMEMGCYGIGITRVVAAAIEQNNDEKGIIWTKAMAPFEVVIVPMNYKKSDTVREAADKIYAELLAAGADVLLDDRDERAGVLLNDSELLGIPHRIVIGDRALKEGNVEYAERRNNEAQAVAIGEIVARVTASLNG

SEQ ID NO: 26483 - protein, 123 aa, Neisseria meningitidis
MRKPQRGYARQDRVKEQIMRELAELVRTGLKDPRAGFITVNEVEVTRDYSHATVFYTVLNQDAREITEEVLEHARGHLRSELAKRIKLFKIPELHFKYDESLERGLNLSALIDQVAAEKPVED

SEQ ID NO: 26484 - protein, 150 aa, Neisseria meningitidis
MQIILLEKIGGLGNLGDIVTVKNGYARNFLIPAGKAKRATEANMKEFEARRAELEAKQAEILADARARQEKLDGQTVTVAQKAGVDGRLFGSVTNADIAAAIVAAGIEAVKANVRLPNGPLKAVGEYEVEVALHTDAVAKITVAVIAAAE

SEQ ID NO: 26485 - protein, 507 aa, Neisseria meningitidis; identical to SEQ ID NO: 1429

SEQ ID NO: 26486 - protein, 335 aa, Neisseria meningitidis
MSTFFQQTAQAMIAKHIDRFPLLKLDQVIDWQPIEQYLNRQKTRYLRDHRGRPAYPLLSIFKAVLLGQWHSLSDPELEHSLITRIDFNLFCRFDELSIPDYSTLCRYRNWLAQDDTLSELLKLINRQLTEKGLKVEKASAAVVDATIIQTAGSKQRQAIEVDEEGQISGQTTPSKDSDARWIKKNGLYKLGYKQHTRTDAEGYIEKLHITPANAHECKHLPPLLEGLPKDTTVYADKGYDSAENRQHLEEHQLQDGIMRKTCRNRPLTETQTKRNRYLSKTRYVVEQSFGTLHRKFRYARAAYFGLIKVSAQSHLKAMCLNLLKAANRLSAPAAA

SEQ ID NO: 26487 - protein, 331 aa, Neisseria meningitidis
MLKKMLKWSAVFLTVSAAVFAALLFVPKDNGRAYRIKIAKNQGISSVGRKLAEDRIVFSRHVLTAAAYVLGVHNRLHTGTYRLPSEVSAWDILQKMRGGRPDSVTVQIIEGSRFSHMRKVIDATPDIEHDTKGWSNEKLMAEVAPDAFSGNPEGQFFPDSYEIDAGGSDLQIYQTAYKAMQRRLNEAWESRQDGLPYKNPYEMLIMASLVEKETGHEADRDHVASVFVNRLKIGMRLQTDPSVIYGMGAAYKGKIRKADLRRDTPYNTYTRGGLPPTPIALPGKAALDAAAHPSGEKYLYFVSKMDGTGLSQFSHDLTEHNAAVRKYILKK

SEQ ID NO: 26488 - protein, 508 aa, Neisseria meningitidis
MNPMYITFAIYLVAVLLIGLAAYFSTRNFDDYILGGRSLGPFVTAMSAGASDMSGWLLMGLPGAIYLSGLNEAWIAIGLLVGAYFNWLLVAGRLRVHTEYANNALTLPDYFFHRFGAGGHLMKVVSALIILFFFTIYCASGIVAGATLFQSLFEGMTYNQAMWLGAGATIAYTFLGGFLAVSWTDTLQASLMIFALILTPVMVYLGLGGAEQMSAAIQSVAAGTGKAYGSLFAGTTVIGIISTAAWGLGYFGQPHILARFMAAESAKSLVSARRIGMTWMALCLAGAVAVGYFGIAYFGANPDKVSSMSGNHERIFIALSTLLFNPWIAGIILSAILAAVMSTLSCQLLVCSSAITEDFYKGFLRKNAQQSELVWVGRLMVLAIAVISILIASDPNSKVLGLVSYAWAGFGAAFGPIVILSVLWKRITAYGALSGMVAGALTVVVWAEWVKKPAQAAGESGLLTMYEIVPGFIVCLIIAVLVSLFNKEPSRETQERFEKADADYRAAR

SEQ ID NO: 26489 - protein, 225 aa, Neisseria meningitidis; identical to SEQ ID NO: 1002

SEQ ID NO: 26490 - protein, 265 aa, Neisseria meningitidis
MLKQRVITAMWLLPLMLGMLFYAPQWLWAAFCGLIALIALWEYARMSGLCKIKTNHYLAATLVFGVVAYAGGWMLPNLVWYVVLAFWLAIMPLWLRFKWRLNGSWQVYAVGWLLVMPFWFALVSLRPHPDDALPLLAVMGLVWVADVCAYFCGKAFGKHKIAPAISPGKSWEGAIGGAVCVAVYMTAVRSAGWLAFDTGWFDTVLIGLVLTVVSVCGDLLESWLKRAAGIKDSSKLLPGHGGVFDRTDSLIAVISVYAAMMSVLN

SEQ ID NO: 26491 - protein, 78 aa, Neisseria meningitidis; identical to SEQ ID NO: 1622

SEQ ID NO: 26492 - protein, 332 aa, Neisseria meningitidis
VAAHIGRIDTDAPLKPLYVIHGEEELLRIEALDALRAAAKKQGYLNREVYTADNAFDWNELLQTAGSAGLFADLKLLELHIPNGKPGKTGGEALQDFAARLPEDTVTLVLLPKLEKTQLQSKWFAALAAKGEVWEAKPVGAAALPQWIRGRLDKIGLGIGADALALFAERVEGNLLAARQEIDKLALLYPKGHTVNIDEAQTAVANVARFDAFQLAGAWMKGDVPRVCRLLDGLQEEGEEPVLLLWAVAEDVRTLIRLAAALKQGQSIQSVRNSLRLWGDKQTLAPLAVKRISVVRLLDALKTCAQIDRIIKGAEEGDAWTVFKRLVVSLAE

SEQ ID NO: 26493 - protein, 304 aa, Neisseria meningitidis; identical to SEQ ID NO: 3139

SEQ ID NO: 26494 - protein, 384 aa, Neisseria meningitidis; identical to SEQ ID NO: 1716

SEQ ID NO: 26495 - protein, 93 aa, Neisseria meningitidis; identical to SEQ ID NO: 2808

SEQ ID NO: 26496 - protein, 110 aa, Neisseria meningitidis; identical to SEQ ID NO: 7667

SEQ ID NO: 26497 - protein, 303 aa, Neisseria meningitidis
MDTLFSLKVFRQVVQSGGFTRAADALGISTAMASKHVSHLENTVQAKLLHRNSRNLSLTGAGEEYYRQCSYALDTLDDAAQKAAGGTEKPQGLLRVTMPLWFAGSQICNWLAEYRERYPEVALELILDNRHVDLIAEGVDLALRVSQTLSPSLIARPLAEIEFALLASPDFLRRNGVPETPEEVAGLPAVLPTYTNQQKLDLTRKSDGKKYRLELTPVIRTDNTLMMREMIKAGACIGYQPLWAAEHDLRCGTLVRLLPGYAVPTDRLNAVYADRAFLSAKVRSFIDFLNEKIASRKGCRNAV

SEQ ID NO: 26498 - protein, 57 aa, Neisseria meningitidis
MSFGRRNTDWQAWGQHRRRATARMAQKSREREIEEYQAQFEDKDGKGRLKTGGNKDE

SEQ ID NO: 26499 - protein, 495 aa, Neisseria meningitidis
MLKKIKKALFQPKKFFQDSMWLTTSPFYLTPPRNNLFVISNLGQLNQVQSLIKIQKLTNNLLVILYTSKNLKMPKLVHQSANKNLFESIYLFELPRSPNNITPKKLLYIYRSYKKILNIIQPAHLYMLSFTGHYSYLISIAKKKNITTHLIDEGTGTYAPLLESFSYHPTKLERYLIGNNLNIKGYIDHFDILHVPFPEYAKKIFNAKKYNRFFAHAGGISINNNIANLQKKYQISKNDYIFVSQRYPISDDLYYKSIVEILNSISLQIKGKIFIKLHPKEMGNNYVMSLFLNMVEINPRLVVINEPPFLIEPLIYLTNPKGIIGLASSSLIYTPLLSPSTQCLSIGELIINLIQKYSMVENTEMIQKHLEIIKKFNFINILNDLNGVISNPLFKTEETFETLLKSAEFAYKSKNYFQAIFYWQLASKNNITLLGHKALWYYNALYNVKQIYKMEYSDIFYIDNISVDFHSKDKLTWEKIKHYYYSADNRIGRDR

SEQ ID NO: 26500 - protein, 3076 aa, Neisseria meningitidis
LKKYRGFTQKDAWAAADDTALTRGFKNSMRSARMAWNDLTGDKEELGQLKAEDMDYRKIQEGRKSQARRELGEAWEKGEGVGGGLSNVWEELKKDWREKGLDGVLEDVGEMGGATLEQAPNALVPLATTTVGGILGTLAGGNTAVGAYAGATLGNTLMEYGEQLDRAAEAAGVDPTDKDAMMAFIDRGAPGALKNAAVKGAVVGAVDMATMKLGGSILNMGKKAAEKAALKKMGVAAADKAAVAAAKGTPEFAALAKESAKGGLGGAARHAAAFALEPASEFAGEYLGTGLANGEWDEKGAALEAFSSLGHSAVEFVGTKAYAAISDPLRLSAEQKADALADAKGNIEGNRKAGKLTPEEAQALGAAVEAALDGGVEQGGAGFDTAHHDQLYLTLQQFVDRTKQKEAEQFFNSPADGNTPHAEELAREMEKQPDVSGIPSEDEAEFLNTGVMSDGLARQYADMAAKYRAKPSEAMGIDPDDGAISAAAALAVDSGAAVPSVPSDDVETPTVADDVLSGRSADADRGGVSSAYGNVRSGGAASVASGGAGRSAAAASGGIARVAPLPAGQYFDGLDTRGRKALAKEAGFDIKGVADFGQIAEPVRQKIEEAYHARIEADYQAASEAKQGYLPPPVRMADAVPVPKKGFSVPADALNKESRRRFDALPETVRRHAQTVADYTADGIMRQEAGMADMRGHYPAGLAESVRVVRAYRAEHPESADVLDRLNRAVYGYRRNNGWRVPLLSREGERLQGVRTALPDDGASEAVVGGGRGLPRALPTEDKGLAQDVRQDVRQGLTQGGRGLTPDTGADANAAALQGLPESAAVASGNAPTHRQNLQVRAHAEGAAPGLSASENLAETDGGKRAPVAGKRPDTVLPVLNPQVAESAVKVSPKKRMADAAADFTRRLAADRRKLEKAGVPLGDGEYRFEHTNRQHIDALAGVLDRLGKGGMLEEFADMAGSSHSDGLVFDSRRYLKGKEAETLQAGGLLEAVPSKSGWDYRLTQEGRALAKVMARSRDAAASAGKSAGKAQSARAKDTPVAGKAAVAKNAANEKPSSDKAAKPETLVKTALDNPQEARRKARVLQGEPVYTVKERTAPGENKALREWAVALFDKAGGKAVNPEAGEILLNERSVRDSIAHGMNPFKAEAFAAIPDVISQGVVIHEGVNPENGTRYVYISAPVEIEGKDDVVTLLARNTGNGSQMYLHSVATKESILNASDTETAEISRETGKVNSGYIASVLKKLLKYKTQGGKTEDTPSEGLRFSRSEQTKSAFENRIDALFGGAKANLKGVRVLDKSDLLDMLGYGGMPVELNESKVVLNRKNHPEMTAQQWKKVPKWLDNPVAVLKSKTHDKRLVFVPDELIDGAPVYLVVEPNSRGLDIHVLVNGYAKDGNPQQTFRDIWRDLANGNTEFVDSKKARELLGRSGLQLPRLPSLNTSRKKILTEKNLQGYRKSEKTDTGQQHAESIKKRLAESIGRLAEQVDVAAVSETAPDKAQMLLSERVEGWFDGRTGKITLVAENLTPERAVWVAWHELGHRGFAADGFAKYRAELERADGNSLIRRIADAVQEEREGTGDAAASVRSAAVEEAVVELYAAQRTGDWSGIENRYGVKVGNGLKRGIAGVLARIGAVLRRVLQRLAGKADGAMSDADVFAMLADLHGNAEGARDASSDGVKPSRSAMKDTDANIRRGRAAMNRALVEKADVRRAMYRNDIGWIDFVWGGTGRVLPNGKTKGAMGLAHVIESRMRKDGMGRDEVVGMLTNDIVEAIARGKVYKHVVNGNSERLQLRHNGYEANLIKNAGNNAWLITGYELYQNGADGVGFDTSAATHTTPTPARRDVGASDTPNVRAKDESVNTADGTRNSRAAERSKSESLEKLRRAETIRISGREIEAGDDLRQYRRRAMEYGKSLRGSYVNKDTGREISLGRAGITEVLHHDVSNPEHLQSIAAIPQIIEKSIYIDTLPNEDKAKNPDIQEYEYYVAGLNIGGTDYTVKAAIAVATTGDKYYDHKLTRIEKGDLLEMTSRLSSAEISNQSPLSDIDDKRLLQILQDKDAGKGGIADFDTEAVRFSRAANIGAAIGHITGKKSDLRNALKDRWDASKGIQLQFLGRRQIEDIYGGDLDGLKEYGRLSELFGADANKAVTEADKVVREWGRLKKADAKALADLMHDATLAKVDADPLMRGDAQKRLDGIRTALDIADGKIVKARAVIASADARIARADAAYNKASEAAKKAQSALLAAEEKAGREILADEADMRLRRLFYADSEAKRALRHAEADVMAESRAKTDAVQMLKQARADVRRLEKDEVGAQKALEGLALLNRRFAKLPDAAQRVYRKARDDYRAHFGQVRDALAERLARSGQDAEIVRRLKERFDNELGGVYFPLARFGDYLVVVKDADGNSVNVSRAETLSEAEKLRDALKADFGAGFKVSPVMKSRDYIQSRDAVSGGFMKELGEAVGMLDLDPAQQAQLNDTLTQLYLNSLPDTSWAKHGIHRKGVPGFGDDARRAYAQNMGSGANYLAKLRYADRMAEQLDVMQDFVDGRKYVEGFNQRQLQRVADEMRKRHEAVMNPNPSKLAQALTGFGFLWMMGMSPALAIVNLSQTAMVAYPVMAAKWGYADAARELLRASKQIGLKVGEKFNTIEDSLNEDEKAAFQKAVDYGVIDLSQAHDLAGVANGDPGLAGSAWQKVMDKASWLFHHTEKFNRQVTFVAAYRLAKRAGADSDTAFEQAKKATYDGHFDYAAQNRPRFMMGNVAKVVFLFKQYSQNILYALGRNAYLAFKGDKEARKTLAGLLVSHAMASGILGLPFVSTLLAVASMLGSDDDDPWDAEAALRNMLADTFGDKAGEVMAKGFSRLTPLDVSGRLGLNQLIFPDIQDGLAGKKWAESLVVGSTGAVVGAGIGAADGVQKILDGRYMEGLESMLPVAIRNPLKAVRYATDGQVDKSGITVKDDFNLFELAGQAAGFRSSDLALKQEGKSAVYRRDRALSAARAKILSAMAKAVVEQDAAALRELRGVVAQWNRKHPERAIKSENIMSSVRNRQRRVAGAKDGIYLSDKHSDARTDGGFAFGH

SEQ ID NO: 26501 - protein, 217 aa, Neisseria meningitidis; identical to SEQ ID NO: 8419

SEQ ID NO: 26502 - protein, 397 aa, Neisseria meningitidis; identical to SEQ ID NO: 103

SEQ ID NO: 26503 - protein, 239 aa, Neisseria meningitidis
MTQQIKYKRVLLKLSGESLMGSDPFGINHDTIVQTVGEIAEVVKMGVQVGIVVGGGNIFRGVSAQAGSMDRATADYMGMMATVMNALALKDAFETLGIKARVQSALSMQQIAETYARPKAIQYLEEGKVVIFAAGTGNPFFTTDTAAALRGAEMNCDVMLKATNVDGVYTADPKKDPSATRYETITFDEALLKNLKVMDATAFALCRERKLNIVVFGIAKEGSLKRVITSEDEGTLVHC

SEQ ID NO: 26504 - protein, 231 aa, Neisseria meningitidis
MKAMILAAGRGERMRPLTDTTPKPLLDVAGKPLIGWHLCRLKQAGFTEIVINHAWLGRQIEDALGDGSAYGVNIAYSPEPAGGLETAGGIAQALPLLGGQPFLVVNGDVLTDIDFTAAFQAASSLPEHISAHLWLADNPPHNSDGDFSLLPDGSVRPEVNGGNGLTFSGVGIYRPEMFDGIEAGSVAKLAPVLRNEMRQNRVSGQKHTGLWLDVGTVCRLKEAQALAGAWK

SEQ ID NO: 26505 - protein, 433 aa, Neisseria meningitidis
MPSETARPLYADTCAAHTLVWFRQNLRIRDNAALCAAVAEGLPIIGIWIDDAETDNPRRAAFYRQSAAELAQGLAGRGIPLYTAASPAELVRLAVRLNIRAVIADESHTFADKLADNALWHELNKHGIALTFVNDRAVFGKTDLIPDGGTAHTDFDRYREVWLDRFSKQPPAGPDLFAAYRQPFPENLSAPPPAALSDGIFLPQNSGETAAWRQWRRFLEQADSYSVLKDFPSRKHTSLMGAYLSAGCISPRLLARESLERRLNAWADNIIRRDFFLQLALQHTDDDPSDGNPEHTLRLTLWQQGQTGIPIIDAAMRCLHKTGSLHPALRRLSADFFCHVLNLPRREGEIWFARQLTDFDAAINQGNWWLAASRHTCPDIAAASYRTDPDGTFIKRHIPELAHLSADTVHTPWRFACSVDTHGYPAHPVAGIP

SEQ ID NO: 26506 - protein, 187 aa, Neisseria meningitidis
MQDKNNLCWLDMEMTGLNPETDRIIEVAMIITDSDLNVLAQSEVYAIHQSDELLDNMDEWNTATHGRTGLTQRVRESSHTEAEVEQKLLDFMSEWVPGRATPMCGNSIHQDRRFMVKYMPKLENYFHYRNLDVSTLKELAKRWNPSVAKSVVKRGSHKALDDILESIEEMRHYREHFLISAPRAEAQ

SEQ ID NO: 26507 - protein, 437 aa, Neisseria meningitidis; identical to SEQ ID NO: 1149

SEQ ID NO: 26508 - protein, 126 aa, Neisseria meningitidis
MVICLQNDYADVLQKNGYTYMGADGKTYNSGSYSIVHDKDFVGNKWIPFLLGTNDTTQGTCKGLCYSHSSYFAEVPKAGTKEFDDYVKIWGEVEYDAQSKPINKSKPILVEPNKTKDNEKYEKEAF

SEQ ID NO: 26509 - protein, 115 aa, Neisseria meningitidis
MRLNHKQGEAGEDAALAFLQSQGCTLLARNWHCAYGEIDLIVKNGGMILFVEVKYRKNRQFGGAAYSISPYKLLKLQRSVEYYLQQNRLTNVPCRLDAVLIEGSRPPEWIQNITG

SEQ ID NO: 26510 - protein, 163 aa, Neisseria meningitidis; identical to SEQ ID NO: 2563

SEQ ID NO: 26511 - protein, 184 aa, Neisseria meningitidis; identical to SEQ ID NO: 4537

SEQ ID NO: 26512 - protein, 363 aa, Neisseria meningitidis
LYLYVNTGGGKLWRFDFSHNGKRKTLSIGKYPTVSLVEARQTAENARRLLAAGQDPGEAKQQEKRERQAAVSNTFRSIAAEWHKHRETGLTGNHAARVWDSLKKDVFPMLGGLPVSEIKVSQVKEVIEAVAARGALETAGRILQRIKAVFTYAIQTERAENNPAVPLVGLIKAPKQKHQPALPQSELTEFYRRLMLEQAERQTKIAMQLIMLTFVRNGELRAAEWVEFDLNGAEWSIPAAKMKMKAPHIVPLADWTLELLAELKEITGHSRYLFPSVKDPDKHMSENILSYLMGRMGYKGIATPHGFRSLATDVLNENGFDSDVIERQLAHVEQNKVRAAYHRTEYIPQRKELMQWYSDCLRE

SEQ ID NO: 26513 - protein, 434 aa, Neisseria meningitidis
MKKHIWAASLLPASLSAEPLNWWKPYSAVNSGDTAWVMTAAALVLLMTLPGLALFYGGMVRKKNLLSTMMHSFSIATLVGILWVAVGYSLAFTPGNAFIGGLGRVFLSGMQIDAAAQMLTVSPNAPTVPEPVFMFFQMTFAIISTAIITGAFAERMKYSAMMLFSGIWFLLVYVPGAHWVWGGGFMSKGGVLDYAGGTVVHINAGIAGLVAALVLGRRIGYGREAMPPHNMAMTLIGAAMLWFGWFGFNAGSALAADAAAGMAMAVTQVSAVFGAAGWLACEKIAGHKPSALGLASGAVSGLVGITPAAGFTGPSGAAAIGILTAAACFVSVTVVKHKLRYDDSLDAFGIHGFGGLVGGILTGIFFDNRIFGGDAAVWQQLWIQVKDGFVMAAYSGLMSWAILKVVGKICGGLRVGKDVEREGLDLNIHGERVE

SEQ ID NO: 26514 - protein, 88 aa, Neisseria meningitidis; identical to SEQ ID NO: 1100

SEQ ID NO: 26515 - protein, 274 aa, Neisseria meningitidis
MLKKFVLGGIAALVLAACGGSESGSGASSAPAQSAVSGSLIERINNKGTVTVGTEGTYAPFTYHDKDGKLTGYDVEVTRAVAEKLGVKVEFKETQWDSMMAGLKAGRFDVVANQVGLTSPERQATFDKSDPYSWSGAVLVARNDSNIKSIDDIKGVKTAQSLTSNYGEKAKAAGADLVAVDGLAQSLTLIEQKRADATLNDELAVLDYLKKNPNAGVKIVWSAPADEKVGSGLIVNKGNDEAVAKFSTAINELKADGTLKKLGEQFFGKDISVQ

SEQ ID NO: 26516 - protein, 485 aa, Neisseria meningitidis
MSRHPAPTGEKTFFGHPFQLSTLFHIELWERFSFYGMQGILLIYLYYTADKGGLGIDKTLAGGIVGAYSGSVYLSTILGAWFADRVWGAEKTLFLSGIVVMLGHIVLAAAPGLYGLLIGLIFIALGSGGVKSTASSMVGALYEQDEMRPLRDAGFSIFYIAINIGGFLGPLLTGLLQENIGFHYGFGAAAVGMAFGLWRYSLGRKNLPHPIVPHPLSKGQGKTAAAVGIALIAALATAIKTGLVNLDNFSGILLSTVILAVIAYFARLLTNPRVSSDNKRHIIAYIPLFLTICMFWAVWFQIYTVATVYFDETVNRTIGSFTVPVAWKDSMQSLWVILFSGLMAAMWTKMGRKQPKTPLKFAMAVFVTGASFLGFVPFISAGTPMPIAVFALIVLAITIGELMISPIALSISTKIAPPLFKTQMVALNFLAFSLGFTLGGVLFEKGYQAGDEIGFYRLLFYIGAATGFLLLLLVPKLNKMLEGTD

SEQ ID NO: 26517 - protein, 229 aa, Neisseria meningitidis
VQADLAYAAERITHNYPEPTGADKDKISTVSDYFRNIRAHSIHPRVSVGYDFGGWRIAADYASYRKWKESNSSTKKVTEEINNNYKETQTKHQGNGSFHAASSLGLSAIYDFKLNDKFDKFKPYIGARVAYGHVKHQVHSVESKNTIVTSKPTQGAAQGGPVPTGFVPKSAYHESHSISSLGLGVIAGVGFDITPKLTLDTGYRYHNWGRLENTRFKTHEVSLGMRYRF

SEQ ID NO: 26518 - protein, 691 aa, Neisseria meningitidis
MLCVLAGAAYGVFRTEAALSSQWWAEAVSGVPLTVEVADMPRSDGRRVQFAAKAVDSGGRTFDLLLSDYKRREWAVGSRWRITARVHPVVGELNLRGLNREAWALSNGIGGAGTVGADRVLLHGGSGWGIAVWRSRISRNWQQADADGGLSDGIGLMRALSVGEQSALRPELWQAFRPLGLTHLVSISGLHVTMVAVMFAWLAKRLLACSPRLPARPRAWVLAAGCAGALFYALLAGFSVPTQRSVLMLAAFAWAWRRGRLSAWATWWQALAAVLLFDPSAVLGVGTWLSFGLVAALIWACSGRLHEGKRQTALRGQWAASVLSLVLLGYLFASLPLVSPLVNAVAIPWFSWVLTPLALLGSVVPFAPLQQLGAFLAEYTLRFLVWLADVSPEFAVASAPLPLLVLAVCAALLLLLPRGLGLRPWAVLLLAGFVFYRSPGVPENEVAVTVWDAGQGLSVSVQTANHHLLFDTGTAAAAQMGIVPSLNAAGVRRLDKLVLSHHDSDHDGGFQAVGKIPNGGIYAGQPEFYEGARHCAEQRWQWDGVDFEFLMPSERKNIDDNGKSCVLRVVAGGAALLVTGDLDTKGEESLVGKYGGNLYSQVLVLGHHGSNTSSSGVFLNAVSPEYAVASSGYANAYKHPTEAVQNRVRAHGIKLLRTDLSGALQFGLGRGGVKAQRLRGYKFYWQKKPFE

SEQ ID NO: 26519 - protein, 492 aa, Neisseria meningitidis
MFSKLTPLAETGIPTLSCANAAGRLLHSDSRQIKQGDIFVACPGEYADGRSYIPAAVANGAAFVFWDDDGKFAWNPEWKVPNQGIKDLKHRAGILAAQVYGNVSDGLKFWGVTGTNGKTSITQWLAQAADLLGEKTAIVGTVGNGFWGALEETTHTTPAPVDVQTLLYRFRQQGATAAAMEVSSHGLDQSRVNGVSFRSAIFTNLTRDHLDYHGTMEAYGAIKSRLFYWHGLKHAVINVDDEYGAELVGRLKKDCPDLAVYSYGFSEHADIRITDFTASSDGIAAVFQTPWGEGKCRTRLLGRFNAQNLAACIALLCANGYPLDNVLDVLAKIRPASGRMDCIMNSGKPLVVVDYAHTPDALEKALATLQEIKPQGAALWCVFGCGGNRDRGKRPLMGAAAVQGADKVVVTSDNPRLENPHDIINDILPAVPAPECVEADRAAAIRYAVEQAAANDIILIAGKGHENYQDVQGVKHRFSDLEIVGQALLTRK

SEQ ID NO: 26520 - protein, 217 aa, Neisseria meningitidis
MKAVFVELPPFERFRADYFSSEEYRAFQNELIANPEKGDVIQGTGGLRKIRVADSKRGKGKRGGSRVIYYWAVSRAVFLLFTVYGKNVKDDLSPSEKRYFPPCFITSRKITMSERNLFEELKEGLEAAEQYLQGKITLRAIEAEIPENGAAAISPEEIRAIRESLNFSQAVFARKLRCSVRTYQGWEQGKTRPNPQAALLLRMVQKSPKTFKTIAAL

SEQ ID NO: 26521 - protein, 613 aa, Neisseria meningitidis
MQTNYLSETDSIMKKLICLFAVFLMLCGRAFALDANDLLPPEKAFVPELAVADDGVNVRFRIADGYYMYQAKIVGKTNPADLLGQPSFSKGEEKEDEFFGRQTVYHHEAQVAFPYAKAVGEPYKLVLTYQGCAEAGVCYPPVDTEFDIFGNGTYHPQTDEPASAKDRFLQPSSQNGSGALPPPKGDEGGDSRFKLSWDTLNANLLAFFLAGLGLSFTACMYPLLPIVSSIVVGDKKAGKARAFVLSVVYVQGLSLTYTLVGIVAGLTGALLTVWLQQAWVVLAASALMVVLALSMFGLFNIQLPNAVQSYFQNQSSRLSGGKIVSVFIMGILSALIVGPCVAPPLAFALGYIGQTGDAVLGGLALYTLALGTGVPLIAIGTFGGHILPRAGDWMNAVKYAFGFILLAVAVYLATPHLPYYLVVALYTLLMLVPACMLLVNGRRQKRRPKAVAFALGGILLIGGAWFGWQGANGKTTALHHFLTLNPPAEAGKSSEHGKMFADTAALKAAMDTALKEHPDKPVVLDFYADWCISCKEMAAYTLNQPEVHQAVDMERFFQIDVTANMPEHQALLKEYGLFGPPGVFVVRSDGSRSEPLLGFVKADKFIEWYEQNR

SEQ ID NO: 26522 - protein, 314 aa, Neisseria meningitidis
MSASKKFPIPLSYFSIALGLFALGLSWRYGASVGLLPALAAESLLAAASVVWLLLVAAYLIKMFAYRNDFLSDLRDLVQCCFISAIPITAMLEGLALKPYQAGAAAVLIYAGVAGQLAFSMYRAAGLWRGLHSLEATTPIIYLPTVATNFVSASSLAALGHHDYAALFFGAGMFSWLSLEASILGRLRTAAPVGTAARGVVGIQLAPAFVGCGAYFAVGGKVDGFALALIGYGCLQLLFLLRLTRWFWEGGFTMSFWGFSFGFAAMAGCGLHLAASGVLSGLGLTLATAGSAGVALLLVGTLHRIATGRFLVRG

SEQ ID NO: 26523 - protein, 433 aa, Neisseria meningitidis
MPSEHQHTSSLLDFDRTHLLHPYTSMTDPLPVYPVKRAEGVFIELADGTRLIDGMSSWWCAIHGYNHPVLNQAVETQMKQMSHVMFGGLTHEPAVELGKLLVGILPQGLDRIFYADSGSVSVEVALKMAVQYQQARGLRAKQNMATVRRGYHGDTWNAMSVCDPETGMHHIFGSALPQRYFVDNLTSRFDDEWDEADLQPVRALFEAHHTDIAAFILEPVVQGAGGMYFYHPQYLRGLRDLCDEFDIVLIFDEIATGFGRTGKMFACEHAEVVPDIMCIGKGLSGGYMTLAAAITSQKVTETISRGEAGVFMHGPTFMANPLACAVACASVKLLLSQDWQANIRRIESILKCRLKTAWDIRGVKDVRVLGAIGVIELEKGVDMARFQADCVAQGIWVRPFGRLVYLMPPYIISDDLLTELAGKTVHILKEYSK

SEQ ID NO: 26524 - protein, 409 aa, Neisseria meningitidis
MAFGKSLFHAIGRVSLVRQIAAGLALGIVIGSVSPQLGLAAGLFGSLFVGALKAVAPVLVFILVAATIAQHQKGNKAHIRPIIVLYLIGTFSAALTAVIAGMVFPTHIVLAGAGDVSAAPPSGIVEVLKSLLMNLVANPINAIANANYIGILAWALVLGAALRNHGSDVTRQVVADLAEAVSTVVKWIIRFAPLGIFGLVSSTIAETGFGALAGYAKLLAVLLGCMAFIALAVNPAIVWWKIRRNPYPLVFTCLRESGVYAFFTRSSAANIPVNMALAKKLGLHEDTYSISIPLGATVNMGGAAITITVLAMAAAHTQGIQVDFATALLLSLVATVSACGASGVAGGSLLLIPLACSLFGIDNDVAMQVVAVGFIIGVIQDSAETALNSSTDVLFTAAADLGRQRNRAE

SEQ ID NO: 26525 - protein, 279 aa, Neisseria meningitidis; identical to SEQ ID NO: 9071

SEQ ID NO: 26526 - protein, 90 aa, Neisseria meningitidis; identical to SEQ ID NO: 1142

SEQ ID NO: 26527 - protein, 199 aa, Neisseria meningitidis; identical to SEQ ID NO: 1022

SEQ ID NO: 26528 - protein, 186 aa, Neisseria meningitidis; identical to SEQ ID NO: 2604

SEQ ID NO: 26529 - protein, 442 aa, Neisseria meningitidis; identical to SEQ ID NO: 11720

SEQ ID NO: 26530 - protein, 388 aa, Neisseria meningitidis; identical to SEQ ID NO: 4831

SEQ ID NO: 26531 - protein, 229 aa, Neisseria meningitidis
MKRKNIALIPAAGIGARFGADKPKQYVEIGSKTVLEHTLGIFERHEGVDLTVVVVSPEDTFADKVQTAFPQVRVWKNGGQTRAETVRNGVAKLLETGLAAETDNILVHDAARCCLPSEALTRLIEQAGNAAEGGILAIPVADTLKRADGGNISATVERTSLWQAQTPQLFRAGLLHRALAAENLDGITDEASAVEKLGIRPLLVQGDARNLKLTQPQDAYIVRLLLDAV

SEQ ID NO: 26532 - protein, 331 aa, Neisseria meningitidis
LKAAYQNIATVWQGDFHNAKQVLSAMKKRVLKPAAVRSDADIAALFHAHRMKQAQQSRILNMLAVEIRPGFVLDNKRAPDIRAALLDVYGEADGKPFFLPLNLLLGFMGAHEWHKKGVAVPQLGGSIHVPFGVFSPLRGEYLDLLAHAPSTGFQTALDIGTGSGVLAAILAKQGIPSVIGTDTNPKAVACARANIARLGFEKQVEIRETDLFPEGFVDLIVCNPPWLPAKPTSAVESALYDPESAMLAAFLRDAPKHLNPDGEIRLIISDLAEHLHLRPSDFLDKAFAQAGLRVADVLKTKPVHKKAADPNNPLAFARNRETTFLYRLKKA

SEQ ID NO: 26533 - protein, 461 aa, Neisseria meningitidis; identical to SEQ ID NO: 19902

SEQ ID NO: 26534 - protein, 64 aa, Neisseria meningitidis; identical to SEQ ID NO: 6143

SEQ ID NO: 26535 - protein, 199 aa, Neisseria meningitidis
MSEKPEKIVLASGNAGKLKEFGNLFEPYGITVLPQSEFSIPECPEPYSTFVENALAKARHAAEYSGLPALADDSGICAAALNGAPGIHSARYAGSNPKSDTANNLKLAAELAGKADKSCCYVCVLVFVRHKDDPRPIIAEGVWHGQWNGVPAGENGFGYDPYFYLPGHGKTAAELDSEVKNRESHRAQALADLIRKLAL

SEQ ID NO: 26536 - protein, 706 aa, Neisseria meningitidis
MFDKHVKTFQYGNHTVTLETGEIARQAAAAVKVSMGDTVVLVAVTTNKEVKEGQDFFPLTVDYLERTYAAGKIPGGFFKREGKQSEKEILTSRLIDRPIRPLFPEGFYHDIQIVAMVVSVDPEIDSDIPAMLGASAALVLSGVPFAGPIGAARVGYVNGVYVLNPTKAELAKSQLDLVVAGTSKAVLMVESEAKILPEDVMLGAVVYGHDQMQVAINAINEFADEVNPELWDWKAPETNEELVAKVRGIAGETIKEAFKIRQKQARSAKLDEAWSAVKEALITEETDTLAANEIKGIFKHLEADVVRSQILDGQPRIDGRDTRTVRPLNIQTSVLPRTHGSALFTRGETQALAVATLGTSRDEQIIDALSGEYTDRFMLHYNFPPYSTGEVGRMGAPKRREIGHGRLAKRALLAVLPKPEDFSYTMRVVSEITESNGSSSMASVCGGCLSLLSAGVPLKAHVAGIAMGLILEGNKFAVLTDILGDEDHLGDMDFKVAGTTEGVTALQMDIKIQGITKEIMQIALAQAKEARLHILDQMKAAVAGPQELSAHAPRLFTMKINQDKIREVIGKGGETIRAITAETGTEINIAEDGTITIAATTQEAGDAAKKRIEQITAEVEVGKVYEGTVVKILDNNVGAIVSVMPGKDGLVHISQIAHERVRNVGDYLKVGQVVNVKALEVDDRGRVRLSIKALLDAPAREENAAE

SEQ ID NO: 26537 - protein, 195 aa, Neisseria meningitidis
MNNMFAAKLSKLVYTASDHPDPLSEMGEFDRLILLIRKLYQILDGQHTLSRVTVCLHYRSRRGLIALDKAAAGCDAAMLRAQRWRIYTQIAERLAGSDGGFTVTAESVSAACPELEGRYLELVRRAAVSFGFTQGWENPAGGQEKTQAVPDAASGRFVRKPIKINIEARVERYPAYCPTVALKVTRRRFFRLQNR

SEQ ID NO: 26538 - protein, 307 aa, Neisseria meningitidis; identical to SEQ ID NO: 983

SEQ ID NO: 26539 - protein, 405 aa, Neisseria meningitidis; identical to SEQ ID NO: 4126

SEQ ID NO: 26540 - protein, 307 aa, Neisseria meningitidis; identical to SEQ ID NO: 4621

SEQ ID NO: 26541 - protein, 97 aa, Neisseria meningitidis; identical to SEQ ID NO: 910

SEQ ID NO: 26542 - protein, 101 aa, Neisseria meningitidis; identical to SEQ ID NO: 2399

SEQ ID NO: 26543 - protein, 96 aa, Neisseria meningitidis; identical to SEQ ID NO: 1976

SEQ ID NO: 26544 - protein, 122 aa, Neisseria meningitidis; identical to SEQ ID NO: 2347

SEQ ID NO: 26545 - protein, 324 aa, Neisseria meningitidis
MPSENKIAFMQGSPRPLWAAFALLLICCGLFLTLNVKGDWDFVLQLRLTKLAALLMVAYAVGVSTQLFQTLTNNPILTPSILGFDSLYVFLQTLLVFTLGGVGYASLPLTGKFGFELVVMMGGSLLLFYTLIKQGGRDLSRMILIGVIFGILFRSLSSLLSRMIDPEEFTAAQANMFAGFNTVHSELLGIGALILLVSVAAVWRERYRLDVYLLGRDQAVNLGISYTRNTLWILLWIAALVATATAVVGPVSFFGLLAASLANHFSPSVRHSVRLPMTVCVGGILLVGGQTVFEHFLGMKAVLSVVVEFAGGLVFLYLVLKHKK

SEQ ID NO: 26546 - protein, 468 aa, Neisseria meningitidis
MEKNTLSARAPSPWLPLLLAIAIFMQMLDATILNTALPEIAADLNESPLDMQLAVVAYTLTVALLIPLSGYLADRFGTKKVFFGSIAVFMLGSALCAASGSLFELTLSRVVQGIGGSMLVPIPRLTILRMYDKSKLLNAINYAVMPALIGPVLGPLAGGYLVEYASWHWIFLLNLPIGLLGFILGRNIMPDIKGSNISLDFKGYLIFSAAACLLLLSAESLSHALPPYFALLPLCGGLLFARRYFRHMKTASKPIYSTDLFLIRTFRLGLAGNLFSRLGISSIPFLMPLMFQVAFGFGASLSGWLVAPVALSSLLVKPLIAPLMKRFGYRTVLLWNTKLLAAFIMLLALPDGNSPLWIWIFLSLAIGACNSLQFSAMNTLTLADLRPQQTGSGNSLMAVNQQLAISMGIVAGALILKNWTFLIPASSGLHSAFRMTLLSIGGITLASSLVFNRLHVSDGTNLTRNTPS

SEQ ID NO: 26547 - protein, 224 aa, Neisseria meningitidis
LVKTADGYKAIARIRVGDRVFAKDEASGVTGYKPVTAQYGNPYQETIYIKVSDDIGNSQTLISNRIHPFYSDGKWVKAEDLKAGNRLSSESGAEQTVQSITVKPEPLQAYNLTVADWHTYFVKGNQAETEGVWVHNACPIKPKPTNHAQQRKEEAKNDSHRSVGDSNRVVREGKQYLDSDTGNHVYVKGDKVVILTPDGRQVTQFKNSKANTSKRVKNGKWTPK

SEQ ID NO: 26548 - protein, 56 aa, Neisseria meningitidis; identical to SEQ ID NO: 326

SEQ ID NO: 26549 - protein, 183 aa, Neisseria meningitidis; identical to SEQ ID NO: 18322

SEQ ID NO: 26550 - protein, 391 aa, Neisseria meningitidis; identical to SEQ ID NO: 2334

SEQ ID NO: 26551 - protein, 269 aa, Neisseria meningitidis
MTPLKIAIAGANGRMGRVLVEAVNNHPDTVLSGALEHSGSEALGLDAGYAVGLKTGIAISDDVDTVLAQSDVLIDFTRPEPTLKHLQKCVEKQVNIIIGTTGFDDAGKAAIRAAAEKTGIVFAANFSVGVNLTFHILDTVARVLNEGYDIEIIEGHHRHKVDAPSGTALRMGEVIAGALGRDLKQCAVYGREGHTGPRDPSTIGFATVRAGDIVGDHTALFATDGERVEITHKAGSRMTFAAGAVRAAVWVNGKTGLYDMQDVLGLNNR

SEQ ID NO: 26552 - protein, 215 aa, Neisseria meningitidis; identical to SEQ ID NO: 1509

SEQ ID NO: 26553 - protein, 89 aa, Neisseria meningitidis; identical to SEQ ID NO: 19926

SEQ ID NO: 26554 - protein, 376 aa, Neisseria meningitidis
MIKISTRFDAGSVVVKDLTDPSNIRLALRPDNASDFAQWFYFRLQGAAYQNCIMHFDNAAEAAYPKGWEGYQACASYDRRNWFRVPTSYENGVLTVNHTPLSNSVYYAYFEPYSEEQHLNLLGDAQGSGLCRIDDLGSTVQGRDINLLTIGNQVESDLKIWITARQHPGETMAEWFVEGLLGRLLDPQDPTARTLLDRATFYIVPNMNPDGSALGNLRTNAAGANLNREWENPTLEKSPEVFFVREKMLETGVDLFLDIHGDEGLPFIFVAGTEGVPNYNPRISALETQFKTALLNASPDFQDEYGYEKDAPGQANMTLATNWVGNRFNCLAYTLEMPFKDNANLPDDDFGWNGQRSLRLGEAALSAILNIIGDLR

SEQ ID NO: 26555 - protein, 196 aa, Neisseria meningitidis
MKKSSLISALGIGILSIGMAFAAPADAVNQIRQNATQVLSILKSGDANTARQKAEAYAIPYFDFQRMTALAVGNPWRTASDAQKQALAKEFQTLLIRTYSGTMLKLKNANVNVKDNPIVNKGGKEIIVRAEVGVPGQKPVNMDFTTYQSGGKYRTYNVAIEGASLVTVYRNQFGEIIKAKGVDGLIAELKAKNGGK

SEQ ID NO: 26556 - protein, 383 aa, Neisseria meningitidis
MQTWQLPEHIADVLPTNARQLESAREQLLALFRVHGYELVQPPLMEYAHSLLTHIDAGLSLKTILVTDRLSGRQLGIRADITPQVARIDAHLLSANQGINRLCYAGPVLHAQPDGLLNMREPLQAGAEMYGFADIRGDIELIDLMLKSMKIADMGKVLLSLGHIGIFRALSDAAHLDAGQSATLLALMQDKDTGTVEAQVKAWKLDGMWAKAFSLLPRLYGGREVLSDARGRLPDLSAVGGALDELQAVCDAFPDCEIHIDLSELRVDNYHTGLLYAAYAADFHDAVARGGRYDGLGGYFGRARPATGFSFDLRSFIGRLPAIERQPAVLVDAEDAEAAREAVEALREQGQCVVIDYGIGHNVSEELAGRLKKTDGVWQVVKR

SEQ ID NO: 26557 - protein, 405 aa, Neisseria meningitidis
MEIILGIVMFTVIVLALALMILFAKSKLVSEGDITIKVNGEKELTMPAGGKLLGALANEGIFIPSACGGGGSCGQCRVVVKSGGGDILPTELSHINKREAREGCRLSCQVNVKTDMEIEVPEEVFGVKKWECTVISNDNKATFIKELKLAIPEGEEVPFRAGGYIQIEAPPHTVAYKDFDIPEKYHEDWDKYNLWQYVSKVDEPILRAYSMASYPEEKGIIMLNVRIATPPPRVPDAPPGQMSSYIWSLKPGDKVTISGPFGEFFAKDTDAEMVFIGGGAGMAPMRSHIFDQLKRLNSKRKITFWYGARSKREMFYVEDFDRLAAEFPNFTWHVALSDPLPKDNWDGYTGFIHNVVYENHLKNHEAPEDCEFYMCGPPIMNQSVIKMLKDLGVEDENILLDDFGG

SEQ ID NO: 26558 - protein, 258 aa, Neisseria meningitidis; identical to SEQ ID NO: 1434

SEQ ID NO: 26559 - protein, 693 aa, Neisseria meningitidis
MIYGSMPSEKLTIFQTAFVMQVNIQIPCMLYRRGSVKPPLFEAPRLLPSFTDPVVPKLSAPGGYIVDIPKGNLKTEIEKLAKQPEYAYLKQLQTAKNVDWKQVQLAYDKWDYKQEGLTGAGAAIVVIIVTALTYGYGAAAAGSVTAAGSSTAAAATTTAAATTTVSTAAAMQTAALASLYSQAAVAIINNKGDVGKALKDLGTSDTVKQIVTSALTAGALNQMGADIAQLNSKVRTELFSSTGNQTIANLGGRLATNLSNAGISAGINTAVNGGSLKDNLGNAALGALVNSFQGEAASKIKTTFSDDYVAKQFAHALAGCVSGLVQGKCKDGAIGAAVGEIVAESILGGRNPATLSDAEKHKVISYSKIIAGSVAALNGGDVNTAANAAEVAVVNNALNFDSTPTNAKKHQPQKPDKTALEKIIQSIMPAHAAGAMTNPQDKDAAIWISNIRNGITGPIVITSYGVYAAGWTAPLIGTAGKAAISTCMANPSGCTVMVTQAAEAGAGIATGAVTVGNAWEAPVGALSKAKAAKQAAPKETINNLANLAKAEQQILFRIAQRDTQLDAWKTGFNNRVRKGAGLLDASNIPITINGKTIKPVQAISLKGAPVYSGVSEQEIFALYRQMTGQNPNFRVLPDGRLANGIISTGEWAGTKIALRNFSKTENSTQARWTLDLQNPPSFIKGTKLELKFQ

SEQ ID NO: 26560 - protein, 148 aa, Neisseria meningitidis
MLLKVVPERTVSADAKTRDPMWDNAALQTSEGVNFIARFLGFFSDGEYRYVDVLQPNHSDIIRYSGKDFPINQILNHIHPARYAVTFENNVDSKLRRHWVAGATIRIIDRQTDEVIAKKTIYVFEKGLDGTGGARMPWKFAILCNKER

SEQ ID NO: 26561 - protein, 107 aa, Neisseria meningitidis; identical to SEQ ID NO: 875

SEQ ID NO: 26562 - protein, 81 aa, Neisseria meningitidis; identical to SEQ ID NO: 1361

SEQ ID NO: 26563 - protein, 335 aa, Neisseria meningitidis
MSTFFRQTAQAMIAKHIDRFPLLKLDQVIDWQPIEQYLNRQRTRYLRDHRGRPAYPLLSMFKAVLLGQWHNLSDPELEHSLITRIDFNLFCRFDELIIPDYSTLCRYRNWLAQDDTLSELLKLINCQLTEKGLKIEKASAAVVDATIIQTAGSKQRQAIEVDEEGQISGQTTPSKDSDARWIKKNGLYKLGYKQHTRTDAEGYIEKLHITPANAHECKHLSPLLEGLPEGTTVYADKGYDSAENRQHLEEHQLLDGIMRKACRNRPLSEVQTKRNRYLSKTRYVVEQSFGTLHRKFRYARAAYFGLIKVSAQSHLKAMCLNLLKAANRLSAPAAA

SEQ ID NO: 26564 - protein, 228 aa, Neisseria meningitidis
MYAFTDAQQQKALFRLVLFHILIIAASNYLVQFPFQIFGIHTTWGAFSFPFIFLATDLTVRIFGSHLARQIIFWVMFPALLLSYIFSVLFHNGSWTGLGALSEFNTFVGRIALASFAAYALGQILDIFVFNKLRRLKAWWIAPTASTVIGNALDTLVFFAVAFYASSDEFMAANWQGIAFVDYLFKLTVCGLFFLPAYGVILNLLTKKLTTLQTKQAQDRPAPSLQNP

SEQ ID NO: 26565 - protein, 426 aa, Neisseria meningitidis
MKSLFIRLLLLGSAAGVFYHTQNQSLPAGELVYPSAPQIRDGGDALHYLNRIRAQIGLHKLAHAPVLENSARRHARYLTLNPEDGHGEHHPDNPHYTAQKLTERTRLAGYLYNGVHENISTEEEAAESSDSDIRTQQRQVDGLMSAIYHRLSLLDRHTDEAGATFVRENGKTVLVFNQGNGRFERHCAQGRNQPEAGRKYYRNACHNGAVVYTDEAMPAQELLYTAYPVGNGALPYFHGERPDPVPEYEITGNPASIDFSEAAGKITMKSFKLYQGKNEIRPVRVLTAGNDPNGRLTAYQFALFPLKPLEYGTLYTAVFDYVRNGRRAQAKWQFRTRKPDYPYFEVNGGETLAVRKGEKYFIHWRGRWCLEACTRYTYRQRPGSRLSIGRHEAGGIVFSVDGMAGSRITLAPEGETERGVTLYLQD

SEQ ID NO: 26566 - protein, 143 aa, Neisseria meningitidis
MNQLDQLGTRINLICNVFDKWIGQQDLNYNLFAVLYTLATEGSRTQKHIGEEWSLPKQTVSGVCKTLAGQGLIEWQESEQDRRERLLSLTETGKAHAAPLTESAQEFSDKVFATFGDKRTTRLFADLDALAEVMEKTISENKK

SEQ ID NO: 26567 - protein, 67 aa, Neisseria meningitidis; identical to SEQ ID NO: 3513

SEQ ID NO: 26568 - protein, 152 aa, Neisseria meningitidis
MSQVFKDFDLSSVWESDSWADENYKEAPFTPEILAAVESELGYKLPQSFIELMAVQNGGIFVKNCFPTTQRNSWAKDHVQICEVSGIGFEKEGSLCGETGQKLWLEEWEYPPIGVYFANDPSGGHALFALDYRECGRDGEPKVVFVEQESDF

SEQ ID NO: 26569 - protein, 335 aa, Neisseria meningitidis
MSTFFRQTAQAMIAKHIDRFPLLKLDRVIDWQPIEQYLNRQRTRYLRDHRGRPAYPLLSMFKAVLLGQWHSLSDPELEHSLITRIDFNLFCRFDELSIPDYSTLCRYRNWLAQDNTLSELLKLINRQLTEKGLKIEKASAAVIDATIIQTAGSKQRQAIEVDEEGQISGQTTPSKDSDARWIKKNGLYKLGYKQHTRTDAEGYIEKLHITPANAHECNHLLPLLEGIAEGTTVYADKGYDSAENRQHLEERQLLDGIMRKACRNRPLSETQTKHNQYLSKTRYVVEQSFGTLHRKFCYVRAAYFGLIKVSAQSHLKAMCLNLLKAANRLSAPAAA

SEQ ID NO: 26570 - protein, 290 aa, Neisseria meningitidis; identical to SEQ ID NO: 10998

SEQ ID NO: 26571 - protein, 88 aa, Neisseria meningitidis; identical to SEQ ID NO: 15524

SEQ ID NO: 26572 - protein, 398 aa, Neisseria meningitidis
MGLFEPTAGDFSEMKEKEKKEKTREEMEAQEREAALVRRADVVRQTVANYEDGLARYRNVMDLSRNNIEDGARRLRQAGAFERDADAGLGFSGGDKVLSPDARAEADFARRDTRSTDAGGQTLPSLGFDGNVYRGGKLVRDFDAQRPLVSAKPDALSPEEQELYKRATTPHAGALNGQLTAAQLNAARGIVAEHNKNAADGELGRERLAAAAAENAANREAMLQKGRFDAAVKANEGALNREMAQRNADRAFDVQQAELGMKRQGFEMKREADALELENRKRIADLTRAYGFAKSDGQRGEIARQIDALNGKFEQKEEKGFDPNVFKTISYEITDPNTGLTAKREGIVDLRTGKPLDVEFAGEREKRYAALGFKPNGEKTADGKIIYENDRGEKRVEQ

SEQ ID NO: 26573 - protein, 56 aa, Neisseria meningitidis; identical to SEQ ID NO: 8938

SEQ ID NO: 26574 - protein, 291 aa, Neisseria meningitidis
MLQGSLVALITPMNQDGSIHYEQLRDLIDWHIENGTDGIVAVGTTGESATLSVEEHTAVIEAVVKHVAKRVPVIAGTGANNTVEAIALSQAAEKAGADYTLSVVPYYNKPSQEGIYRHFKAVAEAAAIPMIIYNVPGRTVVSMTNDTILRLAEIPNIVGVKEASGNIGSNIELINRAPEGFVVLSGDDHTALPFMLCGGHGVITVAANAAPKLFADMCRAALQGDIALARELNDRLIPIYDTMFCEPSPAAPKWAVSALGRCEPHVRLPLVPLTEGGQAKVRAALKASGQL

SEQ ID NO: 26575 - protein, 419 aa, Neisseria meningitidis
MKQTVLQNNLQNLLESAENILLLQGPVGDFFLRLADWLTENGKTVHKFNFNAGDDYFYPPTQAHTVVFNDNYDAFPEFLQEYIVQHHIQAVVCFGDTRPYHVIAKRIANENQASFWAFEEGYFRPYYITLEKDGVNAFSPLPRRADFFLEQFPKLAQQEYEAPTPVRGGFMPMAKNAIRYYIELFRNPRKYPDYIHHRAPNAGHYLKPWSLSILKRLNYYIEDIQIAKRVEAGKYGKFFIVPLQVFNDSQVRIHCDFPSVRSFLLHVLSSFAEHAPADTNIIIKHHPMDRGFIDYWRDIKRFIKEHPELKGRVIYVHDVPLPVFLRHGLGMVTINSTSGLSGLIHNMPVKVLGRAHYDIPGMTDQNTLAEFWNHPTPPDKELFHAYRMYHLNVTQINGNFYSQVFFPNKNTSDSSTPTT

SEQ ID NO: 26576 - protein, 135 aa, Neisseria meningitidis
LAEGQKSAVTEYYLNHGKWPKNNTSAGVASTPSDIKGKYVKEVEVKNGVVTATMLSSGVNKEIQGKKLSLWAKRQDGSVKWFCGQPVTRNKAATDDVAAATDNKKIDTKHLPSTCRDASSAVCIETPPTAFYKNT

SEQ ID NO: 26577 - protein, 228 aa, Neisseria meningitidis
MFDFGLGELVFVGIIALIVLGPERLPEAARTAGRLIGRLQRFVGSVKQEFDTQIELEELRKAKQEFEAAAAQVRDSLKETGTDMEGNLHDISDGLKPWEKLPEQRTPADFGVDENGNPFPDAANTLLDGISDVMPSERSYASAETLGDSGQTGSTAEPAETDQDRAWREYLTASAAAPVVQTVEVSYIDTAVETPVPHTTSLRKQAISRKRGLRPKSRAKPKLRVRKS

SEQ ID NO: 26578 - protein, 307 aa, Neisseria meningitidis
MENQRPLLGFALALLAAMTWGTLPIAVRQVLKFVDAPTLVWVRFTVAAAVLFVLLALGGRLPKWRDFSWCSFRLLLLGVAGISANFVLIAQGLHYISPTTTQVLWQISPFTMIVVGVLVFKDRMTAAQKIGLVLLLAGLLMFFNDKFGELSGLGAYAKGVLLCAAGSMAWVCYAVAQKLLSAQFGPQQILLLIYAASAAVFLPFAEPAHIGSLDGTLAWVCFAYCCLNTLIGYGSFGEALKHWEASKVSAVTTLLPVFTVIFSLLGHYVMPDTFAAPDMNGLGYVGALIVVGGAVTAAVGDRLFKRR

SEQ ID NO: 26579 - protein, 43 aa, Neisseria meningitidis; identical to SEQ ID NO: 3165

SEQ ID NO: 26580 - protein, 51 aa, Neisseria meningitidis
LTMTAKEFCEKQIAYWLNERRKASDNDDVKAFEFAERELANYREMLKRYAV

SEQ ID NO: 26581 - protein, 794 aa, Neisseria meningitidis
MADNYVIWFENLRMTDVERVGGKNASLGEMISQLTEKGVRVPGGFATTAEAYRAFLAHNGLSERISEALKQLDVEDVAELARVGKEIRQWILDTPFPEQLDAEIEAAWNKMVADAGGADISVAVRSSATAEDLPDASFAGQQETFLNINGLENVKEAMRHVFASLYNDRAISYRVHKGFEHDIVALSAGVQRMVRSDSGASGVMFTLDTESGYDQVVFVTSSYGLGENVVQGAVNPDEFYVFKPTLKAGKPAILRKTMGSKHIKMIFTDKAEAGKSVTNVDVPEEDRNRFSITDEEITELAHYALTIEKHYGRPMDIEWGRDGLDGKLYILQARPETVKSQEEGSRNLRRFAINGEKTVLCEGRAIGQKVGQGKVRLIKDASEMDSVEAGDVLVTDMTDPDWEPVMKRASAIVTNRGGRTCHAAIIARELGIPAVVGCGNATELLKNGQEVTVSCAEGDTGFIYSGLLDVQITDVALDNMPKAPVKVMMNVGNPELAFSFANLPSEGIGLARMEFIINRQIGIHPKALLEFDKQDDELKAEITRRIAGYASPVDFYVDKIAEGVATLAASVYPRKTIVRMSDFKSNEYANLVGGNVYEPHEENPMLGFRGAARYVADNFKDCFALECKALKRVRDEMGLTNVEIMIPFVRTLGEAEAVVKALKENGLERGKNGLRLIMMCELPSNAVLAEQFLQYFDGFSIGSNDMTQLTLGLDRDSGLVSESFDERNPAVKVMLHLAISACRKQNKYVGICGQGPSDHPDFAKWLVEEGIESVSLNPDTVIETWLYLANELNK

SEQ ID NO: 26582 - protein, 187 aa, Neisseria meningitidis; identical to SEQ ID NO: 23551

SEQ ID NO: 26583 - protein, 77 aa, Neisseria meningitidis; identical to SEQ ID NO: 707

SEQ ID NO: 26584 - protein, 161 aa, Neisseria meningitidis
LLIQSALCFEAEAHEYTNIQEMEWVSLFSDPQKDDDSLITLKDEKITVKNYIVPWWKKGENFRKLELITTGKNDNGNLTVNGIYGIQSFADPQLGYTPELSVKSNNDILFKNNLQSVDVKPHSGNIHLDAKGKIQFNLNVSDGDGVQDVASGKKYRQTIVP

SEQ ID NO: 26585 - protein, 392 aa, Neisseria meningitidis
MEFVYDVAESAVSPAVIKVIGLGGGGCNAINNMVANNVRGVEFISANTDAQSLAKNHAAKRIQLGTNLTRGLGAGANPDIGRAAAQEDREAIEEAIRGANMLFITTGMGGGTGTGSAPVVAEIAKSLGILTVAVVTRPFAYEGKRVHVAQAGLEQLKEHVDSLIIIPNDKLMTALGEDVTMREAFRAADNVLRDAVAGISEVVTCPSEIINLDFADVKTVMSNRGIAMMGSGYAQGIDRARMATDQAISSPLLDDVTLDGARGVLVNITTAPGCLKMSELSEVMKIVNQSAHPDLECKFGAAEDETMSEDAIRITIIATGLKEKGAVGFVPAREVEAVAPSKQEQSHNVEGMIRTNRGIRTMNLTAADFDNQSVLDDFEIPAILRRQHNSDK

SEQ ID NO: 26586 - protein, 658 aa, Neisseria meningitidis
MSKLKTIALTASGLSVCPGFLYAQNTSSHQIGLAIMRLNSSILDLPPTKQYFQSGSLWSELRQGFRMGEVNPELVRRHESKFIASHSYFNRVINRSRPYMYHIANEVKKRNMPAEAALLPFIESAFVTKAKSHVGASGLWQFMPATGRHYGLEKTPVYDGRHDVYAATDAALNYLQYLYGLFGDWPLAFAAYNWGEGNVGRAINRARAQGLEPTYENLRMPNETRNYVPKLLAVRNIIATPQSFGMNISDIDNKPYFQAVEPDRPLDNEAIARLAGITQSELLALNPAFNVPAFIPKSKRKLLLPVASVQTFQSNYLNAAPDSLFSWEVYTPAAKTSLSDISTATGMSIADIKRLNNLNGNLVNAGRSILVAKNGKTLQTASESVVSIDIDNTPDTYRSNMPAGTVNVGIARIRPSAAQTADITVAPLPQKTVRTEPDPLVRIAEPALATAAAQPQTEKQTAMPSETQTATLAQIVPQNDMQAADELMQLVARNNLRRQAEETISAVIGTPDTVAEHNISSSPQHTVAADGKRRVRLETRVAKAADGEAEISPLHASIHRVVEGDTLFNIAKRYNVSVADLIVANNIKGNTIQKGQVLRLAQAAPAQTRIEKVSYTAHKGDTFKSIAARFNIHIDDIRRLNPNLNTINPGQRVKLIGS

SEQ ID NO: 26587 - protein, 94 aa, Neisseria meningitidis; identical to SEQ ID NO: 1124

SEQ ID NO: 26588 - protein, 415 aa, Neisseria meningitidis
MPSETSSPRKENETEVHIPAAPFIVKQSGSNALAVCALVLAALGLGTSGFLFVQGQNVLKNQELAFNQKIDKAALGESENAALLKDNLNRQAAIQSELDRLDGNVKANGEQILEMQKSYRELTKGRADWLVDETDTILNLAAQQLVLTGNIQTAVGVLEHIDSRLSRFNQAELLPIKQAVSSDLAELKNRPYVDISGTALRLDRLETAVFGLPLILDGVLKPGVQVKNEAASASWWQNVWEKSLGTLKGLVEIRRLENNDAMLISPEQAYFVRENLRLRLLDARTALMQRNSEVYQGDLNNAEAAVRQYFDAKSPATQSWLKELAELKELDVRMTADDGLKASLNAVRAYRDGTRMMAAENQEAEQAVSEPSAASDVKTIEAPSLPSERKPEQPAKKQPVPEKAGRSPSAKGERA

SEQ ID NO: 26589 - protein, 220 aa, Neisseria meningitidis; identical to SEQ ID NO: 2583

SEQ ID NO: 26590 - protein, 258 aa, Neisseria meningitidis; identical to SEQ ID NO: 19608

SEQ ID NO: 26591 - protein, 89 aa, Neisseria meningitidis; identical to SEQ ID NO: 1367

SEQ ID NO: 26592 - protein, 391 aa, Neisseria meningitidis
MHTISFPNRTRLTALPPLSLYIHIPWCIKKCPYCDFNSHSLKNGLPEAAYIDALLTDLQLELPNIWGRPVETIFFGGGTPSLFQAESIDRLLSGVRSLLRLQPEAEITLEANPGTFEIEKFQGFKDAGITRLSIGVQSFNDDMLSRLGRVHNGKEALTAIDTALKLFDKVNIDLMYALPNQTVQTALDDVQTAIATGATHISAYHLTMEPNTPFGHTPPKGLPQDEAALDIEDAVHGALENAGFIHYETSAFAKPAMRCRHNLNYWQFGDYLGIGAGAHGKISYPDRIERTVRRRHPNDYLALMQNRPGEAVERKTVAAEDLPFEFMMNALRLTDGVPAAMLQERTGVPSAKIMAQIETARQKGLLETNPAVFRPTERGRLFLNDLLQCFL

SEQ ID NO: 26593 - protein, 93 aa, Neisseria meningitidis
MENGQRNNRFPLEKRIFYLEHSGRYLMICALSDYSQNKHTVVMANFIYPDEKMDWRNLDDLFNELVLEELQASFMDWHPTVEEAISRHLEDFS

SEQ ID NO: 26594 - protein, 174 aa, Neisseria meningitidis
VLDREGYRPNVGIILINNRNEVFWGKRVREHSWQFPQGGIKPGESPETAMYRELYEEVGLLPQHVKIVGRTRDWLRYDVPNNWVRREWRGSYRGQKQIWYLLRLTGRDCDVNLRATRHPEFDGWRWHQYWAPVDEVIDFKRDVYLGALKELSSRFLRGMESYEDFAARQLSGNR

SEQ ID NO: 26595 - protein, 291 aa, Neisseria meningitidis
MPTVRFTESVSKQDLDALFEWAKASYGAESCWKTLYLNGLPLGNLSPEWVERVKKDWEAGCSESSDGIFLNADGWPDMGGRLQHLALGWHCAGLLDGWRNECFDLTDGGGNPLFTLERAAFRPFGLLSRAVHLNGLTESDGRWHFWIGRRSPHKAVDPDKLDNTAAGGVSSGELPSETVCRESSEEAGLDKTLLPLIRPVSQLHSLRPVSRGVHNEILYVFDAVLPETFLPENQDGEVAGFEKMDIGGLLAAMLSGNMMHDAQLVTLDAFCRYGLIDAAHPLSEWLDGIRL

SEQ ID NO: 26596 - protein, 148 aa, Neisseria meningitidis
VRAFQTALRPSRILNILTVSLHSASLAVCLTWFYGRMMWFGLAALAASYAYSLRITNLKHRHAITAITIDRDGQAEIVSGKEKTAKAATLAGSSMVTPYALFLQWDTGGKTVRHCIMPDMTDKESYRKLKVWVLWRQPKKTAETDTSD

SEQ ID NO: 26597 - protein, 246 aa, Neisseria meningitidis; identical to SEQ ID NO: 3525

SEQ ID NO: 26598 - protein, 362 aa, Neisseria meningitidis
MSDYTQQLQDKKDHLKTLFAGLDVPEWEVYESPDKHYRMRAEFRIWHEGGEMFYAMFEKGQKAGGASLIRCDRFEAASEAVNRLMPELIAVAAQSAELRNRWYAVEFLSTLSGEMLVTMIYHKRLDNEWMQAAQALQQQLDISVIGRSRGQKIVLKQDYVTETLKVGNRDFRYRQIEGSFTQPNAAVCQKMLEWACGAAEGLDGDLLELYCGNGNFTLPLSEKFERVLATEISKTSVSAAQWNIEANRIGNIKIARLSAEEFTEAYTGKREFKRLKDGGIALTDYAFSTIFVDPPRAGIDEETLKLVSQFDNIIYISCNPETLRANLDTLAETHAVERAALFDQFPFTHHIESGVLLKKKIL

SEQ ID NO: 26599 - protein, 291 aa, Neisseria meningitidis; identical to SEQ ID NO: 9353

SEQ ID NO: 26600 - protein, 427 aa, Neisseria meningitidis; identical to SEQ ID NO: 500

SEQ ID NO: 26601 - protein, 841 aa, Neisseria meningitidis
MNPNSKHNTNFTNLLKPSDSDIKQFAAQHIRHLTDLLNRYAYEYYTLDAPSVPDAEYDKLFRELEALELNHPELKLPDSPTQRVGGEPLAGFAEVRHEVPMLSLTNAFSPQDENGVFDHAEMYAFDQRVRDGLDGGNPEYVIEPKFDGLAISLLYRDGVLVQAATRGDGTTGEDVTQNVKTVANIPLRLHGENTPELIEVRGEVLMQKADFATLNKRQAENGQKPFANPRNAAAGSLRQLDSRITAQRKLHFFPYSVARQQGGFVAEEHIQELAYFQELGFSLPNGNFGCFKNIDEVLAFYEQMQQKRPELPYEIDGMVVKVNSLAQQHELGFISRAPRWAVAHKFPAEEALTIVEAIDVQIGRTGAVTPVARLQPVFVGGVTVTNATLHNQDEVSRKDVRVGDTVVVRRAGDVIPEVVRVIFERRPMRETAVAVSDGIGHRQDDLFAETPSANQTQSVPLHKPYRLPTHCPICRSEIEREEGEAVARCSGGMLCQAQRAQGLIHFASRKAMDIDGLGEKQIEQLVAQDLVRHFADLYRLDIPTLQKMKEAADKTVAESDQMPSEGSSVGASGKHKKQPTKWAENILAGIESGKTPELARFLFALGIRHVGERTAKTLAQAFGTLERVRRAPEPVLACLPDIGTVVARSIAHFFAQAEQQAMIDELLAAGVAPQAQAVSLPAAQYAEPQRWIARLPGFKISENKAQALWELAGKSIEGLQTDKSLPADWQAWRSEPQNAALLENLKTFFAQMPSEDEAAQGSDGINKAVAGKTFVLTGTLPTLKRDQAQSLIEAAGGKVSGSVSKKTDYVVAGEAAGSKLEKANALGVSVLSEAELLTLLG

SEQ ID NO: 26602 - protein, 222 aa, Neisseria meningitidis; identical to SEQ ID NO: 6339

SEQ ID NO: 26603 - protein, 98 aa, Neisseria meningitidis; identical to SEQ ID NO: 2571

SEQ ID NO: 26604 - protein, 128 aa, Neisseria meningitidis
MWKIYKENSTDLNFAIGSIYCQAINLTEFEMWVEKIIREVDLDEIPNYFFDLIDFQSLYDLIDIIGFVPENNLSKNQDNALTGIAFLRGIDVYDPPVSKEKALKALEKHPEIYQRFQHFFPFVELPPL

SEQ ID NO: 26605 - protein, 380 aa, Neisseria meningitidis; identical to SEQ ID NO: 3197

SEQ ID NO: 26606 - protein, 317 aa, Neisseria meningitidis
MTHTVHLHLEETDNLALQRLCGSFDNNLDLLAKALDIHISRRFEHFTFNGAFAHAGKRALLKLLETAQTRDLNDGDIRLAAVEAQTEDAGHQEKNHDHAYYFRTKRGSIGGRTPRQNGYIRALLNHDIIFGLGPAGTGKTYLAVAAAVDAMEKHQVERIILVRPAVEAGEKLGFLPGDLTQKVDPYLRPLYDALYDLMGFDRVTKLIEKGLIEIAPLAYMRGRTLNGAYIILDEAQNTTPEQMKMFLTRIGFGAKAVITGDTSQIDLPKNIKSGLKDAREKLHGVEGLYFHTFTGEDVVRHPLVQKIVEAYESAEHD

SEQ ID NO: 26607 - protein, 163 aa, Neisseria meningitidis
MNSLFVDNTVFITRLKAGHIGRLVQALFEEWHGFEPWSSVDKIRAYYGRCLKDDELPLAFAAVDDSETLLGSAAVKRHDMESFPRYEYWLGDVFVLPEYRGKGIGRRLVAHCIGAARSLGIKFLYLYTPDVQIFYESFGWAVVGRHFHNGEWVTVMRLDVDKV

SEQ ID NO: 26608 - protein, 113 aa, Neisseria meningitidis; identical to SEQ ID NO: 14617

SEQ ID NO: 26609 - protein, 119 aa, Neisseria meningitidis; identical to SEQ ID NO: 2176

SEQ ID NO: 26610 - protein, 321 aa, Neisseria meningitidis
MSYTQLTQGERYHIQYLSRHCTVTEIAKQLNRHKSTISREIRRHRTQGQQYSAEKAQRQSRTIKQRKRQPYKLDSQLSQHIDTLIRRKLSPEQVCAYLCKHHQITLHHSTIYRYLRQDKSNGSTLWQHLRICSKPYRKRYGSTWTRGKVPNRVGIENRPAIVDQKSRIGDWEADTIVGKGQKSALLTLVERVTRYTIICKLDSLKAEDTARAAVRALKAHKDRVHTITMDNGKEFYQHTKITKALKAETYFCRPYHSWEKGLNENTNGLIRQYFPKQTDFRNISDREIRRVQDELNHRPRKTLGYETPSVLFLNLFQPLIH

SEQ ID NO: 26611 - protein, 228 aa, Neisseria meningitidis; identical to SEQ ID NO: 445

SEQ ID NO: 26612 - protein, 334 aa, Neisseria meningitidis
MQRQIELKNWLQTIYSGRSFELAFAAADADFRRYFRATFSDGSSVVCMDAPPDKMSVAPYLKVQKLFDMVNVPQILHADTDLGFVVLNDLGNTTFLTAMLQEQGETAHKALLLEAIGELVELQKASREGVLPEYDRETMLREINLFPEWFVAKELGRELTFKQRQLWQQTVDTLLPPLLAQPKVYVHRDFIVRNLMLTRGRPGVLDFQDALYGPISYDLVSLLRDAFIEWEEEFVLDLVIRYWEKARAAGLPVPEAFDEFYRWFEWMGVQRHLKVAGIFARLYYRDGKDKYHPEIPRFLNYLRRVSRRYAELAPLYALLVELVGDEELETGFTF

SEQ ID NO: 26613 - protein, 107 aa, Neisseria meningitidis; identical to SEQ ID NO: 1793

SEQ ID NO: 26614 - protein, 102 aa, Neisseria meningitidis; identical to SEQ ID NO: 254

SEQ ID NO: 26615 - protein, 188 aa, Neisseria meningitidis; identical to SEQ ID NO: 1467

SEQ ID NO: 26616 - protein, 704 aa, Neisseria meningitidis
MDLLSVFHKYRLKYAVAVLTILLLAAVGLHASVYRIFTPENIRSRLQQSIAHTHRKISFDADIQRRLLPRPTVILKNLTITEPGGDRTAVSVQETKIGLSWKNLWSDQIQIEKWVVSSAELALTRDGKGVWNIQDLIDSQKRQASVNRIIVENSTVRLNFLQEQLILKEINLNLQSPDSSGQPFESSGILVWGKLSVPWKSRGLFLSNGIGPPEISPFHFEASTSLDGHGITISTTGSPSVRFNAGGADAAGLGLRADTSFRNLHLTAQIPTLALRNNSIKIETVNGAFTIGGEYARWDGSFKLDKANLHSGIANIGNAEISGSFKTPRHQTNFSLNSPLVWTENKGLEAPRLYVSTLQDTVNRLPQPRFISRLDGSLSVPNLQNWNAELNGTFDRQTVAAKFRYTHEDAPHLEAAVALQKLNLTPYLDDVRQQNGKIFPDTLAKLSGDIEAHLKIGKVQLPGLQLDDMETYLHADKGHIALSRFKSGLYGGHTEGGISIANTRPATYRLQQNASNIQIQPLLQDLFGFHSFSGNGDAVIDLTAGGETRKELIRSLQGSLSLNISNGAWHGIDMDNILKNGISGKTADNAAPSTPFHRFTLNSEISDGISRHIDTELFSDSLYVTSNGYTNLDTQELSEDVLIRNAVHPKNKPIPLKITGTVDKPSITVDYGRLTGGINSRKEKQKILEDTLLEQWQWLKPKEP

SEQ ID NO: 26617 - protein, 96 aa, Neisseria meningitidis; identical to SEQ ID NO: 3537

SEQ ID NO: 26618 - protein, 297 aa, Neisseria meningitidis; identical to SEQ ID NO: 2791

SEQ ID NO: 26619 - protein, 176 aa, Neisseria meningitidis
MNAIRTFQNRTPEIHESCMIDEACVVIGEVSLAEDVSVWPCAVLRGDVNSITVGARSNIQDGSVLHVSHKTAAKPEGSPLVIGEDVTVGHKVMLHGCRIGNRVLVGMGSTVLDDAVIEDEVMIGAGSLVPPRKRLAGGYLYIGSPVRQVRVLTDEEKAFLKYSAAHYVKLSKQYGM

SEQ ID NO: 26620 - protein, 335 aa, Neisseria meningitidis
MSTFFQQTAQAMIAKHIDRFPLLKLDQVIDWQPIEQYLNRQKNRYLRDHRGRPAYPLLSMFKAVLLGQWHSLSDPELEHSLITRIDFNLFCRFDELIIPDYSTLCRYRNWLAQDDTLSELLELINRQLTEKGLKIEKASAAVVDATIIQTAGSKQRQAIEVDEEGQISGQTTPSKDSDARWIKKNGLYKLGYKQHTRTDAEGYIEKLHITPANAHECKHLSPLLEGLPEGTTVYADKGYDSAENRQHLEEHQLLDGIMRKACRNRPLSEVQTKRNRYLSKTRYVVEQSFGTLHRKFRYARAAYFGLIKVSAQSHLKAMCLNLLKAANRLSAPAAA

SEQ ID NO: 26621 - protein, 94 aa, Neisseria meningitidis
LKLALKRSGKYNVYNPLALDLDGDGIETVAAKGFSGSLFDHTNNGIRTATGWIAAYDGFPVRKLNSNGGIISTTDTIFQSLHTWLDHQPNDTCH

SEQ ID NO: 26622 - protein, 144 aa, Neisseria meningitidis
LHHKISNIRKNYLHQISSQISQSHAIVYVEDLQVTNMSKSAKGDVEQHGKNVKQKSGLNRMILDQSWFEFRQQLDYKLLWNGGHLVAVPPQNTSRTCPCCGYTAKENRQTQADFECVECGYTENADVAGAINILRRGHEILAAQ

SEQ ID NO: 26623 - protein, 86 aa, Neisseria meningitidis
LTKAVRRKNVQPPKICYAFRTPSAYGQYLADAGFDYLSFANNHSNDFGAQGITATAAGGSSFTYSIALKPLPITRPKLRKIPPSPR

SEQ ID NO: 26624 - protein, 48 aa, Neisseria meningitidis; identical to SEQ ID NO: 6016

SEQ ID NO: 26625 - protein, 283 aa, Neisseria meningitidis
MARHVWQAGRFEIGLDKPKIMGIVNLTPDSFSDGGAYSQNAQTALAHAERLLKEGADILDIGGESTRPGADYVSPEEEWARVEPVLAEVAGWGVPVSLDTRRTVVMEKALALGGIDIINDVAALIDEGALELLACQADTGICLMHMRGLPENMQINPKYQDVVGEVARYLKARAAECIAAGIAPQRITLDPGFGFGKTLQHNIALMRHLPELMAETGFPLLIGVSRKRMIGELTGEADAAERVHGSVAAALASVARGAQIVRVHDVKATADALKVWEALGINL

SEQ ID NO: 26626 - protein, 344 aa, Neisseria meningitidis
LEDEDFIRAASMLAEEVFGFGIYKESKGSGGRFYERCWLMGSEDVLYGRVHFGGQNNTILFELTGTGCGVAKEGWESRLFTFLTNAIRPKITRVDIAKDFFNGEYSPNQAREDRNKGMFTCHHVKPKGECLGSDWEEDDEAKMTKGKTYGIGSRESSKYVRVYEKGKQLGDKTSTWTRFEIEFKAKDIVIPFEVLQNPGEYFGGAYPICERFAQKATRIHAVKEDKVISADRYLEWVKKQFGRAANGLKFIFPELDKAKLFELIEPSHHKLPKSLAPEAYDCAFLKAQAIHEQPAFKPYNDPYYMYEYYENLEKQLEQQKHVNNEESYNNFIYDKFARLPISWA

SEQ ID NO: 26627 - protein, 642 aa, Neisseria meningitidis
MAKVIGIDLGTTNSCLAISENGQTKVIENAEGARTTPSVIAYLDGGEILVGAPAKRQAVTNAKNTIYAAKRLIGHKFEDKEVQRDIESMPFEIIKANNGDAWVKAQGKELSPPQISAEVLRKMKEAAEAYLGEKVTEAVITVPAYFNDSQRQATKDAGRIAGLEVKRIINEPTAAALAFGMDKGDNKDRKVAVYDLGGGTFDISIIEIANLDGDKQFEVLATNGDTFLGGEDFDQRLIDYIIDEFKKEQGIDLKQDVMALQRLKEAAEKAKIELSSGQQTEINLPYITMDATGPKHLAMKITRAKFESLVEDLIQRSIEPCKVALKDAGLSTGDIDDVILVGGQSRMPKVQEAVKAFFGKEPRKDVNPDEAVAVGAAIQGEVLGGGRSDVLLLDVTPLSLGIETMGGVMTKLIQKNTTIPTKASQVFSTAEDNQSAVTIHVLQGERERASANKSLGQFNLGDIAPAPRGMPQIEVTFDIDANGILHVSAKDKGTGKAANITIQGSSGLSEEEIERMVKDAEANAEEDKKLTELVASRNQAEALIHSVKKSLADYGDKLDAAEKEKIEAALKEAEEAVKGDDKAAIDAKTEALGAASQKLGEMVYAQAQAEAQAGESEQANASAKKDDDVVDADFEEVKDDKK

SEQ ID NO: 26628 - protein, 306 aa, Neisseria meningitidis
MPNPLYRQHIISISDLSREQLECLLQTALKLKAHPRGDLLEGKLIGSCFFEPSTRTRLSFETAVQRLGGKVIGFSDGANTSAKKGETLADTARIISGYTDAIIQRHPKDGAARVAAEFSRVPVINAGDGTNQHPSQTLLDLVTIYETQGRLDKLKIAMAGDLKYGRTVHSLCQALKRWGCEFAFVSPPSLAMPDYITEELDEVGCRYRILGSLEEAAEWADILYMTRVQRERFDEQEFAKIQGKFNLEASMLARAKPNLRVLHPLPRVDEIHPDVDATPHAYYFEQATNGVYARMAILSLVLNEEV

SEQ ID NO: 26629 - protein, 192 aa, Neisseria meningitidis
MKTFALILADGQASRMGGEDKGLALLGGKALIDHVIDRVRPQVSHIAISTNRNLEEYARRSPHIFPDARQWQHFGPLSALCTAANDLQLATADWLLVVPCDMPYLPDDLVARFETVSKRTPLCNAYYVETPITMHYNIMYIRPQILQSAIPYLFSGMKTLRSWLQQQRARSVRFEFDGHFADLNTQIDLQEG

SEQ ID NO: 26630 - protein, 808 aa, Neisseria meningitidis
MSAQTDPGYFFMPNHIILIGASERPYSLGERVLSNLLSTPFQGKITPVNPRHHTIAGLPAYTSLNKIPGNADLIIAVTLPDSYDTLFKTCRKKQLRHIILIQDWDNLSTAELHTAETAIRKHHGNGLNITACTTAGIQLPSLGLNISTQDGYAAGHTAILTGNAAVSRQIDNILNKLRQGTSRHISLHPGISPITSADWLNRFGHSLHTKTAVLHHNPEENQRKLFSAIRQFTRHTPLILHITCRTTETDRAVLHCLARHCNFLISFNADDLEAALRAQLSDLPPLSRLDILSDTPAEWLNAHAPKTLALHFPNLPHHIRNGHLTGTPTPSICHDIASRQLARPDTQAVLTILSPSGHEDYKKTARALIRLSEQSAKPLLVSSPFSDGITHFDTPTQAIRTLSYRNTAAALKQAQLDIAPPQPCRLKTPQPQNIKKALEAADPALIAEALHLPPYRHTTHNAVQFQFGSHSLYGDILTARCNGQTTAVLPPFTTLDSRHLARFAELDGTQTLDQFLHTLTIIPEYRQHILGITLNLNGGQYSSDFILKTPETHDTPKRKNTGKAAQTLEHAAAKMQSAAAYLKHKNPTAAEFLRHTSEAAAELLGSKTETGAAVPNVLAPYPAAYPKTLSLRNNTTVTITPILPEDAEAKQQFVRSLGPEARYTRFMTHTNELPAATLARLCNPDYHCEAAWTAKDADSNIVAVVRHSRLNRNECEFGITLAEHMRGSGLAQKMMELIIQTAAQQGYRTMSADILKTNTPMIKLAEKSGFTLKESDTEKNLYRAYLNLAADKTTEKTNKNLRTDHKIT

SEQ ID NO: 26631 - protein, 177 aa, Neisseria meningitidis; identical to SEQ ID NO: 3350

SEQ ID NO: 26632 - protein, 558 aa, Neisseria meningitidis; identical to SEQ ID NO: 1615

SEQ ID NO: 26633 - protein, 305 aa, Neisseria meningitidis; identical to SEQ ID NO: 13298

SEQ ID NO: 26634 - protein, 99 aa, Neisseria meningitidis; identical to SEQ ID NO: 5781

SEQ ID NO: 26635 - protein, 241 aa, Neisseria meningitidis; identical to SEQ ID NO: 400

SEQ ID NO: 26636 - protein, 326 aa, Neisseria meningitidis
MKILLVRLSSMGDLIHTLPAIEDLARQCPDVELHWLCEAGFADIARLHPFVKKIHVMKWRQWRKHLFQAETWREIGHLKQTLRQEAFDFVLDSQGLIKSACFAKMAKSPIYGLDKNSAREGLAALAYAKTYAVPKGKNAVWRNRELFVQVFGYAMPETQVFGLTVPEAGRLKNLAQPYYAALHATSRDSKLWPVENWRALLQKLNEEQQCNVYLTWGNETEKTRAEQIADGLPFAIVCDKMNLLQAAYLLKHAVGIVGVDTGLLHLANALEKPVVGIYTDTDPIKTGVQVSAVAKNLGNIGQIPTADLVYQTLMDCVAADEGSKVV

SEQ ID NO: 26637 - protein, 130 aa, Neisseria meningitidis
MADNPADNPAVGLLGFSRGGVLILKRHERKDVPFVGMGGRGLLAANHYQFGDGLIAGAGRGVVTVEGAPASRRVYLFALPDMVCIDDVWADDNGEYRFSQLDTEKRFLVLARDHTGKYEPVSADNVKPEK

SEQ ID NO: 26638 - protein, 765 aa, Neisseria meningitidis
MQPHAPHTDSNTLMLGRYAERAYLEYAMSVVKGRALPEVSDGQKPVQRRILFAMRDMGLTAGAKPVKSARVVGEILGKYHPHGDSSAYEAMVRMAQDFTLRYPLIDGIGNFGSRDGDGAAAMRYTEARLTPIAELLLSEINQGTVDFVPNYDGAFDEPLHLPARLPMVLLNGASGIAVGMATEIPSHNLNEVTQAAIALLKKPTLETADLMQYIPAPDFAGGGQIITPADELRRIYETGKGSVRVRARYEIEKLARGQWRVIVTELPPNANSAKILAEIEEQTNPKPKAGKKQLNQDQLNTKKLMLDLIDRVRDESDGEHPVRLVFEPKSSRIDTDTFINTLMAQTSLEGNVSMNLVMMGLDNRPAQKNLKTILQEWLDFRTVTVTRRLKFRLNQVEKRLHILEGRLKVFLHIDEVIKVIRESDDPKADLMAAFGLTEIQAEDILEIRLRQLARLEGFKLEKELNELREEQGRLNILLGDENEKRKLIVKEMQADMKQFGDVRRTLVEEAGRAVLTQTTADEPITLILSEKGWIRSRAGHNLDLSQTAFKEGDRLKQTLEGRTVLPVVILDSSGRTYTLDAAEIPGGRGDGVPVSSLIELQNGAKPVAMLTGLPEQHYLLSSSGGYGFIAKLADMVGRVKAGKVVMTTDSGETVLPPIAVYASSFINPDCKIIAATSQNRALAFPIGELKIMAKGKGLQIIGLNAGESLTHTAVSSEPEILIESEGRRGAAHKDRIPVSLLEAKRGKKGKLLPISGSLKQLSSPK

SEQ ID NO: 26639 - protein, 171 aa, Neisseria meningitidis
MKSKLPLILINFSLISSPLGANAAKIYTCTINGETVYTTKPSKSCLSTDLPPIGNYSSERYIPPQTPEPVSSPSNGGQVVKYKAPVKTVSKPAKSNTPPPQQAPSNNSRRSILETELSNERKALVEAQKMLSQARLAKGGNINHQEINALQSNVLDRQQNIQALQRELGRM

SEQ ID NO: 26640 - protein, 158 aa, Neisseria meningitidis; identical to SEQ ID NO: 9372

SEQ ID NO: 26641 - protein, 66 aa, Neisseria meningitidis
MSVQTVTYNKFFMNTNQPAVYDPLTRTLHWLTVAGFIGIPTTIVLWTIYSGLTKIRTRRRSRRQYK

SEQ ID NO: 26642 - protein, 155 aa, Neisseria meningitidis; identical to SEQ ID NO: 17558

SEQ ID NO: 26643 - protein, 787 aa, Neisseria meningitidis
MQFSYSWLKTQADTELSSDKLEHLLTMSGLEVEEAETAAPAFAGVVIAEVKSVEKHPDADRLNVTRVDAGTGGLVQIVCGAPNVKAGIKVPCSLPGAVLPGNFKIKPTKMRGVVSDGMLCSTDELGLPDDGVNGLHILPEDAPVGTNIREYLDLDDTLFTLKITPNRADCLSIKGIAREVSALTGCAFRQPEIHTAPITGSRKQPVQINAPADCGRFISRVIENVNAKAATPDWMKQRLERSGIRSISALVDIGNYVMLEIGQPMHVFDADKLSGSLHIRRAREGETLECLNEKTVSLSENTLVVADEKGVLSLAGLMGGAASAVSDGTQNIVLEAAWFAPEIIAGKSRQYGFGSDSSFRFERGVDYRLQADAIERATELVLQICGGAAGEMVEAQGELPEAKQVGLRLDRLKTVLGVDIPAEQVETILQHLGLQPEKTAEGFRVTAPSFRFDIEIEADLIEEIGRVYGYENIPDDYTSGRLKMLELPETRRPRFAVYNEMAARGYREVVSYAFVNEQWEQDFAANADPIRLQNPLAAQYAVMRSTLIGGLVEILQNNLNRKQNRVRVFEIARVFGKGSDGRFVQNERIGGLWYGAAMPEQWGGKTRNADFYDIKADVENLLKNKAVEFVKTGHPALHPGRAANIVSDGKVIGFVGELHPKWLQKYDLPQAPLVFEIDMAAVLECGKTRYRAVSKFQPVRRDLAFVMPEAMSHDDLLLVLKGAANKLVQEISVFDVYRGTGLPEGMKSVAVKVILQDMENTLTDEAVEPLIGKLIGAATAAGARLRS

SEQ ID NO: 26644 - protein, 217 aa, Neisseria meningitidis; identical to SEQ ID NO: 8721

SEQ ID NO: 26645 - protein, 315 aa, Neisseria meningitidis; identical to SEQ ID NO: 15264

SEQ ID NO: 26646 - protein, 269 aa, Neisseria meningitidis
MIDFDKPAEEDAIYQSRLKKIVSDDLVLYNENSLNVMRKILEKYPNGCFDMIFADPPYFLSNDGFSCQNGQMVSVNKGNWDKSKGMAADLEFYEEWLRLCYALLKPNGTIWVCGTFHNIYLIGYLMQTIGYHILNNITWEKPNPPPNLSCRFFTHSTETILWAKKNKKAKHTFHYEMMKAQNDGKQMKCVWTFPPPNKAEKTFGKHPTQKPLPLLERCILSASNIGDLIFDPFMGSGTTGVAALKHGRKFCGCELEEDFFELAKKRLEK

SEQ ID NO: 26647 - protein, 156 aa, Neisseria meningitidis
LNITVLAVGTKMPRWVDEAVAEYAKRFGRDVAYALKEIKPEKRGAGVNAAQGMAAEEKRILEAVPQGAFLVVLDERGKAPTSVELAEHLKSWQQNGEHVCFVIGGADGMTDRLKQQARMMMRLSSLTLPHGMVRVLLTEQLYRAASILHNHPYHRE

SEQ ID NO: 26648 - protein, 289 aa, Neisseria meningitidis
MKRIFLPALPAILPLSAYADLPLTIEDIMTDKGKWKLETSLTYLNSENNRAELAAPVYIQTGATSFIPIPTEIQENGSNTDMLVGTLGLRYGLTGNTDIYGSGSYLWHEERKLDGNGKTRNKRMSDVSLGISHTFLKDDKNPALISFLESTVYEKSRNKASSGKSWLIGATTYKAIDPIVLSLTAAYRINGSKTLSDGIRYKSGNYLLLNPNISFAANDRISLTGGIQWLGRQPDRTDGKRESSRNTSTYAHFGAGFGFTKTTALNASARFNVSGQSSSELKFGVQHTF

SEQ ID NO: 26649 - protein, 111 aa, Neisseria meningitidis
MFKDWKEHTALVKKSFGELGKSHPKMLQAYGALEQAAAAEALDAKTRELIAIAVAITTRCESCISVHAAAAAKAGATDSEIAGALATAIALNAGAAYTYALRALEAVETQK

SEQ ID NO: 26650 - protein, 325 aa, Neisseria meningitidis; identical to SEQ ID NO: 5588

SEQ ID NO: 26651 - protein, 220 aa, Neisseria meningitidis
MIHAVLFDLDGTLADTARDLGGALNTLLARHGLPAKSMDEIRTQASHGAAGLIKLGAGITPDHPDYARWRTEYLEEYDRRYAQDTELFDGVNELIAELNQRGIKWGIITNKPMRFTDKLVPKLGFIIPPAVVVSGDTCGEPKPSIKPMLYACGQIHADPQHTLYVGDAERDIQAGRNAGMKTVLAEWGYIAPEDDTGSWQADFHIRTPLDLLECLDKIQP

SEQ ID NO: 26652 - protein, 270 aa, Neisseria meningitidis
MENIGRQRPIGVFDSGIGGLTNVCALMERLPMENIIYFGDTARVPYGTKSKATIENFSMQIVDFLLEHDVKAMVIACNTIAAVAGQKIRQKTGNMPVLDVISAGAKAALATTRNNKIGIIATNTTVNSNAYARAIHRNNPDTLVRTQAAPLLVPLVEEGWLEHEVTRLTVCEYLKPLLADGIDTLVLGCTHFPLLKPLIGREAHNVALVDSAITTAEETARVLAQEGLLNTDNNNPDYRFYVSDIPLKFRTIGERFLGRTMEQIEMVSLG

SEQ ID NO: 26653 - protein, 394 aa, Neisseria meningitidis; identical to SEQ ID NO: 277

SEQ ID NO: 26654 - protein, 65 aa, Neisseria meningitidis; identical to SEQ ID NO: 2354

SEQ ID NO: 26655 - protein, 41 aa, Neisseria meningitidis; identical to SEQ ID NO: 2201

SEQ ID NO: 26656 - protein, 95 aa, Neisseria meningitidis; identical to SEQ ID NO: 589

SEQ ID NO: 26657 - protein, 292 aa, Neisseria meningitidis; identical to SEQ ID NO: 1803

SEQ ID NO: 26658 - protein, 757 aa, Neisseria meningitidis
MNITQILSQELSATAAQITAAVELLDDGATVPFIARYRKEATGGLDDTQLRRLAERLQYLRELEERKAVVLKSIEEQGKLSDDLRAQIEAADNKTALEDLYLPYKPKRRTKAQIAREHGLQPLADVLLAEQSQDVEAAAQGYLNENVPDAKAALDGARAILMEQFAEDAELIGTLRDKLWNEAEIHAQVVGGKETEGEKFSDYFDHREPVRTMPGHRALAVLRGRNEGVLNIALKYRPDDTPITQQSEYEQIIARRFKVSDGHKWLRDTVRLTWRAKIFLSLELEALNRLKEAADTDAITVFARNLKDLLLAAPAGRLTTLGLDPGYKNGVKCAVVDDTGKLLDTVIVYLHQENNMLATLSRLIKQHGVKLIAIGNGTASRETDKIAGELVREMSKMGLHKIVVSEAGASIYSASELAAREFPDLDVSLRGAVSIARRLQDPLAELVKIDPKSIGVGQYQHDVNQSQLAKSLDAVVEDCVNAVGVDVNTASAPLLARISGLNQTLAQNIVAYRDENGAFDSRKKLLKVPRLGEKTFEQAAGFLRINGGTEPLDASAVHPEAYPVVAKMLAQQGISAAELIGNRERVKQIKASDFTDERFGLPTILDILSELEKPGRDPRGEFQTASFAEGIHEISDLQVGMILEGVVSNVANFGAFVDIGVHQDGLVHISALSNKFVQDPREVVKAGDVVKVKVLEVDAARKRIALTMRLDDEPGGAKHKMPSENRSRERTAGRKPQRNDRAPANSAMADAFAKLKR

SEQ ID NO: 26659 - protein, 188 aa, Neisseria meningitidis; identical to SEQ ID NO: 1721

SEQ ID NO: 26660 - protein, 100 aa, Neisseria meningitidis; identical to SEQ ID NO: 6132

SEQ ID NO: 26661 - protein, 469 aa, Neisseria meningitidis; identical to SEQ ID NO: 9639

SEQ ID NO: 26662 - protein, 346 aa, Neisseria meningitidis; identical to SEQ ID NO: 25461

SEQ ID NO: 26663 - protein, 658 aa, Neisseria meningitidis
MPRIAALPDHLVNQIAAGEVVERPANALKEIVENSIDAGATAIDVELDGGGIRLIRVSDNGSGIHPDDIELALHRHATSKIKTLNDLEHVASMGFRGEGLASIASVSRLTLTSRQEDSSHATQVKAEDGKLSSPTAAAHPVGTTIEAAELFFNTPARRKFLKSENTEYAHCATMIERLALAHPHIAFSLKRDGKQVFKLPAQSLHERIAAIVGEDFQTASLGIDSGNGALRLYGAIAKPTFAKGKTDKQYCFVNHRFVRDKVMLHAVKQAYRDVLHNALTPAFVLFLDLPPEAVDVNVHPTKTEIRFRDSRQVHQLVFHTLNKALADTRADLTESVSNAGEVLHDITGITPAPMSSENDSENLFDSASNYPTGNKPDTRNTFGSSGKTAPMPYQAARAPQQRSLSLRESRAAMNTYAELYKKTDDIDLELSQFEQARFGNMPSETPTPQTDTPLSDGIPSQSELPPLGFAIAQLLGIYILAQAEDSLLLIDMHAAAERVNYEKMKRQRQENGKLQSQRLLIPVTFAASHEECAALADYAETLAGFGLELSDMGGNTLAVRAVPAMLGKSDIVSLARDVLGELAQVGSSQTIEEHENRILATMSCHGSIRAGRRLTLPEMNALLRDMENTPRSNQCNHGRPTWVKLTLKELDALFLRGQ

SEQ ID NO: 26664 - protein, 470 aa, Neisseria meningitidis
MKISRPPEFTLLQQEYMQHLTERMTQIAKLLNSSANNPDIDIPDFLTEIKDYSEFSVTDENGTYLHWDKFRRIHTEDTRMKWRAVKESRRKIRKPIDFPFEHQFWFCIPDSLQARLHLIDKSCGSTIGTSSLGGFGRSEQNRFLLKSLIMEEAITSAQLEGAATTRKVAKDMLKSQRKPKTKDEIMIVNNYHLMKKAVELKNTPLSVEMILDLHRIATSNAIENKAEPGQFRQYDEIFIADINGNSLYQPPPHGQVHTLMEEVCAFANNTYDGVENPFIHPVVQAIILHFLIGYIHPFGDGNGRTARALFYWFMLKNGYWLFEYISISRLLKNAPAQYAKSYLYAETDDLDLTYFIYYQCDIIKRAVADLEHYISDKQKHQQEFKAAIAQYTEKIGKLNQRQIGILQKAVEESGKIFTAQEIANQYGISLNTARSDLSKLGEYRFLVPFKSGNALEYVAPQDLLERLEKK

SEQ ID NO: 26665 - protein, 324 aa, Neisseria meningitidis
MTEYPGIGSPLFYGVFFAAVLVMIALDMFSLKKNSSHKVGVKEALAWSGLWVAVSCLFAGWLYFKLAGNPGYGAAVAKEKVLEFFTGYILEKSLAVDNIFVFLMIFGYFKVAPQFQHRVLLYGVLGALVLRTVMIFVGAALVQQFEWILYLFGAFLLYTGIHMMKPEGDEEGDLANSRLLNAVKKVVPVGTEFHGEKFFTVENGKKIATPLFLVLVMIELSDVVFAVDSIPAVFAVTTDPFIVLTSNIFAILGLRAMYFLLADVAERFVFLKYGLAFVLGFIGVKMLIMHWVHIPISVSLSVVFGALGASVLTSLVYTKKQSDK

SEQ ID NO: 26666 - protein, 331 aa, Neisseria meningitidis; identical to SEQ ID NO: 6104

SEQ ID NO: 26667 - protein, 291 aa, Neisseria meningitidis
MSNEVEVMDAVSVQNYQVAHSVLVMEQWGNGETYSEERWVERGRQAVRQTMEGMFELGRALIILKEHTEHGRFMEIVKSQFGLGIAETSRLMSATRRFATPQMQKAAPKLMDLGKSKLLELLVEEDVTLVGLAEGEEVNGMTFDDVDRMTVRELRVALRESRENLAAKDEVMKTKTAKIDELTEKLAKKQTVVREPKAEDVGSELAMQLTSLEVGIRSQVSRLKDLFDQLNAHSEAHEISHQAKMVGTLNQIILDCEQLRESYALPTEAPTDNVPEWLGGETGEGDESGND

SEQ ID NO: 26668 - protein, 566 aa, Neisseria meningitidis
MSVKIQTRSVNTDVFNHLLTAGADPLIARLCASRDVQSPAELDDKLAALLPYQSLTNCEAAAGRLADAIERQEKILIVADYDADGATACSVGMSGLAAMDAKVDFLVPNRFEHGYGLTPELAEIAAEQGVDLLITVDNGIASIAGVARAQALGLDVIVTDHHLPAETVPDCIIVNPNQKGCGFPSKSLAGVGVIFYVLMALRAELRRRNYFSDGIKEPNLGELLDLVALGTVADVVPLDHNNRILVSQGLKRMRSGKMRPGIRALFEVARRDWRKAQPFDMGFALGPRINAAGRLDDMSVGIACLLARDDAEAQELAAQLNNLNIERREIEQSMLQDALNAFPETLPSGQTALAVYRDDFHQGVVGIVASRLKDRFYRPTIVFAPADNGEVRGSGRSIPNLHLRDALDLVSKRHPDLILKFGGHAMAAGLSILEHNIPAFQTAFEEAVREMVCEDDLSQTFITDGSLKACDITLEQAQNLARHVWGQGFAPPSFTDEFHVVRQQPLGAEGKHKKAWLQKDGCEFEAMFWRCSEDIPEYIRTVYRPVANEWRNNLELQLYIDYWEAV

SEQ ID NO: 26669 - protein, 134 aa, Neisseria meningitidis
MTQETALGAALKSAVQTMSKKKQTEMIADHIYGKYDVFKRFKPLALGIDQDLIAALPQYDAALIARVLANHCRRPRYLKALARGGKRFDLNNRFKGEVTPEEQAIAQNHPFVQQALQQQSAQAAAEAAGSSAAE

SEQ ID NO: 26670 - protein, 178 aa, Neisseria meningitidis; identical to SEQ ID NO: 1831

SEQ ID NO: 26671 - protein, 465 aa, Neisseria meningitidis; identical to SEQ ID NO: 1096

SEQ ID NO: 26672 - protein, 206 aa, Neisseria meningitidis; identical to SEQ ID NO: 1164

SEQ ID NO: 26673 - protein, 219 aa, Neisseria meningitidis
MDTWHDALGNEKRQPYFQEILNAVRQERLSGQIIYPPAADVFNAFRLTAFDRVKAVILGQDPYHGAGQAHGLAFSVRQGVRIPPSLLNIYKELETDINGFSIPDHGCLTAWAEQGVLLLNTVLTVRAGQAHSHALLGWERFTDTVIRQLATHRKHLVFMLWGGYAQQKGRLIDSQNHLILTAPHPSPLSAYRGFFGCRHFSQANSYLSRHGIDPINWKL

SEQ ID NO: 26674 - protein, 99 aa, Neisseria meningitidis
MTGFNDAAGVATSTDIKGKYVQSVEVKNGVVTATMASSNVNNEIKGKKLSLWAKRQNGSVKWFCGQPVTRANTATDADVTAANGTDKKIDTKLEKPFSR

SEQ ID NO: 26675 - protein, 83 aa, Neisseria meningitidis; identical to SEQ ID NO: 925

SEQ ID NO: 26676 - protein, 291 aa, Neisseria meningitidis; identical to SEQ ID NO: 14500

SEQ ID NO: 26677 - protein, 685 aa, Neisseria meningitidis
MPEQNRILCRELSLLAFNRRVLAQAEDKNVPLLERLRFLCIVSSNLDEFFEVRMAWLKRENKLHPRRRLDNGKMPSETIADVTEAARSLIRHQYDLFNNVLQPELAREGIHFYRRRNWTGAQKKWIESYFDRELLPILTPIGLDPSHPFPRPLNKSLNFAVELDGTDAFGRPSGMAIVQAPRILPRVVPLPSELCGGGHGFVFLSSILHAHVGKLFPGMNVKGCHQFRLTRDSDLTVDEEDLQNLRAAIQNELHDREYGDGVRLEVADTCPAYIRDFLLAQFKLTAAELYQVKGPVNLVRLNAVPDLVNRPDLKFPTHTPGRLKALGKTASIFDLVRQSPILLHHPYQSFDPVVEMMREAAADPDVLAVKMTIYRTGTRSELVRALMKAALAGKQVTVVVELMARFDEANNVNWAKQLEEAGAHVVYGVFGYKVHAKMALVIRREDGVLKRYAHLGTGNYHQGTSRIYTDFGIITADEQITADVNTLFMEITGLGKPGRLNKLYQSPFTLHKMVIDRIARETEHAKAGKPARITAKMNSLIEPTVIEALYRASAAGVQIDLIVRGMCTLRPGVKGLSENIRVRSIIGRQLEHARVYCFHNNGADDTFISSADWMGRNFFRRIETAAPIAAPELKKRVIREGLEMALADNTHAWLMQPDGGYIRAAPAEGESEADLQNDLWTLLGG

SEQ ID NO: 26678 - protein, 405 aa, Neisseria meningitidis
MTHTASKTPKFWLTITAAAFILLITIGMRMTLGLFVQPVVNTTELSIAQFSLIIAVFQLMWGISQPLSGALADRFGAFRVLSGGAVLLVCACLIAPNIPTYWGLMIAVGLLLAFGTGSGGFSIIMGQVAAQVPAHKRGLASGLVNAGGSAGQFLFAPLVQGLVVLPEVGWTGTFYVWGAIALLILPVSWWLAGGNNAAHTQHAQATHGQSLGEAVKTAFKTPSYILLHLSFFACGFHIAFLVTHLPTEVALCGLPATVASTAIAIIGLANIAGCVFSGWCTSRVRGKYVLFGLYASRAAMILIYIFSPKTDLNFYIFAAALGFTWLATVTPTASITGKLFGTRYLATLFGLTMLSHQIGGFLGSYIGGIVITQFGDYGWMWYADALLAGTAALLNLPIREPRTAA

SEQ ID NO: 26679 - protein, 39 aa, Neisseria meningitidis
MSDKPILLNPAAKKEALDRAVKEIRAKYGDKAIVKGCVK

SEQ ID NO: 26680 - protein, 335 aa, Neisseria meningitidis
MYPLARRILFALDAEKAHHFTLDALNMVYKLGLIPVTGNRTKPVKLMGLDLPNPVGLAAGLDKNGEYIDALGALGFGFIEIGTVTPNPQPGNPQPRLFRVPEHQGIINRMGFNNHGIDTMIRNIEKSKFSGVLGINIGKNAVTPIENAADDYLICLEKAYAHASYITVNISSPNTKNLRALQGGDELSALLEALKNKQAQLASVYGKYVPLAVKIAPDLDEAQIEDIAHVVKSVEMDGIIATNTTIDKSSLGSHPLAGEQGGLSGLPVHEKSNRVLKLLADHIDGKLPIIGVGGIMEGGDAAEKIRLGATAVQVYSGLIYKGPALVKECLKALAR

SEQ ID NO: 26681 - protein, 140 aa, Neisseria meningitidis; identical to SEQ ID NO: 4408

SEQ ID NO: 26682 - protein, 192 aa, Neisseria meningitidis; identical to SEQ ID NO: 24970

SEQ ID NO: 26683 - protein, 329 aa, Neisseria meningitidis
VGINANPNCADEAGKLIWENDPNKNWWANRMDDVRGIVQGAVNPFLMGFQGVGIGAITDSAVSPVTDTAAQQTLQGINHLGNLSPEAQLAAATALQDSAFAVKDGIHSAKQWADAHPNITATAQTALSAAEAAGTVWGGKKVELNPTKWDWVKNTGYETTVTRKTLDGQIAGKNKPIKPSSGDYVLPVGRQIIDPTRTSFSQATVSYQKRGANYNYDSLVAAMNEKKSWVGDRVDVVNMPDGAPTSMDNTRIMAAREAGVKVEANVHNFNDRLSSKERIRFKHDGIEPQTWGEAIQLRIRKQETQKGVPEGWSKRFPNGSIYDVKVLRK

SEQ ID NO: 26684 - protein, 243 aa, Neisseria meningitidis; identical to SEQ ID NO: 2896

SEQ ID NO: 26685 - protein, 64 aa, Neisseria meningitidis
LPTPPAALMVAPVRPNPPKDGKTATLLEHAAEFGGYVAELENQNQAWRDWVNSQAEVDGSEGAR

SEQ ID NO: 26686 - protein, 205 aa, Neisseria meningitidis
MTFLPLKSPLKFYAVVPTADWVERMVEAGADTVQLRCKALHGDELKREIARCAAACRGSRTQLFINDHWREAIEAGAYGVHLGQEDMDTADLAAIAAAGLRLGLSTHSVAELDRALSVHPSYVASGAIFPTTTKQMPTAPQGLEKLREYVKQAGSTPVVAIGGIDLNNARAVLATGVSSLAAVRAVTEAANPEAVVKAFQALWDG

SEQ ID NO: 26687 - protein, 375 aa, Neisseria meningitidis
MKHLLIDFENVQPQNLDKLLTENTHIWLFIGVLHKMLPISLVQSLLRFGERVHLVQLQKTGKNALDFYLSYYLGQITATDPNAQIGILSRDGGYDVLVEHILKNHQAKGIVRLANIDEVQHQKIATEPPSALRENTPQPETTLKPQQPLTSYFQAALTALRRPDAFRPCRLHNLRQNLRKHILSDLFKEKTDEECEITTANVINKLKAQNFISIDEQETVSYHLSDNDLLQRIQRHILSQRPKTYADFQAVVQNRADALHLTVGTNDIQSFARHLRDQNLIRQNNGKIEYAPFTEPKPQPTPKQPKKTAWEPDEIIWKKVIAALSLKNRPNKTKTLRNTIQALTKSNAQETDKLLQHLQDTQVLRIDGTKIVYIK

SEQ ID NO: 26688 - protein, 548 aa, Neisseria meningitidis; identical to SEQ ID NO: 2964

SEQ ID NO: 26689 - protein, 192 aa, Neisseria meningitidis; identical to SEQ ID NO: 746

SEQ ID NO: 26690 - protein, 242 aa, Neisseria meningitidis; identical to SEQ ID NO: 9647

SEQ ID NO: 26691 - protein, 138 aa, Neisseria meningitidis
LTDDAVRLALRQAVMAVRERYPFEILAWVLMPDHLHTIWRLPDNDSAYSERWRQIKRHSQYLIGGNLRLWQKRFWEHTIRDEADFACHFDYLHFNPVKHGYVGQISDWRFSTFHRYVKQGIYPHNWGGGNADFSIEYD

SEQ ID NO: 26692 - protein, 134 aa, Neisseria meningitidis
VFGNHGLGGLLEEGAHGKSPKCHGGNLGDFGEFCKGLGKYVKEVTVANGVVTATMLSSGVNKEIQGRKLSLWAKRQDGSVKWFCGQPVTRDKADADADADAVTADTAAANKKIDTNHSHEPTSRHSRESGNDGI

SEQ ID NO: 26693 - protein, 51 aa, Neisseria meningitidis; identical to SEQ ID NO: 1536

SEQ ID NO: 26694 - protein, 556 aa, Neisseria meningitidis
MEKIWLDSYEQGVNAEIDITQYGSVSDVFCQSVKKFAGQPAFQNMGKTLTYAETGKLATDFASYLQNVLKLPRGERVAIMMPNVLQYPIALFGILQAGLVAVNTNPLYTPRELEHQLKDSGAAAIIVLENFANTLELVLPRTQIKHVIVASVGEMFGLLKGSLINFIIRKIKKMVPEYRIRETVSFQTALKEGAKHVFQPVALNREDTALLQYTGGTTGVAKGAVLSHGNICANMLQAKEWIKNQLREGKETVIAALPLYHIFALTVNLMIFANAGSKIVLITNPRDMKGFIGELKKQRVNVFIGVNTLFNAMVNRPDFAEVDFSELRLTLGGGMATQKAVAEKWKKITGTPIVEAYGLTEASPGVCCNPLNIESYSGSIGLPVSSTEVELRDANGKEVPVGQPGELWVKGPQVMQGYWNRPEETAKAIDARGFLETGDIAVMDEKGWLKLVDRKKDLVVVSGFNVYPNEIEEVIAHHGKVMEVACIGVPDEKTGEALKVFVVKKDPSLTKEELIAFCRTELTAYKVPKNIEFRDELPKSNVGKILRRELRQSTGK

SEQ ID NO: 26695 - protein, 979 aa, Neisseria meningitidis
MSGFNYEKNQPHQMRAVSAVLGVFDGATPKYRAADENPKLLFAAKQYADNILKVQSQNGIGGRFPDRSDDQNILDISMETGTGKTYTYTQTMFELHRWLGVFKFIVVVPTLSIKAGTRQFLQSKALAEHFEQDFGGDYEGVRLKTYVVESAKKNKGKKSNAPITIEQFVKAENKKEIHVLLINAGMVNSPSMTDTGDKALKDLFDNPVDALAAVRPFVIVDEPHKFPTRESAKTWGNIKRLKPQYILRYGATFNDEYYNLLYRLTAVDAFNDGLVKGVRVFQEEMQGGMDAAVKLVSSDGKEAKFELNEKDKKQTFKLAKGEDLSKIHPAVSDLKIDKMNKTVVVLSNGLELKTGAVINPYSYSQTVQDAMMQRAVAEHFKLERALLAERAPQPKIKPLTLFFIDDIAGYRSGNELSGSLKDKFESWIRAEAARRLKTESDPFYRDYLQKTLDDVSACHGGYFSKDNTDSDDRIEQEINEILHDKEKLLSLDNPRRFIFSKWTLREGWDNPNIFQICKLRSSGSTTSKLQEVGRGLRLPVNELMARVRDVPYKLNYFVDSSEKDFVKQLVGEINDNSFQEEISKKFTEELKQKILQKYPDIKPLVLLNQLFSDGIIDDNENFAEDGYDKLKAAYPEAFPKGLDKGKVSNAKDEGKDTIIMREGKYEELKALWELIHHKAVLQYKIKDEAEFVDLFTAYLRENAAKFPQAGIRTAVNETYINNGLMLSRRIDSIEDEDFIRFNTMNYREFLEKLAQTAKIRMQTLHQAFYRVRDELNIGDFLNMQTIAQIKNGFNRFLLHHSFHKFELDYRLVGSKIHPTKFTNKDGKPRAVKKADLGRFEDTEHRPAAGYLFDEIFYDSDIEHENVANNQIEGVTVFTKIPRNSIKIPVAGGGTYSPDFAYIVKTKSGEILNFVIEAKGTDGAEDLRKSEERKIKHAEKLFAEISKEIKVVFKTQFDGERIAELIGQNMPAGGHSENGH

SEQ ID NO: 26696 - protein, 914 aa, Neisseria meningitidis
MQQQHLFRFNILCLSLMTALPAYAENVQAGQAQEKQLDTIQVKAKKQKTRRDNEVTGLGKLVKSSDTLSKEQVLNIRDLTRYDPGIAVVEQGRGASSGYSIRGMDKNRVSLTVDGVSQIQSYTAQAALGGTRTAGSSGAINEIEYENVKAVEISKGSNSVEQGSGALAGSVAFQTKTADDVIGEGRQWGIQSKTAYSGKNRGLTQSIALAGRIGGAEALLIHTGRRAGEIRAHEDAGRGVQSFNRLVPVEDTNQYAHFVVEEECPNGYAACKDKPKKDVVGKDERQTVSTRDYTGPNRFLADPLSYESRSWLFRPGFRFENKRHYIGGILEHTQQTFDTRDMTVPAFLTKAVFDANSKQAGSLPGNGKYVGNHKYGGLFTNGENGALVGAEYGTGVFYDETHTKSRYGLEYVYTNADKDTWADYARLSYDRQGIGLDNHFQQTHCSADGSDKNCRPSADKPSSYYKSDRVIYGESHRLLQAAFKKSFDTAKIRHNLSVNLGYDRFGSDLRHQDYYFQNAKRAYSSNLPPQSGDKKISPNGEKDKPYWVSIGGGNVVTGQICRSGNNTYTDCTPRSINGKSYYAAVRDNVRLGRWADVGAGLRYDYRSTHSDDGSVSTGTHRTLSWNAGIVLKPADWLDLTYRTSTGFRLPSFAEMYGWRSGDKIKAVKIDPEKSFNKEAGIVFKGDFGNLEASWFNNAYRDLIVRGYEAQIKNGKEEAKGDPAYLNAQSARITGINILGKIDWNGVWDKLPEGWYSTFAYNRVHVRDIKKRADRTDIQSHLFDAIQPSRYVVGLGYDQPEGKWGVNGMLTYSKAKEITELLGSRALLNGNSRNTKATARRTRPWYIVDVSGYYTIKKHFTLRAGVYNLLNYRYVTWENVRQTVGGAVNQHKNVGVYNRYAAPGRNYTFSLEMKF

SEQ ID NO: 26697 - protein, 148 aa, Neisseria meningitidis; identical to SEQ ID NO: 1300

SEQ ID NO: 26698 - protein, 149 aa, Neisseria meningitidis
MSIYAVAHIVHLYCAIAFVGGVFFEVLVLSVLHTGRVSREVRREVEKAMSYRAVRVMPFVVGLLFASGIVMAANRYLPILGEPFATSFGTMLTLKILLAFSVLAHFAIAVVKMAHSTLTVGWSKYIHAVVFTHMLLIVFLAKAMFYISW

SEQ ID NO: 26699 - protein, 916 aa, Neisseria meningitidis
MLTNIAKKIFGSRNDRLLKQYRKSVARINALEEQMQALSDADLQAKTAEFKQRLADGQTLDGILPEAFAVCREASRRTLGMRHFDVQLIGGMVLHDGKIAEMRTGEGKTLVATLAVYLNALAGKGVHVVTVNDYLASRDAGIMEPLYNFLGLTVGVIISDMQPFDRQNAYAADITYGTNNEFGFDYLRDNMVTDQYDKVQRELNFAVVDEVDSILIDEARTPLIISGQADDNIQLYQIMNTVPPHLVRQETEEGEGDYWVDEKAHQVILSEAGHEHAEQILTQMGLLAENDSLYSAANIALMHHLMAALRAHSLFHKDQHYVIQDGEIVIVDEFTGRLMSGRRWSEGLHQAVEAKEGVEIKRENQTLASITFQNYFRLYTKLSGMTGTADTEAFEFQSIYNLETVIIPTNRPIQRKDFNDQIFRSAEEKFEAVVKDIEECHKRGQPVLVGTTSIENSELVSHLLQKAGLPHNVLNAKEHEREALIVAQAGKVGAITVATNMAGRGTDIVLGGNLKHQTDAIRADEALSDEEKQAQISALEDGWQAEHDKVMEAGGLHIIGTERHESRRIDNQLRGRSGRQGDPGSSRFYLSFEDPLLRLFALDRAAAILNRLAPERGVAIEHNLLTRQIEGAQRKVEGRNFDMRKQVLEYDDVANEQRKVIYSQRNEILTSKDISDLMKEIRSDVVSDLVDTYMPPDSMEEQWDIPTLENRLAAEFRLHEDIQSWLKADNAIDGQDIKERLIERIENEYAAKTELVGKQAMADFERNVMLQVIDNQWREHLAAMDYLRQGIHLRSYAQKNPKQEYKREAFTMFQDLWNGIKFHIASLLTSVQIEQNPVAVVEEQPIGNIQSIHSESPDMEELLGQSQTDLVTEAFNPDGTDFSPEALEARGQIVHRNDPCPCGSGLKYKQCHGKLA

SEQ ID NO: 26700 - protein, 419 aa, Neisseria meningitidis
MSMALAQKLAADSIAAVAEGRNLQDVLAQIRTAHPDLTAQENGALQDIAYGCQRYLGSLKHMLAQMLKKPIDNPQLESLLLAALYQLHYTRNAPHAVVNEAVESIAKIGRGQYRSFANAVLRRFLRERDKLAASCKKDDVAKHNLPLWWVAYLKNHYPKHWHNITAALQSHPPMTLRVNRRHGNAESYLEKLAAEGIAAKALDEYAVTLEEAVPVNRLPGFSDGIVSVQDFGAQQAAYLLNPKDGERILDACAAPGGKTGHILELADCRVTALDIDAGRLKRVEDNIARLGFQTASAACADARDLAAWYDGKPFDAILADVPCTASGVARRNPDVKWLRRPTDALKTARQQEALLDALWQTLKQGGRMLLATCSVFVEENDGQLQKFLNRHADAEPIESRVLLPNKHQDGFYYALIQKH

SEQ ID NO: 26701 - protein, 91 aa, Neisseria meningitidis; identical to SEQ ID NO: 22710

SEQ ID NO: 26702 - protein, 274 aa, Neisseria meningitidis; identical to SEQ ID NO: 5721

SEQ ID NO: 26703 - protein, 695 aa, Neisseria meningitidis; identical to SEQ ID NO: 10345

SEQ ID NO: 26704 - protein, 109 aa, Neisseria meningitidis; identical to SEQ ID NO: 4235

SEQ ID NO: 26705 - protein, 136 aa, Neisseria meningitidis
MPVYFRTPSRKRLHKMNRRQHKKLHLGEFQTLIFGVQGSLHQAEDDAEAFDRFMDELIAYLAANGLEMAGGGDCGDFSCLFQKSGARSLGETEKKAIISWLAGREDVATLHATPLVDGFYGDDGWENYSETYKQAD

SEQ ID NO: 26706 - protein, 1069 aa, Neisseria meningitidis
MFYLYQSNRLETLAALFARIQKVKPLKSVLQPEQIIVQSQGMRRYLNTCLARDLGVAANLSFSLPAGLTWKLMKKLIPGIPELSPFAPEVMRWRLLDLFRSEAFRNTAEFEDVRNVLQDYLGSGESADYQLAGQLADIFDQYLVYRPQWIDAWQQGRILSLGDDEIWQSKLWRYLDDGRQSAPHRVALWEKLLESLSSDKLPERYFVFGISTMAPMYLQLLHKLSEHCDVFVFALNPSGMYWGNVIEAAQILKGGGDPDLTQAGHPLLASLGKQGRDFFDFLNEMEIEGETPVFEEGGRDTLLHALQTDIQNLKMPSENVGSVGTDDGSIRIVSAHSPLRELQILKDKLLKILHEHPDWQPHDIAVLTPNIESYTPFIEAVFGQAQPGAQALPYSVSDVKISRRQPLFHALSCLFDLLESRFEVDKVLVLLETAPVLRRFGLTEDDLPLLHDMVADLNVRWGLDGEMRGGTDQLFTWKQAVERMILGWMLPEGGNPMWQDVSAWYADVNQTAMFGRFAAFLETLSDIVRIWRQPATVDEWVGRCRGLLETLFQAEADDQKAVQNLENEWVKWQAETELAQFSGQLPQQTVIRHIRRFLDSESEAGFLRGGITFCSMVPMRSLPFKVICLLGLNDGDFPRNTKAAVFDLIAKHPAKGDRARRDDDRYLFLEALISAREILYLSYIGRDIRKDEELAPSSLLGELIDTVAAMAGIGSRQLAQNWIEQHPLQAFSRRYFQEGGRSDGIFGTRTDYATALGQTPEPPQPFFDQPVENAEPVAEIGQDEFIRFWRNPVKVWLQQQLAWSEPHIGEAWEPAEPFEPQHADQIAETYIEARREGRDFAQTAARIGAESLLPSGELGRLWQQNFQTAAKQIDTAVLNSPKLPPLSYAIPSDGQILKGSLGNLYRCGQVFYAYGKPNAPQRIAFLLEHLIFCAVMPSEAETRQTFIVQSGETEILAEIAQDRALQLLSEWMAFFNIGQNRPLPFFAKTSLAAAEAFAQKQDWEAALKKAQTAYYGNKVSKGQKDYTEVALVFGNASQNPLEQPLFENLARLLADTLAAAEKREGAGAA

SEQ ID NO: 26707 - protein, 923 aa, Neisseria meningitidis
MANNKTLFEVIENERKAVKKYKPELLEMPEFTSKNLKYDFFEWQKSALENFLIFDRTSELDDFPDLKNKPTHLLFNMATGAGKTMMMAALILYYFEKGYRHFLFFVNQNNIVDKTENNFIDPTHAKFLFTEKILQGDTVIPIRKVETFSPHSDGIEIKFTSIQKLYNDIHTERENQTTLADLHDLNLVMLGDEAHHLNAQTKGKKQGELDLEKEMNDRTSHAEIERKGWEHMVLELLLNKNGNPGQNVLLEFTATPPEKADVQQKYADKIITKFGLKEFLQKGYTKEINLVSSTLSKKERVLHALLFAWYRHQIALKYGIANFKPVMLFRSKTVDESKADYLAFLNWVENVQADDFSFLKTFSMSLNDSDNANEQGKTRTEQALKFMQENGFEFAHLANWIKQNYQKHNIIITNSETNKSKTEKTDSETEKLLNNLEAVDNPIRAIFTVGRLTEGWDVLNLFDIVRLYEGQNGGGSNKKSCKTANTTVSEKQLIGRGVRYFPFSFEDKQPNKRKFDNDMQHELRILEELFYYTHDEQSRYITELKNELRKDGYLPEKDDDKVLATFKLKSEFADNENFKNLLIWANKKIPNPNAKSNNADSLKANPQTLSFQIHGNQLLQETQFTADKNDEKVKQLGIQNNFSQTIKMSEMERHIFNKALHIKGKNSQSLFHFNRLQSKLNIQNRNELQNNLLKDWQIEFLGLEQDKQVRPDDKLAGCLKILEMVEKHLNESDKPFIGTKEFTPKTLWEIFGTPKQKWVKKDDIKTAIAMQNDWYVMDNFAGTSLEEALIQFISARLGDLKSKYDVHLIRNEEVFKLNNFADSEGFMPDFVLLLKDKQKSSSDSVDGFLHYQIFIEPKGEHLVETDRWKEEFLEAITAEYGKDKILQKDTPHYRLIGLPFFTDHQKNGQFTESFPLGAASLEK

SEQ ID NO: 26708 - protein, 475 aa, Neisseria meningitidis; identical to SEQ ID NO: 13659

SEQ ID NO: 26709 - protein, 133 aa, Neisseria meningitidis; identical to SEQ ID NO: 825

SEQ ID NO: 26710 - protein, 589 aa, Neisseria meningitidis; identical to SEQ ID NO: 9214

SEQ ID NO: 26711 - protein, 313 aa, Neisseria meningitidis; identical to SEQ ID NO: 14846

SEQ ID NO: 26712 - protein, 508 aa, Neisseria meningitidis; identical to SEQ ID NO: 3491

SEQ ID NO: 26713 - protein, 72 aa, Neisseria meningitidis; identical to SEQ ID NO: 292

SEQ ID NO: 26714 - protein, 227 aa, Neisseria meningitidis
MELVFIRHGQSEWNAKNLFTGWRDVKLSEQGLAEAAAAGKKLKENGYEFDIAFTSVLTRAIKTCNIVLEESDQLFVPQIKTWRLNERHYGRLQGLDKKQTAEQYGDEQVRIWRRSYDTLPPLLDKDDEFSAHKDRRYAHLPADVIPDGENLKVTLERVLPFWEDQIAPAILSGKRVLVAAHGNSLRALAKHIEGISDKDIMGLEIPTGQPLVYKLDDNLKVIEKFYL

SEQ ID NO: 26715 - protein, 480 aa, Neisseria meningitidis
MNNPDLPYRQALERLSQKQYNFTEVRRLLTEAASAGHPAAAFELAKHLMDADSPYQDREQGMEMLRIAAEQGHPYARYNLAYIQELEGAPPETLISLYRPLAEEGLPEAQVRLMYLLYASRHFEEALEWAKTSAKNNNPHGQYLLAQYCRYGTPPDFETAHLLYRKAAAQGLPEAHWQLGLQYRFGQGTKVDTAQAVNHLRAAAQQGYIPAYTPLAELILPTAPDEAVYRFQQAAQENDPDAHAALADIYLQGKHPERNYKLALHHAEAAAAERHPEGLRILGDIYRYGLGMTSDKEKALHYYRQAAEAGSLAAHQKLVSDSALNHPEQYSGIKDSAIKRQRAEQLYQKAQALHYGLQCVPEYAAALKLYTEAAELGHSKAQTNLGSMYYFGQGIAADYGKARKWFEQAAAQKDSMAFYNLACIHYSGHGVGPDKEKACRYLQEAINNGYGQKSVLQELLQQWQMPSEQRYTYPAETKQV

SEQ ID NO: 26716 - protein, 122 aa, Neisseria meningitidis
MTRGNGGGDKDGTGRRRIPAVFGTGACRRCGAYPCRRGKSRRQPPPPPGVSDGIATHKKPYACTRANSVIHAVPPFPKPFASSAHPLRDAAPFKGRARNNARYAVPHLGALKILRCKKKISV

SEQ ID NO: 26717 - protein, 145 aa, Neisseria meningitidis
VGMMGFEKVEHLLPDTVLDIVDVIGLAATEQLVKAIGGARFKFGKGKVDTERLAILVEAIGEVKTHELLQVYGGEELYIPRCGKALIQLRNHRFYQEFVKLRDIDKESGLMAMTKLCPKYGIFSRTGYTIINEMSRPAAQQAALF

SEQ ID NO: 26718 - protein, 125 aa, Neisseria meningitidis; identical to SEQ ID NO: 2523

SEQ ID NO: 26719 - protein, 418 aa, Neisseria meningitidis
MKVLVLGAGVAGVSSAWYLAEAGHEVTVIDRAKGVAMETSFANAGQLSYGYTTPWAAPGIPTKALKWLFKSHPPLLFRPDGSLYQIEWLWRMLQNCTASRYQINKERMVRISEYSREMFRRFEAQTGMNFEGRKKGTLQIFRQAKEVEAAEQDIAVLERYGVPYRRLKPEECAEFEPALARVTAKIAGGLHLPADATGDCRLFTENLYKLCQEKGVRFHFNQNISRIDHNGLRIKTVETETGRFEADAVVCALGCFSRTVLAQLDLNLPIYPVKGYSLTLPVTNSDGAPVSTVLDESYKVAITRFDNRIRVGGMAELSGYEIKLPEKRRETLALVVNDLFPKGGDLNQTLFWSGLRPMTPDSTPLIGRTRFENLFLNTGHGTLGWTMSLGSAKLTADIVSGKDTEIRSGDLSLSRYQA

SEQ ID NO: 26720 - protein, 668 aa, Neisseria meningitidis
MADMKKITPQNLRPLLSESLGHTDFVNVLNALIKFLRRGGKKCAGERFDLIIDTFKQDRELLSRFSRCFYIWLAQIHIYPALIKLGIFSRHSFAREMGIRIYERFSPSYKDFANLGEVFLYLFHSENDDKWLQTLNIRQWLVLYELIRSHAEPSKLQTAGIRLADARLRAIEMLSVWTASEAIEPDLIRIAPRLLEADSSFVALQRETAKLVEHYRNSTAPYDTAHLEVMFDQCFSQIDYLRRKGTGAGSGSSVKVAHLLERLRQTVDRLKLLTDIQTGAGNSIRLTIALMNSLIYAAVEQYSTRHLRRSSIRMLARSITENKSHHGEHYITRNRKEYFKMFYSAAGGGVIIALMALLKIRIGTLGLSPFLTSLSAGFNYGIGFMIIHMLHCTVATKQPAMTAASFAEQVDLNEGGKAVDNKLAKLLIDVCRSQSVAVFGNVSIAILLACAISFGYAHLYRQPILDAHTAAYQFKSIDIIAYPTLWYAAIAGLWLFCSGIIAGFFDNRADYLNLRQRLPFNPLLRKIMRPGPRRVLAAYIHKHYGSLVGNFIFGMLLGMTGYFGHLLGLPLDIRHVAFSSANLGYAAVSGNVGLGTFVLGIFSVLAIGLVNLCVSFSLALFVALRSRGTKIGSIRNLIKSFWNQIKSNPCILFLPPAKEQGHPPSDKP

SEQ ID NO: 26721 - protein, 263 aa, Neisseria meningitidis
MNVYFLGGGNMAAAVAGGLVKQGGYRIHIANRGAEKRERLQKELGVETSETLPELYSDDVLILAVKPQDMEAACKNIRTNGALVLSVAAGLPVDTLSRYLGGTRRIVRVMPNTPGKIGLGVSGMYAEAEVSETDRRIADRIMKSVGLTVWLEDEAQMHSITGISGSGPAYVFYLLDALQNAAIRQGFDMAEARALSLATFKGAVTLAEQTGEDFEKLQKNVTSKGGTTHEAVEAFRRHRVAEAISEGVCACVRRSQEMERQYQ

SEQ ID NO: 26722 - protein, 416 aa, Neisseria meningitidis; identical to SEQ ID NO: 2246

SEQ ID NO: 26723 - protein, 67 aa, Neisseria meningitidis
MDNLNLQEISVLPENLPLYCSGPGNEQWNGHPRVFLPLCEGESGSVACPYCGTRYRLDGKMPHHHYA

SEQ ID NO: 26724 - protein, 91 aa, Neisseria meningitidis; identical to SEQ ID NO: 4054

SEQ ID NO: 26725 - protein, 109 aa, Neisseria meningitidis; identical to SEQ ID NO: 4604

SEQ ID NO: 26726 - protein, 323 aa, Neisseria meningitidis; identical to SEQ ID NO: 3380

SEQ ID NO: 26727 - protein, 269 aa, Neisseria meningitidis
MIQDTRPLIRVVAGILLDSDGNYLLSSRPEGKPYAGYWEFAGGKVEAGETDFQALQREFEEELGIRILAATPWLTKIHSYEHARVCLKFLWVNPGQWTGEPQSREGQEWSWQKAGDFTVAPMLPANGALLRSLSVPRRLYGSLKTGLHGENSMGAYRVLPLGSAEGSGANVLMEAAQWQDRPEHADSVWMMVQTREQWRQAQEKGADVVVWRVGNAAQAAAVDEVLKHGVSVPLVLAANGQTVARYGKLWLGLGAHVVVRDETIGKNHE

SEQ ID NO: 26728 - protein, 461 aa, Neisseria meningitidis; identical to SEQ ID NO: 10228

SEQ ID NO: 26729 - protein, 659 aa, Neisseria meningitidis
MSQLANAIRFLSADAVQKANSGHPGAPMGMAEMAETLWTKFLNHNPANPKFYNRDRFVLSNGHASMLLYSLLHLTGYNLSIEDLKNFRQLHSKTPGHPEYGYTDGVETTTGPLGQGIANAVGMALAEKILAAEFNKDGLNIVDHYTYVFMGDGCLMEGVSHEACSLAGTLGLGKLIVLYDDNNISIDGKVDGWFTENIPQRFESYGWHVVPNVNGHDTAAIQAAIEAARAETGKPSIICCKTLIGKGSANKEGSHKTHGAPLGADEIEATRKHLGWTYPAFEIPQEIYDAWNAKEKGAKLEAEWNELFAQYQAKYPAEAAEFVRRMDKKLPDNFDEYVQAALKEVCAKAETIATRKASQNSIEILAKELPELVGGSADLTPSNLTDWSNSVSVTRDKGGNYIHYGVREFGMGAIMNGLVLHGGVKPFGATFLMFSEYERNALRMAALMKINPVFVFTHDSIGLGEDGPTHQPIEQTATLRLIPNMDVWRPCDTAESLVAWAEAVKAADHPSCLIFSRQNLKFQARSEQQLDDIKHGGYIISEAQGNAQAVIIATGSEVELALEAQKALAAQNIAVRVVSMPSTNVFDRQDAAYQAAVLPESLPRIAVEAGHADGWYKYVGLNGAVVGINRFGESAPADLLFKAFGFTVDNVVDTVKSVL

SEQ ID NO: 26730 - protein, 117 aa, Neisseria meningitidis; identical to SEQ ID NO: 3438

SEQ ID NO: 26731 - protein, 171 aa, Neisseria meningitidis; identical to SEQ ID NO: 10580

SEQ ID NO: 26732 - protein, 371 aa, Neisseria meningitidis; identical to SEQ ID NO: 14361

SEQ ID NO: 26733 - protein, 165 aa, Neisseria meningitidis
MSSSVSSKTRYWVLALAAIVLDQWSKWAVLSSFQYRERVNVIPSFFDLTLVYNPGAAFSFLADQGGWQKYFFLVLAVAVSAYLVRAILRDEFAALGKTGAAMIIGGALGNVIDRLIHGHVVDFLLFYWQNWFYPAFNIADSFICVGAVLAVLDNIVHRKTQEEKY

SEQ ID NO: 26734 - protein, 121 aa, Neisseria meningitidis; identical to SEQ ID NO: 4117

SEQ ID NO: 26735 - protein, 92 aa, Neisseria meningitidis
MLEIEIVYGLPDRQVLKTMQLAEGTTVRAAALQSGLDGIFEDLNLHSAPLGIFGKAVKDDTPLRDGDRIEVYRPLLIDPKEVRRKRVQNQEE

SEQ ID NO: 26736 - protein, 186 aa, Neisseria meningitidis; identical to SEQ ID NO: 10980

SEQ ID NO: 26737 - protein, 178 aa, Neisseria meningitidis
MSKKWYVVQAYSGFEKNVQRILEERIAREEMGDYFGQILVPVEKVVDIRNGRKTISERKSYPGYVLVEMEMTDDSWHLVKSTPRVSGFIGGRANRPTPISQKEAEIILQQVQTGIEKPKPKVEFEVGQQVRVNEGPFADFNGVVEEVNYERNKLRVSVQIFGRETPVELEFSQVEKIN

SEQ ID NO: 26738 - protein, 122 aa, Neisseria meningitidis; identical to SEQ ID NO: 6208

SEQ ID NO: 26739 - protein, 160 aa, Neisseria meningitidis; identical to SEQ ID NO: 1762

SEQ ID NO: 26740 - protein, 122 aa, Neisseria meningitidis
MRIFKNQWIAKFAKKHKINDSELLEAVERADNGLIDADLGGGVIKQRIARQGQGRSGGYRSLILFKQADRAFFVYAFAKNDRENISDKELDVYRKAAAYYLKYTRAELAALKEDGIITEIES

SEQ ID NO: 26741 - protein, 261 aa, Neisseria meningitidis
MNHQDARWQVHRHLAEHTDQRLTLVRNAPKYILLAGADADISRSLLAKRYPQAVFEEYDSRADFLAAAAARKGGFWQRFAGKGVVQHCQSPTAPLPEACADMLWSNLGLLAAEQILPVLHNWARALKTDGLLFFTCFGRDTFTELKCRLKENGIESRSVMFPDMHDLGDMLAENGFYDPVTDTAKLVLDYKKAETFWADMDTLGVWRAMAWNDENAARSCVGTIFEREGGLSITLETVYGHAVKKLMLPQGENVVQFFPKR

SEQ ID NO: 26742 - protein, 431 aa, Neisseria meningitidis
MLDIQLLRSNTAAVAERLAARGYDFDTARFDALEERRKSVQVKTEELQASRNSISKQIGALKGQGKHEEAQAAMVQVAQIKTDLEQTAADLEAVQKELDAWLLSIPNLPHESVPAGKDETENVEVRKVGTPREFDFEIKDHVDLGEPLGLDFEGGAKLSGARFTVMRGQIARLHRALAQFMLDTHTLQHGYTEHYTPYIVDDTTLQGTGQLPKFAEDLFHVTRGGDETKTTQYLIPTAEVTLTNTVADSIIPSEQLPLKLTAHSPCFRSEAGSYGKDTRGLIRQHQFDKVEMVQIVHPEKSYETLEEMVGHAENILKALELPYRVITLCTGDMGFGATKTYDLEVWVPAQNTYREISSCSNCEDFQARRMKARFKDENGKNRLVHTLNGSGLAVGRTLVAVLENHQNADGSINIPAALQPYMGGVAKLEVK

SEQ ID NO: 26743 - protein, 192 aa, Neisseria meningitidis; identical to SEQ ID NO: 14624

SEQ ID NO: 26744 - protein, 346 aa, Neisseria meningitidis
MQPIRYRTDLTPYNTFGLRAQARAFIALEHADELCDIVRLPEFDRDTVLWLGGGSNILLMQDYAGLVVHMENKGIREIARSDGIVRIEAQAGEIWHDFVLHTVALGLNGLENLSLIPGTVGASPVQNIGAYGVEAKDVIHSVRCFDLDTETFVTLSNADCRFAYRESLFKQEGKGRYVIVSVVFALKTHFVPTLGYGDLAAAVAELSAGRVPTAKDVSDAVCAIRNSKLPNPNVLGNVGSFFKNPVVSAEKAATLLQRHPDMPHYPQPDGSVKLAAGWLIDQCRLKGFQIGGAAVHDKQALVLVNKNNASANDVRQLAQHIKFTVFARFQVELHAEPNWLPASFSL

SEQ ID NO: 26745 - protein, 332 aa, Neisseria meningitidis
MKIAIYGTKSYDREHFTRANRHFGFELEFFDFMLDAKTAKMAEGAEAVCIFVNDDGSRPVLEKLAQIGVKTVALRCAGFNNVDLKAAEELGLKVVRVPAYSPESVAEHTVGLMLTLNRRIHKAYQRTRDANFSLEGLTGFNMYGKTAGVIGTGKIGIATMRILKGFGMNLLAYDPFCNPEAEKLGGRYVDLDELYARSDIITLHCPSTPENHYMLNEAAFDKMKDGVMIINTSRGGLIDSSAAIEALKRRKIGALGMDVYENERELFFEDKSNDVITDDVFRRLSSCHNVLFTGHQAFLTEEALGNISEVTLSNIREVGQTGDCGNAVRADG

SEQ ID NO: 26746 - protein, 151 aa, Neisseria meningitidis; identical to SEQ ID NO: 3388

SEQ ID NO: 26747 - protein, 174 aa, Neisseria meningitidis; identical to SEQ ID NO: 3281

SEQ ID NO: 26748 - protein, 61 aa, Neisseria meningitidis
MSTFFRQTAQAMIAKHIDRFPLLKLDQVIDWQPIEQYLNRQKTRYLRDHRGYPAHPVAGIP

SEQ ID NO: 26749 - protein, 335 aa, Neisseria meningitidis
MSTFFQQTAQAMIAKHIDRFPLLKLDQVIDWQPIEQYLNRQKTRYLRDHRGRPACPLLSMFKAVLLGQWHSLSDPELEHSLITRIDFNLFCRFDELIIPDYSTLCRYRNWLAQDDTLSELLKLINCQLTEKGLKIEKASAAVVDATIIQTAGSKQRQAIEVDEEGQISGQTTPSKDSDARWIKKNGLYKLGYKQHTRTDAEGYIEKLHITPANAHECKHLSPLLEGLPEGTTVYADKGYDSAENRQHLEEHQLLDGIMRKACRNRPLSEVQTKRNRYLSKTRYVVEQSFGTLHRKFRYARAAYFGLIKVSAQSHLKAMCLNLLKAANRLSAPAAA

SEQ ID NO: 26750 - protein, 352 aa, Neisseria meningitidis
MRPLNVQIRLGNLRHNYRILKEMHGGKLLAVVKADAYGHGAVRCAFALADLADGFAVATIDEGIRLRESGITHPIVLLEGVFEASEYEAVEQYSLWSAVGNQWQLEALLARHWKKPVKVWLKMDSGMHRTGFFPHDYASAYAALKQSEYVDSIVKFSHFSCADEPESGMTEIQMEAFDLGTEGLEGEESLANSAAILNVPEARRDWGRAGLALYGISPFGGSDDRLKPVMRLSTRIFGERVLQPHSPIGYGATFYTSKSTRVGLIACGYADGYPRRAPSNSPVAVDGKLTRVIGRVSMDMMTIELDASQEGLGHEVELWGDTVNINTVAEAAGTIPYELMCNIKRAKFTYIE

SEQ ID NO: 26751 - protein, 54 aa, Neisseria meningitidis; identical to SEQ ID NO: 2207

SEQ ID NO: 26752 - protein, 477 aa, Neisseria meningitidis
MNEYSQLIKHPDISLSPISDSIGIGNPATGEILAYVRKTDSDKLKNLIQKAAAAQKLWAAKTALERADILWRWYFLVKENKEALARLMTMEQGKSLTESRGEIDYAASFVRWFAEEARRIDGDVLTSVKASQKLVVLKQPVGVTAAITPWNFPSAMIARKAAPALAVGCAMIIKPASLTPLSAYALASLAYEAGIPQDLLPVVSGRASEIGREFATNPIIRKISFTGSTEVGAKIFADSAADIKKLSLELGGNAPFIVFDDADLDKAVEGALASKFRNSGQTCVCTNRVYAQSGIYDEFCRKLSEKVAELKLGNGLEDGVNQGPLIEEKAVEKVEQHIADALAKGAVCLTGGKRSALGGTFFEPTVLSGVTAQMAVAREETFGPLCPVFRFETEAEVIEAANNTEYGLAAYLFTADTARQWRVGEALEYGMVGINTGLISNEAAPFGGVKRSGLGREGSKYGADEYLELKYLCMDVG

SEQ ID NO: 26753 - protein, 264 aa, Neisseria meningitidis
MTTILAFDIETVPDVQGIRTLYELPSSLPDDEVVLFAQQKRRAQTGGDFMQHHLHQIVAISCCMRWGQDKVHVGTIGEMDDGEEVVIAKFFELIEKHTPQLVSWNGGGFDLPVLHYRSLLYGINAARYWDMGDGDFGDSRDFKWNNYISRYHQRHCDLMDLLALYQPRANVPLDDMAKLCGFPGKLGMDGSKVWEAFHAGKLKEIRNYCETDAVNTYLMYLRFCLVSGRFDADEYEMEIKRIRNYLSAQTEDKPHWAEFVQAWK

SEQ ID NO: 26754 - protein, 464 aa, Neisseria meningitidis
MTVKTRFAPSPTGYLHIGGVRTALFSWAFARHHKGEFLLRIEDTDLARSTAESVNIILDGMKWVGLDYDNADNVVYQTRRFDRYKEVIAELLAKGDAYYCYCSKEELEAMREKAEKEGTATYDRRWRPEEGKTLPEIPADVQPVVRFKTPLDGVTQWTDLVKGEISIPNEALDDLIIARADGTPTYNFCVVVDDYDMGVTHVIRGDDHVNNTPKQINILKAIGANLPEYGHLPMILNEQGKKISKRSGDTVAITDFGAMGILPEAMLNYLARLGWAHGDDEFFTMEQFIEWFDLKDVSPSPSRMDLKKLYWINGEHIKITPNDKLAELVKPRLALRDIHETEKPALEDVLAQVKDRAQDLNALADECLYFYKKQVPAEADVAKHWDDEASARMLRFAERLEGLEDWNTEAIHDLFKPFCDEEGIKMGKLGMPLRLAVCGTAKTPSVDAVLALIGKEEVLKRIRA

SEQ ID NO: 26755 - protein, 252 aa, Neisseria meningitidis; identical to SEQ ID NO: 2652

SEQ ID NO: 26756 - protein, 365 aa, Neisseria meningitidis; identical to SEQ ID NO: 11

SEQ ID NO: 26757 - protein, 403 aa, Neisseria meningitidis
MNQLKLTVSGAQILFVAFGAMVLVPLLTGLNPALALLGAGLGTLLFQITTKRKVPIFLGSSFAFIAPIIYSVGEWGLPSTMFGLFAAGFMYFVFAALIRWRGLAAVHKLLPPVVIGPVIMVIGLSVAVAASSMAMGQADGKQVIDYTDSLILSGFTFAVTAIVSVFGSRMMKLIPILIGVASGYVLALLMGLVDTASIAHAPWFAVPHFETPQVNWQAALFMLPVAVAPAIEHIGGIMAIGNVTGKDYTKDPGLDKTLAGDGLGVCVAGLIGGPPVTTYGEVTGAVMITKNSNPVIMTWAAVFAVCMAFFGKFNAFLASIPMPVMGGIMLLLFGTIASLGVKTLIDAKVDLMLPKNLVIVSSVLTTGIGGMTLKLGSFSFAGVGLCAVLAIMLNSLLPDPKES

SEQ ID NO: 26758 - protein, 590 aa, Neisseria meningitidis
MILPARFSDGISLSLRLKLLTGLWVGLAALSVVLTLLLSLRLENAASVIEEAGNLRMQAYRLAYMAGEGSPRAQIDNQVAEFEKSLNRISQSDAIHPLIPSDTPLAYDLIQSMLIIDWQAHILPPLQSYRRPTQVDLYRFAGNIELFLQALENANEKNTWWLRRFQWAIMLMTLVSSVLMLFWHQIWVIRPLQALREGAERIGRRCFDIPVPEGGTPEFKQVGRCFNQMGGRLKILYDDLEGQVAEQTRSLEKQNQNLTLLYQTTRDLHQSYIPQQAAEHFLNRILPAVGADSGRVCLDGGSDVYVSIHHADCGTAASDLGKYHEEIFPIEYQNETLGRLLLSFPNGISLDEDDRILLQTLGRQLGVSLAGAKQEEEKRLLAVLQERNLIAQGLHDSIAQALTFLNLQVQMLETAFAENKREEAAENIGFIKTGVQECYEDVRELLLNFRTKISNKEFPEAVADLFSRFTQQTGTTVETAWENGTHLPTQDEQLQMIFILQESLSNIRKHARATHVKFTLSEHGGRFTMTIQDNGQGFDTEKIGEPTGSHVGLHIMQERAKRIRAVLEIRSQPQQGTTVSLTGASEESLK

SEQ ID NO: 26759 - protein, 242 aa, Neisseria meningitidis; identical to SEQ ID NO: 4670

SEQ ID NO: 26760 - protein, 236 aa, Neisseria meningitidis
MNAAIEHVQAVAFDLDGTLCDSVPDLAAAAEAMLEQLGMKPLPAKVVESYVGDGIGKLVHRVLTNDRDREADSELWEKGFVSYMKYYRDHLSVFTRPYPETEAGLALLKSLGIPLAVITNKNEILAVELLKQLGLADYFSLILGGDSLPEKKPSPLPLRHAAEVLGIDVANMVMVGDSCNDIIAAKAAGCLSVGVTFGYGDMTLLSQDDATRPDWIIGSLPEIYENLQPQKNKDEE

SEQ ID NO: 26761 - protein, 218 aa, Neisseria meningitidis; identical to SEQ ID NO: 8119

SEQ ID NO: 26762 - protein, 271 aa, Neisseria meningitidis
MRPYATTIYQLFILFIGSVFTMTSCEPVNEKTDQKAVSAQQAKEQTSFNNPEPMTGFEHTVTFDFQGTKMVIPYGYLARYTQDNATKWLSDTPGQDAYSINLIEISVYYKKTDQGWVLEPYNQQNKAHFIQFLRDGLDSVDDIVIRKDACSLSTTMGERLLTYGVKKMPSAYPEYEAYEDKRHIPENPYFHEFYYIKKGENPAIITHWNNRVNQAEEDNYSTSVGSCINGFTVQYYPFIREKQQLTQQELVGYHQQVEQLVQSFVNNSSKK

SEQ ID NO: 26763 - protein, 173 aa, Neisseria meningitidis; identical to SEQ ID NO: 6851

SEQ ID NO: 26764 - protein, 766 aa, Neisseria meningitidis
MHRPTAKQILHEVFGYPEFRGRQEAVINTLAGGGSLTVLMPTGGGKSLCYQIPALMREGVAVVVSPLIALMNDQVASLHVAGIEAAAVNSSTSADEAREIADKLAQCRLKLLYVAPERLVTDRFLRFLDQQTVSLFAIDEAHCVSQWGHDFRPEYQQLGMLAERYPNVPRIALTATADAATRADIKHYLHLDDAPEFVSSFDRPNIYYQVIEKNNGKKQLLEFIRKEMAGQSGIVYCLSRKKVEDVARFLRENGLNAIPYHAGLSMDVREENQRRFTHEDNIIVVATVAFGMGIDKPDVRFVAHLDMPQSVEHFYQESGRAGRDGLPAASWLCYGLNDWVLLRERIAEGNSDEVQKQIEMQKLDAMLSVCETAACRRVLLLKHFGEESEPCGHCDNCLHPPVRFDGTVLVQKLLSCVYRAGQRFAAGYITNLLRGKSDDWIRGNRHEQLSTFGIGTELSDKEWRSVIRQCISLGYLTVNITRYQALQLTEAAKKVLKGETEVMLRPLKRDKPAARTLKDNWLRTEREERLWQALRVWRMKQAEAEGIPAYMIFGDKTLRDLVEKMPQNLNGLHDIYGLGEAKIDRFGHGILEVCRNAAGFSRDAVIRPQTEREQQLRQKLEAWRYEQARAENCALHAVLSDESLADMLADTPETETDLEGVHGLGSVRAAKYGRDILAVCRPFSDGIDETAKHKRRLMRALIQWCNETAKHEQSEPYRILSKAALRAIAAKQPEGLAELAAVYGVGEEKAARYGAAVLAVLERNAV

SEQ ID NO: 26765 - protein, 515 aa, Neisseria meningitidis; identical to SEQ ID NO: 654

SEQ ID NO: 26766 - protein, 209 aa, Neisseria meningitidis
MSETENQALTFAKRLKADTTAVHDSVDNLVMSVQPFVSKENYIKFLELQSVFHKAVDHIYKDAELNKAIPELEYMARYDAVTQDLADLGGKPYEYGKPLPHETGNKAIGWLYCAEGSNLGAAFLFKHAQKLDYNGEHGARHLAPHPDGRGKHWRAFVEHLNALNLTPEAEAEAIQGAREAFAFYKVVLRETFGLAADAEAPEGMMPHRH

SEQ ID NO: 26767 - protein, 59 aa, Neisseria meningitidis; identical to SEQ ID NO: 5254

SEQ ID NO: 26768 - protein, 139 aa, Neisseria meningitidis
MISIFKAYYDVYEFNGELLKRCIFLDEENNEIIKDRIYEYLIYVLTGDLYLQKDIDENLEFIHQAENNPNEVYSGGGQGFCWDISAEKVVFYNNEFDEEDGWPDLSCSLHTFKTTLIAWNAFLQLPKSIHSVVETVIEE

SEQ ID NO: 26769 - protein, 231 aa, Neisseria meningitidis; identical to SEQ ID NO: 2520

SEQ ID NO: 26770 - protein, 207 aa, Neisseria meningitidis; identical to SEQ ID NO: 4832

SEQ ID NO: 26771 - protein, 471 aa, Neisseria meningitidis; identical to SEQ ID NO: 7428

SEQ ID NO: 26772 - protein, 255 aa, Neisseria meningitidis; identical to SEQ ID NO: 3724

SEQ ID NO: 26773 - protein, 620 aa, Neisseria meningitidis
MALLQISEPGMSAAPHRHRLAAGIDLGTTNSLVATVRSGSAACLPDAEGRVTLPSVVRYLENGGIEVGKTALSAQKTDPLNTVSSAKRLIGRTLADLHQNTHYLPYRFGDNQRVIELHTRQGVKTPVEVSAEILKTLKSRAEETLGGDLVGVVITVPAYFDDAQRQATKDAARLAGLNVLRLLNEPTAAAIAYGLDNASEGTFVVYDLGGGTFDVSVLQLTKGLFEVKATGGNSALGGDDFDHRLFCHLLEQNELSKLNEQDSRLLLSLVRSAKEKLTAQTEAVIETTLSDGHKVHTVITRQEFHNLTQNLVQKTIEPVKQALKDAGVGKADVKGVIMVGGSTRMLHVQQAVATFFGQTPLNNLNPDEVVALGAAIQANVLAGNKADGEWLLLDVTPLSLGLETYGGLAEKIIPRNSTIPTSRAQDFTTFKDGQTAMTIHVVQGERELVSDCRSLAKFTLRGIPPMAAGAARIRVTFQVDADGLLSVSAQEQSTGVQAQIEVKPSYGLDDSTITQMLKDSMSNAAEDMAARARAEAVVEAESLTDAVNAALELDSDLLDAEELAQIQRDIADLQGSLKDGNAEDIRAAAAKLSRSTDNFAAKRMNRNIQRALTGQSVDNI

SEQ ID NO: 26774 - protein, 125 aa, Neisseria meningitidis
VNKTLILALSALLGLAACSVERVSLFPSYKLKIIQGNELEPRAVASLRPGMTKDQVLLLLGSPILRDAFHTDHWDYTFNTSRNGIIKDRSNLTVYFENGVLVRTEGNALQNAAEALRVKQNADKQ

SEQ ID NO: 26775 - protein, 271 aa, Neisseria meningitidis
MRPYATTIYQLFILFIGSVFTMTSCEPVNEKTDQKAVSAQQAKEQTSFNNPEPMTGFEHTVTFDFQGTKMVIPYGYLARYTQDNATKWLSDTPGQDAYSINLIEISVYYKKTDQGWVLEPYNQQNKAHFIQFLRDGLDSVDDIVIRKDACSLSTTMGERLLTYGVKKMPSAYPEYEAYEDKRHIPENPYFHEFYYIKKGENPAIITHRNNRINQTEEDNYSTGVGSCINGFPVRYYPFIREKQQLTQQELVGYHQQVEQLVQSFVNNSSKK

SEQ ID NO: 26776 - protein, 286 aa, Neisseria meningitidis; identical to SEQ ID NO: 2687

SEQ ID NO: 26777 - protein, 558 aa, Neisseria meningitidis
MSQQYVYSMLRVSKVVPPQKTIIKDISLSFFPGAKIGLLGLNGAGKSTVLRIMAGVDKEFEGEAVPMGGIKIGYLPQEPELDPEKTVREEVESGLGEVAAAQKRLEEVYAEYANPDADFDALAEEQGRLEAIIAAGSSTGGGAEHELEIAADALRLPEWDAKIDNLSGGEKRRVALCKLLLSKPDMLLLDEPTNHLDAESVEWLEQFLVRFPGTVVAVTHDRYFLDNAAEWILELDRGHGIPWKGNYSSWLEQKEKRLENEAKSEAARVKAMKQELEWVRQNAKGRQAKSKARLARFEEMSNYEYQKRNETQEIFIPVAERLGNEVIEFVNVSKSFGDKVLIDDLSFKVPAGAIVGIIGPNGAGKSTLFKMIAGKEQPDSGEVKIGQTVKMSLIDQSREGLQNDKTVFDNIAEGRDILQVGQFEIPSRQYLGRFNFKGSDQSKIAGQLSGGERGRLHLAKTLLSGGNVLLLDEPSNDLDVETLRALEDALLEFAGSVMVISHDRWFLDRIATHILACEGDSKWVFFDGNYQEYEADKKRRLGEEGAKPKRIKYKPVTR

SEQ ID NO: 26778 - protein, 70 aa, Neisseria meningitidis; identical to SEQ ID NO: 5197

SEQ ID NO: 26779 - protein, 121 aa, Neisseria meningitidis; identical to SEQ ID NO: 1070

SEQ ID NO: 26780 - protein, 134 aa, Neisseria meningitidis
LAEGQKSAVTEYYLNHGIWPGGNSSAGVATSSEIKGKYVAGVKVENGVVTAEMKSTGVNKEIQGKKLSLWAKRQNGSVKWFCGQPVTRNANNTANDAVTATDKQIDTKHLPSTCRDAASVVCIETPPTAFYKNT

SEQ ID NO: 26781 - protein, 354 aa, Neisseria meningitidis; identical to SEQ ID NO: 2527

SEQ ID NO: 26782 - protein, 187 aa, Neisseria meningitidis; identical to SEQ ID NO: 8513

SEQ ID NO: 26783 - protein, 233 aa, Neisseria meningitidis; identical to SEQ ID NO: 3223

SEQ ID NO: 26784 - protein, 59 aa, Neisseria meningitidis
LAEGYTYFFNENTDDCYVLKEDFINNERYEKTELYSQKDKVILFPKFGEYDLVLNPDII

SEQ ID NO: 26785 - protein, 375 aa, Neisseria meningitidis; identical to SEQ ID NO: 19895

SEQ ID NO: 26786 - protein, 389 aa, Neisseria meningitidis; identical to SEQ ID NO: 11490

SEQ ID NO: 26787 - protein, 414 aa, Neisseria meningitidis
MEQQQRYISVLDIGTSKVLALIGEVQDDDKINIVGLGQAPSRGLRAGMVTNIDATVQAIRQAVNDAELMADTKITHVTTGIAGNHIRSLNSQGVVKIKDGEVTQADIDRAIETAKAINIPPDQKILDAVVQDYIIDTQLGVREPIGMSGVRLDTRVHIITGASTAVQNVQKCIERCGLKSDQIMLQPLASGQAVLTEDEKDLGVCVIDIGGGTTDIAVYMNGAIRHTSVIPAGGNLITKDLSKSLRTPLDAAEYIKIHYGVASCDTEGLGEMIEVPGVGDRTSRQVSSKVLAAIISARIQEIFGVVLGELQKSGFPKEVLNAGIVLTGGVSMMTGIVEFAEKIFDLPVRTGAPQEMGGLSDRVRTPRFSTAIGLLHAACKLEGNLPQPENGAVQEREVGGGLLARLKRWIENSF

SEQ ID NO: 26788 - protein, 386 aa, Neisseria meningitidis
MKRQALAAMIASLFALAACGGEPAAQAPAASAEAASSAAQAAAETPAGELPVIDAVTTHAPEVPPAIDRDYPAKVRVKMETVEKTMKMDDGVEYRYWTFDGDVPGRMIRVREGDTVEVEFSNNPSSTVPHNVDFHAATGQGGGAAATFTAPGRTSTFSFKALQPGLYIYHCAVAPVGMHIANGMYGLILVEPKEGLPKVDKEFYIVQGDFYTKGKKGAQGLQPFDMDKAVAEQPEYVVFNGHVGSIAGDNALKAKAGETVRMYVGNGGPNLVSSFHVIGEIFDKVYVEGGKLINENVQSTIVPAGGSAIVEFKVDIPGSYTLVDHSIFRAFNKGALGQLKVEGAENPEIMTQKLSDTAYAGNGAAPAASAPAASAPAASASEKSVY

SEQ ID NO: 26789 - protein, 242 aa, Neisseria meningitidis; identical to SEQ ID NO: 3540

SEQ ID NO: 26790 - protein, 228 aa, Neisseria meningitidis; identical to SEQ ID NO: 18794

SEQ ID NO: 26791 - protein, 96 aa, Neisseria meningitidis; identical to SEQ ID NO: 4744

SEQ ID NO: 26792 - protein, 275 aa, Neisseria meningitidis
MQNHVISLASAAERRAHITDTFGVRGIPFQFFDALMPSERLEQAMAELVPGLSAHPYLSGVEKACFMSHAVLWKQALDEGLPYIAVFEDDVLLGEGAEKFLAEDAWLKERFDPDSAFIVRLETMFMHVLTSPSGVADYCGRAFPLLESEHWGTAGYIISKKAIRFFLQHFVMLQPEQIKPIDLMMFSDFFDKEGMPVYQVSPALCAQELHYAKFHDQNSALGSLIEHDRLLNRKQQWRDSPANTFKRRLIRALTKISREREKRRQRREQFIVPFQ

SEQ ID NO: 26793 - protein, 737 aa, Neisseria meningitidis; identical to SEQ ID NO: 8684

SEQ ID NO: 26794 - protein, 172 aa, Neisseria meningitidis; identical to SEQ ID NO: 1362

SEQ ID NO: 26795 - protein, 242 aa, Neisseria meningitidis
MIKFKNVHKHFKDLHVINGVNLEIKKGEVVVVCGPSGSGKSTLIRTVNQLESIESGEIWVDGVNVADPKTDLNKIREEVGFVFQGFNLYPHLTVLENITLAPMKVKGQNAEQAEKKAMELLERVGLAHKKDAFPSQLSGGQQQRVAIARGLAMEPRVMLFDEPTSALDPEMVGEVLKVMKDLAESGMTMMCVTHEMGFAREVADRVIFVDKGQILEDETPEAFFTNPKHERAKQFLQQVMTH

SEQ ID NO: 26796 - protein, 412 aa, Neisseria meningitidis
MVFYASKAMRAAALAASVALALSSCGKADEAAQGGQPAGREAPAPVVGVVTVHPQTVALTVELPGRLESLRTADVRAQVGGIIQKRLFQEGSYVRAGQPLYQIDSSTYEASLESARAQLATAQATLAKADADLARYKPLVAADAISKQEYDAAVTAKRSAEAGVKAAQAAIKSAGISLNRSRITAPISGFIGQSKVSEGTLLNAGDATVLATIRQTNPMYVNVTQSASEVMKLRRQIAEGKLLAADGAVAVGIKFDDGTVYPEKGRLLFADPTVNESTGQITLRAAVPNDQNILMPGLYVRVLMDQVAVDNAFIVPQQAVTRGTKDTVIIVNAQGGMEPREVTVAQQQGANWIVTSGLKDGDKVVVEGISIAGMTGAKKVTPKEWMPSENQASAPQVGVQTASEAKPASEAK

SEQ ID NO: 26797 - protein, 288 aa, Neisseria meningitidis; identical to SEQ ID NO: 464

SEQ ID NO: 26798 - protein, 274 aa, Neisseria meningitidis; identical to SEQ ID NO: 8054

SEQ ID NO: 26799 - protein, 208 aa, Neisseria meningitidis
MRKIRTKICGITTPEDALAAAAAGADAVGLVFFQGSSRAVDIARAKKITAALPPFVSVVALFVNESAQNIRRILAEVPIHIIQFHGDEDDAFCRQFHRPYIKAIRVQTASDIQNAAHRFPDAQALLFDAYHPSEYGGTGHRFDWTLLAEYSGKPWVLAGGLTPENVGEAVRITGAESVDVSGGVEASKGKKDPAKVAAFISTANRLSR

SEQ ID NO: 26800 - protein, 798 aa, Neisseria meningitidis; identical to SEQ ID NO: 6178

SEQ ID NO: 26801 - protein, 341 aa, Neisseria meningitidis; identical to SEQ ID NO: 23056

SEQ ID NO: 26802 - protein, 258 aa, Neisseria meningitidis
MTLIHPTAVIDPKAELDSSVKVGAYTVIGPNVQIGANTEIGPHAVINGHTSIGENNRIFQFASLGEIPQDKKYRDEPTKLIIGNGNTIREFTTFNLGTVTGIGETRIGDDNWIMAYCHLAHDCVVGNHTIFANNASLAGHVTIGDYVVLGGYTLVFQFCHIGDYAMTAFAAGVHKDVPPYFMASGYRAEPAGLNSEGMRRNGFTAEQISAVKNVYKTLYHRGIPFEEAKADILRRAETQAELAVFRDFFAQSTRGIIR

SEQ ID NO: 26803 - protein, 286 aa, Neisseria meningitidis
MSDLSVLSPFAVPLAAVFGLLVGSFLNVVIYRVPVMMERGWTVFAKEYLNLPLTEEESRTFNLMKPDSCCPKCRVPIRAWQNIPIVSYLLLRGKCASCQTKISIRYPLIELLTGVLFGLVAWQYGWSWITLGGLILTAFLISLTFIDADTQYLPDSMTLPLIWLGLIFNLDGGFVPLQSAVLGAVAGYGSIWLLCAVYKLLTRKTGMGNGDFKLIAALGAWLGISALPVLIFVSSLIGLVAAIVMRVAKGQHFAFGPALTVSGWIIFTANDSVWRAVNWWLTHPVL

SEQ ID NO: 26804 - protein, 239 aa, Neisseria meningitidis
MLTTPPLAPKTVAALHRLGIRTLEELRQNGSVKAFLLLKASGLTLTKSTLWQLESLLNGTPPQEMSQAHKARLLAELKNHPPVAAFPPQEEMEHFMCEALRQAEQSSADGEIPVGAVIVSDGKIIASAHNTCIADCNVSRHAEINALAQAGREIQNYRLDGCDIYITLEPCAMCASALIQARIRRVIYGAAEPKTGAAGSIVNLFADKRLNTHTAIRGGILQEECRAVLSRFFQNKRKG

SEQ ID NO: 26805 - protein, 324 aa, Neisseria meningitidis
MVVAENVKREGKSCADSDSGSAHVKSVPFGTTHAPVCRSNIFSFSLLGFSLCLAVGTANIAFADGIIADKAAPKTQQATILQTGNGIPQVNIQTPTSAGVSVNQYAQFDVGNRGAILNNSRSNTQTQLGGWIQGNPWLARGEARVVVNQINSSHSSQMNGYIEVGGRRAEVVIANPAGIAVNGGGFINASRATLTTGQPQYQAGDLSGFKIRQGNVAITGQGLDARDTDFTQILSHAVKIDGPVWGKDVRVSAGKNNVSADGSIRSSHSPATNINSDNSLYAIDTGALGGDLCKIPFPPDSRNPNTGFRLFSPQISPNFTQIPP

SEQ ID NO: 26806 - protein, 85 aa, Neisseria meningitidis
MASSNVNNEIKDKKLSLWAKRQAGSVKWFCGQPVTRNDTATATDVAAANGKTDDKINTKHLPSTCRDDSSTGCIETPPTAFYKNT

SEQ ID NO: 26807 - protein, 212 aa, Neisseria meningitidis
MQTAIIDYGMGNLHSVLKSVRTAGQLAGKNTEIFLSGDPDRVSRADKVIFPGQGAMPDCMAALKRDGLDEAVKDALKNKPFFGICVGAQLLFDHSEEGNTDGLGWFGGKVRRFERDLLDPQGCRLKVPHMGWNTVRQTQNHPLFQGIPQDTRFYFVHSYYFDPENPETILGESDYPSPFACIVGKDNVFATQFHTEKSHDAGLTMLKNFLNW

SEQ ID NO: 26808 - protein, 146 aa, Neisseria meningitidis; identical to SEQ ID NO: 25523

SEQ ID NO: 26809 - protein, 140 aa, Neisseria meningitidis; identical to SEQ ID NO: 3245

SEQ ID NO: 26810 - protein, 174 aa, Neisseria meningitidis
MNNLIPEHLAAYAHSDSLQIEGVHRCFSLSCQGRDTFHIRYYGEPFDGLMTDTDKAPVKIVAVEAVSGDEIVLFDGAEHGYNAMFCDKYSPNQKQNRTLTDLDEYTYRVLIHLYYNIDYEDEYEDFVNSEGQVPLIDGRIISFDSLKRNGFDAISVDLIDEKHSVRELLNEELS

SEQ ID NO: 26811 - protein, 383 aa, Neisseria meningitidis; identical to SEQ ID NO: 3357

SEQ ID NO: 26812 - protein, 37 aa, Neisseria meningitidis; identical to SEQ ID NO: 7611

SEQ ID NO: 26813 - protein, 505 aa, Neisseria meningitidis
MVISNPRELEKLKDRIPNLINIIRVAIVFPLMIMHILGLETGSRANLHASWTAWAFYVWLAIACWLIFFSIIHPHWQWQALRIPSFSAVADITMIGVLTYLFGGIDSGFGILILPFVVCSCLLSYGRYPLLYSSYAAILLIFNAIADGDIGKYPLISDARTASATFILVAASYLSAIFTSLSVRYIDRAGKLAHENHAAYRRIRGLNQTVLNRVQEAVVVINVEHQTILFNKKAKDLLPMLEIGQHTALFDPITVLWDKASSRTFERNIDTPGLNAGIRAVPVNKGPDKLLILYIRPQSEIQAEALSVKLAALGQLTANLAHEIRNPMSAIRHANDLLRENMEAGAADPFNAKLCKIIDGNVCRIDKMLEDISSLNKRNKTERETIGLIPFWEEFKQEFLLGHPDAAGCIRLDMQGNHLTAYFDPAHLRQIMWNLANNAWRHSRKQPGSISVTIRPAQKNTVCILFADRPKCRNTCSNPFTPRRKTAPASGCMSPANWHMPTSAI

SEQ ID NO: 26814 - protein, 215 aa, Neisseria meningitidis; identical to SEQ ID NO: 1514

SEQ ID NO: 26815 - protein, 379 aa, Neisseria meningitidis
MKKTLVAAAILSLALTACGGGSDTAAQAPSAKPEAEQSGKLNIYNWSDYVDPETVAAFEKETGIKTRSDYYDSNETLEAKVLTGKSGYDLTAPSIANVGRQIKAGAYQKIDKAQIPHYGNIDKDLLKMMEAVDPGNEYAVPYFWGINTLAINTQQVKKALGTDKLPENEWDLVFKPEYTAKLKSCGISYFDSAIEQIPLALHYLGKDPNSENPEDIKAAVDMMKAVRGDVKRFSSSGYIDDMAAGNLCAAIGYGGDLNIAKTRAEEAANGVEIKVLTPKTGVGVWVDSFMIPRDAQNVANAHRYIDYTLRPEVAAKNGSFVTYAPASRPARELMDEKYTSDASIFPNKELMEKSFIVSPKSAESAKLGVKLWQGLKAGK

SEQ ID NO: 26816 - protein, 259 aa, Neisseria meningitidis; identical to SEQ ID NO: 8690

SEQ ID NO: 26817 - protein, 718 aa, Neisseria meningitidis; identical to SEQ ID NO: 25668

SEQ ID NO: 26818 - protein, 197 aa, Neisseria meningitidis
MTTLQERVAAHFAESIRAKQEAEKVLVEPTVQAAELMLQCLMNDGKILACGNGGSAADAQHFAAEMTGRFEKERMELAAVALTTDTSALTAIGNDYGFDHIFSKQVRALGRAGDVLVGISTSGNSANVIEAVKAAHERDMHVIALTGRDGGKIAAMLKDTDVLLNVPYPRTARIQENHILLIHAMCDCIDSVLLEGM

SEQ ID NO: 26819 - protein, 281 aa, Neisseria meningitidis; identical to SEQ ID NO: 5471

SEQ ID NO: 26820 - protein, 57 aa, Neisseria meningitidis; identical to SEQ ID NO: 6070

SEQ ID NO: 26821 - protein, 97 aa, Neisseria meningitidis
LRQKTVVLWVQVFETDVLKPPNALSDNEWSFPMPKMKTKSSAKKRFKVLGNGGVKRAHAFKRHILTKKTTKNKRQLRGTSMVNDRDLASVAKMLPYA

SEQ ID NO: 26822 - protein, 119 aa, Neisseria meningitidis; identical to SEQ ID NO: 1252

SEQ ID NO: 26823 - protein, 468 aa, Neisseria meningitidis
MKNRVTNIHFVGIGGVGMSGIAEVLHNLGFKVSGSDQARNAATEHLGSLGIQVYPGHTAEHVNGADVVVTSTAVKKENPEVVAALEQQIPVIPRALMLAELMRFRDGIAIAGTHGKTTTTSLTASILGAAGLDPTFVIGGKLNAAGTNARLGKGEYIVAEADESDASFLHLTPIMSVVTNIDEDHMDTYGHSVEKLHQAFIDFIHRMPFYGKAFLCIDSEHVRAILPKVSKPYATYGLDDTADIYATDIENVGAQMKFTVHVQMKGHEQGSFEVVLNMPGRHNVLNALAAIGVALEVGASVEAIQKGLLGFEGVGRRFQKYGDIKLPNGGTALLVDDYGHHPVEMAATLSAARGAYPEKRLVLAFQPHRYTRTRDLFEDFTKVLNTVDALVLTEVYAAGEEPIAAADSRALARAIRVLGKLEPIYCENVADLPEMLLNVLQDGDIVLNMGAGSINRVPAALLELSKQI

SEQ ID NO: 26824 - protein, 229 aa, Neisseria meningitidis; identical to SEQ ID NO: 26517

SEQ ID NO: 26825 - protein, 156 aa, Neisseria meningitidis; identical to SEQ ID NO: 681

SEQ ID NO: 26826 - protein, 505 aa, Neisseria meningitidis; identical to SEQ ID NO: 2655

SEQ ID NO: 26827 - protein, 464 aa, Neisseria meningitidis
MNKQPLSLAVVGHTNTGKTSLLRTLLRDSGFGEVKNAPSTTRHVEEAAISDGADTLVFLYDTPGLEDAGGVLEWLENHTDNRSDGIERLQQFLGSHGAHHDFNQEAKVLRQVLQSDMAMYVIDAREPVLDKYRDELTILSWCAKPVMPVFNFTGGQPPESWTTMLARRNLHVFAGFDTVAFDFEGELRLWENLATMLPERSTLDRLTAMRRREWQRLDGEARREIADFLIDAAAFRQEVDENEDTATVLQTMQAEIRQLERQMQQRLFALYRFYHSEIDGGDWMPQAFRQDPFDSELLKQYGIRTGTGAATGALIGLGLDIATLGGSLGLGTAIGGFLGGILPNTRTISDKLAGRQTLHTDPETLTLLAARALDLLHVLQTRGHAAQSDIELHSRKAPWDAARLPPELNKARSHWKWSSLNTHRPETSRAERAGYVEKLQIRLSGKYSELNLNQDKAASRRQYK

SEQ ID NO: 26828 - protein, 208 aa, Neisseria meningitidis
MIVSIDVDAQKTFTPLCPDELPVNEGHLIVEELNAQAALADLRVMTKDAHHMAAKWLVDNPVDMLKPTGLPDADLTWVAHAMIGTHGYELLDGLPSAKEYDYCVWKGVDPELHPYGACFHDIEEKLSTGLIEWLRCQHTDTVIVGGLATDYCVKTTVLQLLKGGNWQVIVNEAACRGIAPETIETAWQEMRSAGAIILKNAEEIKKIY

SEQ ID NO: 26829 - protein, 52 aa, Neisseria meningitidis
MKTLLLICTLSALAACALSGQGGSRVYGEIKARDLCVTAPILLSAFCLACSR

SEQ ID NO: 26830 - protein, 369 aa, Neisseria meningitidis
LEAQLGAPIEDYAPPKHWTRKQLRSMGRVSYLCVDAAEQALTDAGLLGDESITDGRMGVACGSSSGSTKDIGDVGELLLTGMSRNFSANTYVRMMPHTAAANIGIFFGLKGRIIPTSSACSSGSQGIGYAYEAIKYGLTDMMLAGGGEEFFPSEVYVFDSLYAASRRNGEPEKTPRPYDANRDGLVIGEGAGIFVLEELEHAKRRGAIIYAELVGYGANSDAYHISTPRPDAQGAILAFQTALQHADLAPEDIGWINLHGTGTHHNDSMESRAVAAVFGNNTPCTSTKPQTGHTLGAAGAIEAAFAWGIADRKSNPEGKLPPQLWDGQNDPDLPAINLTGSGSRWETEKRIAASSSFAFGGSNCVLLIG

SEQ ID NO: 26831 - protein, 311 aa, Neisseria meningitidis; identical to SEQ ID NO: 9342

SEQ ID NO: 26832 - protein, 77 aa, Neisseria meningitidis; identical to SEQ ID NO: 5942

SEQ ID NO: 26833 - protein, 864 aa, Neisseria meningitidis
MSKSAVSPMMQQYLGIKAQHTDKLVFYRMGDFYEMFFDDAVEAAKLLDITLTTRGQVDGEPVKMAGVPFHAAEQYLARLVKLGKSVAICEQVGEVGAGKGPVERKVVRIVTPGTLTDSALLEDKETNRIVAVSPDKKYIGLAWASLQSGEFKTKLTTVDKLDDELARLQAAEILLPDSKNAPQLQTASGVTRLNAWQFAADAGEKLLTEYFGCQDLRGFGLDGKEHAVAIGAAGALLNYIRLTQNLMPQHLDGLSLETDSQYIGMDAATRRNLEITQTLSGKKSPTLMSTLDLCATHMGSRLLALWLHHPLRNRAHIRARQEAVAALESQYKPLQCRLKNIADIERIAARIAVGNARPRDLASLRDSLFELAQIDLSANGSSLLETLKAVFPENLSTAEQLRQAILPEPSVWLKDGNVINHGFHPELDELRRIQNHGDEFLLDLEAKERERTGLSTLKVEFNRVHGFYIELSKTQAEQAPADYQRRQTLKNAERFITPELKAFEDKVLTAQEQALALEKQLFDGVLKNLQTALPQLQKAAKAAAALDVLSTFSALAKERNFVRPEFADYPVIHIENGRHPVVEQQVRHFTANHTDLDHKHRLMLLTGPNMGGKSTYMRQVALIVLLAHTGCFVPADAATIGPIDQIFTRIGASDDLASNRSTFMVEMSETAYILHHATEQSLVLMDEVGRGTSTFDGLALAHAVAEHLLQKNKSFSLFATHYFELTYLPEAHTAALNMHLSALEQGQDIVFLHQIQPGPAGKSYGIAVAKLAGLPVRALKSAQKHLNELEDQAAANRPQLDIFSTMPSEKGDEPNVGNFVDKAEEKHFEGILAAALEKLDPDSLTPREALSELYRLKDLCKSVS

SEQ ID NO: 26834 - protein, 208 aa, Neisseria meningitidis; identical to SEQ ID NO: 1121

SEQ ID NO: 26835 - protein, 99 aa, Neisseria meningitidis
MKKMFVLFCMLFSCAFSLAAVNINAASLQELEALPGIGPAKAKAIAEYRAQNGAFKSVDDLTKVKGIGPAVLAKLKDQASVGAPAPKGPAKPVLPAVKK

SEQ ID NO: 26836 - protein, 329 aa, Neisseria meningitidis; identical to SEQ ID NO: 247

SEQ ID NO: 26837 - protein, 343 aa, Neisseria meningitidis
MPDFQRITIENIEYFIVDSIQNLRAEDSFIHRNNKLSVFGGNGEARKYVGSYIDDSGRKLSTFFEYENWGITETKNGRRVEYPLIQKNCFFNKKNLQRYLVDAKVEYHKQEQKYHHDISRFYDDYVLSINNLPTENIFFSIHDVSDHLENSKGYRRGYIRSEDDIWSIWRKIVLPKISYLSILKLLPVKDIEDSEPLFYFRIFLDYQFRSIVHPQLLSREKLEIPASEFNQFVEQEIIKQKSRKGQQKYRKDVINHMSQCPFTLITDEILLRASHIKPYMVCITEKNEKEALDYLNGLALTPTYDWLFDQGYITFLDDGRLICGTRLSRYTWEKLNINPNAKN

SEQ ID NO: 26838 - protein, 461 aa, Neisseria meningitidis
MDGWTQTLSAQTLLGISAAAIILILILIVKFRIHALLTLVIVSLLTALATGLPTGSIVNDVLVKNFGGTLGGVALLVGLGAMLGRLVETSGGAQSLADALIRMFGEKRAPFALGVASLIFGFPIFFDAGLIVMLPIVFATARRMKQDVLPFALASIGAFSVMHVFLPPHPGPIAASEFYGANIGQVLILGLPTAFITWYFSGYMLGKVLGRTIHVPVPELLSGGTQDNDLPKEPAKAGTVVAIMLIPMLLIFLNTGVSALISEKLVSADETWVQTAKIIGSTPIALLISVLVALFVLGRKRGESGSALEKTVDGALAPVCSVILITGAGGMFGGVLRASGIGKALADSMADLGIPVLLGCFLVALALRIAQGSATVALTTAAALMAPAVTAAGFTDWQLACIVLATAAGSVGCSHFNDSGFWLVGRLLDMDVPTTLKTWTVNQTLIALIGFALSALLFAIV

SEQ ID NO: 26839 - protein, 167 aa, Neisseria meningitidis
MHALHFSASDKAALYREVLPQIESVVADETDWVANLANTAAVLKEAFGWFWVGFYLVDTRSDELVLAPFQGPLACTRIPFGRGVCGQAWAKGGTVVVGDVDAHPDHIACSSLSRSEIVVPLFSDGRCIGVLDADSEYLAQFDETDALYLGELAKILEKRFEASRQAA

SEQ ID NO: 26840 - protein, 177 aa, Neisseria meningitidis
MAHPQEIREKLRRLYVSGEQTLETAALMCEIPQATARAWKRADKEKGDDWDKMRAAYTLAGGGIEDLSRAMLAGFMVQYNSTMTMLQDSSTEDLPPSDRAKLLASLTDAFTKTVSANARVMPETSKLATALELIEFLMAFVQEKHPKHLPAFGGIGVVWGGSGEEVWLIAVCQSPIT

SEQ ID NO: 26841 - protein, 321 aa, Neisseria meningitidis; identical to SEQ ID NO: 6649

SEQ ID NO: 26842 - protein, 201 aa, Neisseria meningitidis; identical to SEQ ID NO: 15193

SEQ ID NO: 26843 - protein, 172 aa, Neisseria meningitidis
MRLFPIAAALTLAACGTMQSTQYFVLPDSRYIRPATQGGETAVEVRLAEPLKRGGLVYQTDPYRLNTAQNHVWADTLDDMLEAALSNAFNRLDSARIFVPASRSGSTEKWTVYIDAFQGSYTGKTLISGYAVLPDGMNRPFHIETEQQGDGYAAMTAALEQGLKQAAQQMVE

SEQ ID NO: 26844 - protein, 215 aa, Neisseria meningitidis
MKTKFYNHQGEHLILYFAGWGTPPDAVNHLILPENHDLLICYDYQDLNLDFDFSAYRHIRLVAWSMGVWAAERALQGIRLKSATAVNGTGLPCDDNFGIPCAVFKGTLENLTENTRLKFERRMCGDKASFEDYQQFPARPFDEIHQELIALFAMIGQDRRADLIRWTNALVGSGDKIFMPANQHRYWTPRCTVREIDGGHYLFSRFTHWSALWNH

SEQ ID NO: 26845 - protein, 336 aa, Neisseria meningitidis
MHIGGYFIDNPIALAPMAGITDKPFRRLCRDFGAGWAVCEMLTSDPTLRNTKKTLHRSDFADEGGIVAVQIAGSDPQQMADAARYNVSLGAQLIDINMGCPAKKVCNVQAGSALMQNEPLVAAILEAVVRAAGVPVTLKTRLGWHEDHQNLPVIAKIAEDCGIAALAVHGRTRTQMYKGEARYELIAETKCRLNIPVWVNGDITSPQKAAAVLKQTAADGIMIGRGAQGRPWFFRDLKHYAEHGVLPPALSLAECAAAILNHIRAIHAFYGDSAGVRIARKHIGWYIGEMPDGEQARREINRLDSAAAQYDMLAGYLERLAGKTDRWACGYRTNAF

SEQ ID NO: 26846 - protein, 200 aa, Neisseria meningitidis
MTDVLQTVFYIMLFPRIIAASAQRKLSVYLKKGGLVAYPTESCYGLGCLPTLAKALGKLAHLKKRPQHKGMIVIGNQFEQLQPLLQMPSENLQAMLRKEWPAPKTFLLSAKSCVLPELRGKQRSKLAVRVPAHVGARRLCLALQTPLVSTSCNRAGKRACRTEREVRRQFGRDVWIVGGRIGRQKSPSQIIDGETGKRLR

SEQ ID NO: 26847 - protein, 161 aa, Neisseria meningitidis; identical to SEQ ID NO: 1189

SEQ ID NO: 26848 - protein, 258 aa, Neisseria meningitidis; identical to SEQ ID NO: 2774

SEQ ID NO: 26849 - protein, 66 aa, Neisseria meningitidis; identical to SEQ ID NO: 14122

SEQ ID NO: 26850 - protein, 222 aa, Neisseria meningitidis; identical to SEQ ID NO: 3618

SEQ ID NO: 26851 - protein, 257 aa, Neisseria meningitidis
MSANILAIANQKGGVGKTTTTVNLAASLASRGKRVLVVDLDPQGNATTGSGIDKAGLQSGVYQVLLGDADVKSATVRSKEGGYAVLGANRALAGAEIELVQEIAREVRLKNALKAVAEDYDFILIDCPPSLTLLTLNGLVAAGGVIVPMLCEYYALEGISDLIATVRKIRQAVNPDLDITGIVRTMYDSRSRLVAEVSEQLRSHFGDLLFETVIPRNIRLAEAPSHGMPVMAYDAQAKGTKAYLALADELMARVSGK

SEQ ID NO: 26852 - protein, 99 aa, Neisseria meningitidis
VDYPDFPQEIPMPNYSEWVKIKFKQFSYLKFIYGYATKNQDKNIKNVLELGELKQDDEILDYGGALEVIGGRYDLPTGFSIDIVCREIELEFLDQESFN

SEQ ID NO: 26853 - protein, 522 aa, Neisseria meningitidis; identical to SEQ ID NO: 17262

SEQ ID NO: 26854 - protein, 492 aa, Neisseria meningitidis
MKYKDLRDFIAMLEQQGKLKRIAHPVSPHLEMTEIADRVLRAEGPALLFENPVKPDGTRYGYPVLANLFGTPERVAMGMGADSVSKLREIGQTLAYLKEPEPPKGIKDAFSKLPLLKDIWSMAPNVVKNAPCQEIVWEGENVDLYKLPIQHCWPEDVAPLVTWGLTVTRGPHKKRQNLGIYRQQLIGKNKLIMRWLSHRGGALDYQEFRKLNPDTPYPVAVVLGCDPATILGAVTPVPDTLSEYQFAGLLRGSRTELVKCIGNDLQVPARAEIVLEGVIHPNETALEGPYGDHTGYYNEQDHFPVFTVERITMRENPIYHSTYTGKPPDEPAVLGVALNEVFVPLLQKQFPEITDFYLPPEGCSYRMAVIGMKKQYAGHAKRVMMGCWSFLRQFMYTKFIIVVDDDVNVRDWKEVIWAVTTRMDPVRDTVLVENTPIDYLDFASPVSGLGGKMGLDATNKWPGETDREWGRVIKKDPAVTAKIDGIWEELGL

SEQ ID NO: 26855 - protein, 336 aa, Neisseria meningitidis
MSKKRVLTGVTTTGIPHLGNYVGAIRPAVRAAQNLDTESFLFLADYHGIIKCHEPEMIHQSTQAVAATWLACGLNPEQTTFYRQSDIPEVMELNWILTCITAKGLMNRAHAYKAAVQANAENGQEDPDFGVEMGLFSYPILMTADILMFNANEVPVGRDQIQHVEMARDIAGRFNHRFKEIFTLPEVKIDENVELLVGLDGRKMSKSYGNTIPLWENDKKTQKSVNKIITNMKEPGEPKQPDESPLFEIYKAFSTPSETAAFTQMLAEGLAWGEAKKLLAAKINAELAEPRERYNELTADPSQIEEILQAGAQKARKEARELLDKVRDAVGIRPLK

SEQ ID NO: 26856 - protein, 415 aa, Neisseria meningitidis
MSQRRVVITGLGQVSPVGNTVAEAWDTLLAGKSGIGAITRFDASDINSRVAGEVRGFDIGQYISAKEARRMDVFIHYGIAAALQAIADSGLDDVENLDKDRIGVNIGSGIGGLPGIEVTGKAVIEGGARKINPFFIPGSLINLISGHVTILKGYRGPSYGMVSACTTGAHAIGDSLRMIKYGDADIMVAGGAEGAISTLGVGGFAAMKALSTRNDDPATASRPWDKGRDGFVIGEGAGILVLEELEHAKKRGAKIYAEIVGFGMSSDAYHITAPNEEGPALAVTRALKDAGINPEDVDYVNAHGTSTPLGDANETKALKRAFGEHAYKTVVSSTKSMTGHLLGAAGGVEAVYSILAIHDGKIPPTINIFEQDVEAGCDLDYCANEARDAEIDVAISNSFGFGGTNGTLVFKRFKG

SEQ ID NO: 26857 - protein, 153 aa, Neisseria meningitidis
MKPQKSLRARAMDILSRQEVSRIGLKRKLAPYAESEEELENVLNEFAERNWQSDLRYAEAYIRSKSRKHGSLRLKQALAQQGIDEETSRNLLPDRSSEKQAAIAVLRKKFKHPAADLKEKQKQARFLAYRGFDADTVQTALKHAWDENWEDGC

SEQ ID NO: 26858 - protein, 125 aa, Neisseria meningitidis; identical to SEQ ID NO: 1050

SEQ ID NO: 26859 - protein, 309 aa, Neisseria meningitidis
MIHVSAVQAPAHIQDTGRYGHRSYGIGHAGAMDTVALAAGNILLGNDEGTAAIEIALGGIMLVFERDTPFCLTGAVYQAELDGEPVYSYWRYTARKGQTLKMVRAVQGMYGYVCVAGGFDVPEVMGSRSTDLKAGFGGHQGRMLQKGDCLPIGKGAQELSKVGIAPIPFTDTVHLVPSSEYAAFSEKGRLNLERETWTLQSDSNRMGYRFDGQPLTLSQPLEMLSHAVQAGTVQVPPGGKPIILLADAQTTGGYPKIATVAAADLGRLAQVRFGSKVKFKIIGLKEATALRRKNQVYLNQIRRITHEAG

SEQ ID NO: 26860 - protein, 671 aa, Neisseria meningitidis
MKSYPDPYRHFEDLDSAETQNFAAEANAETRTRFLNNDKARALSDGILAQLQDTRQIPFCQEHRARMYHFHQDAEYPKGVYRVCTAATYRSGYPGWKILFSVADFDELLGDDVYLGGVSHLVEQPNRALLTLSKSGGDTAYTLEVDLEAGELVEGGFHFPAGKNHVSWRDENSVWVCPAWGERQLTESGYPREVWLVERGKSFEESLPVYQIDKGAMMVNAWRYLDPQGSPIDLIEASDGFYTKTYLQVSSEGEAKPLNLPNDCDVAGYLAGHLLLTLRKDWHRANQSYPSGALVAVKLNRGELGAAQLLFAPDETQALESVETTKRFVVASLLENVQGRLKAWRFADGKWQEVELPRLPSGALEMTDQPWGGDVVYLAASDFTTPLTLFALDLNVMELTVMRRQPQQFDSDGINVQQFWTTSADGERIPYFHVGKNAAPDTPTLVYAYGGFGIPELPHYLGSVGKYWLEEGNAFVLANIRGGGEFGPRWHQAAQGISKHKSVDDLLAVVRDLSERGISSPQHIGLQGGSNGGLITAAAFVREPQSIGALVCEVPLTDMIRYPLLSAGASWTDEYGNPQKYEVCKCRLGELSPYHNLSDGIDYPPALITTSLSDDRVHPAHALKFYAKLRETSAQSWLYSPDGGGHTGNGTQRESADELACVLLFLKEFLG

SEQ ID NO: 26861 - protein, 74 aa, Neisseria meningitidis
MKKNAPKSFEEALSRLESLTQAMQGEMPLEDALAAYQEGNELVRYCQTKLAQVEQKLQVLDADGPKELNLESDE

SEQ ID NO: 26862 - protein, 260 aa, Neisseria meningitidis
MTDILNKILATKAQEVAAQKAAVNTEHIRALAAEAAPVRSFIDSIRGKHRLNLPAVIAEIKKASPSKGLIRPDFRPAEIARAYENAGAACLSVLTDEPYFQGSPEYLKQAREAVSLPILRKDFIIDEYQVYQARAWGADAVLLIAAALEQEQLERFEAVAHELGMTVLLELHDESELEKCRNLTTPLWGVNNRNLRTFEVSLDQTLSLLHALEGKTVVTESGITGKADVEFMRARGVHTFLIGETFMRADDIEAEVGKLF

SEQ ID NO: 26863 - protein, 640 aa, Neisseria meningitidis
MIEIKNLTLQRGLKILLDKANATVNPGQRVGLIGKNGTGKSSLFALLKGEITQDGGDVSIPKNWRLASVSQETPDLDISALDYVLQGDAELQAFQTALRQAEAQNDGMKQAEYHAKLEEIDAYTAPARAAKLLNGLGFSQEEHSRPVKSFSGGWRMRLNLAQALICRADLLLLDEPTNHLDLETVLWLENHLASLPCTQIIISHDRDFLNAATTQTIELSQQKLTQYGGNYDFYQNERAQRLAQQQAAYVKQQAQIKHLQSFIDRFKAKATKAVQAQSRMKALAKLERIAPAHLDSEFSFEFYNPEHLPNPLLKLEHADLGYEGKTVLHDITLSLESGARYGLLGVNGSGKSTFIKALAGKIDLLSGSIVRSEKLNIGYFAQHQLDTIRADQNPVWHIQQLSPEVREQEIRNFLGGFNFVGDMALQKTEPFSGGEKARLALAMIIWQKPNLLLLDEPTNHLDLDMRHALTLALQSFQGALIIVSHDRSLLEATTDSFLLIDKGHLKNFDGDLNDYRQWRLAQENAAAAPAASAQSQSRKDTKRIEAQIRQEKARRGKPIQQKIDRAEKEMAQLSEIQTACEAFLAQEDAYLEANKEKLQNTLSLLAKVKTQLAQIEEVWLACQEELERIETEIEKQFAER

SEQ ID NO: 26864 - protein, 796 aa, Neisseria meningitidis
MTEQKHEEYGADSIQVLEGLEAVRKRPGMYIGDTQDGSGLHHMVFEVLDNAIDEALAGHCDKITVTIHADHSVSVADNGRGMPTGIHPKEGRSAAEVIMTVLHAGGKFDNNSYKISGGLHGVGVSVVNALSDWVTLTIYRDGKEHFVRFVRGETEEPLKVVGDSDKKGTTVRFLASAETFGNVEYSFDILAKRIRELSFLNNGVDIELTDERDGKHESFALSGGVAGFVQYMNRKKTPLHEKIFYAFGEKDGMSVECAMQWNDSYQESVQCFTNNIPQRDGGTHLTALRQVMTRTINSYIEANEVAKKAKVETAGDDMREGLTCVLSVKLPDPKFSSQTKDKLVSGEIGPVVNEVISQALTDFLEENPAEAKIITGKIVDAARAREAARKAREITRRKGVMDGLGLPGKLADCQEKDPALSELYLVEGDSAGGSAMQGRDRKFQAILPLKGKILNVEKARFEKMLASQEVAALITALGAGIGKEEFNAEKLRYHRIIIMTDADVDGAHIRTLLLTFFYRQMPELVERGYIYIAQPPLYKAKYGKQERYLKDELEKDQWLLGLALEKAKIVSDGRTIEGAELADTAKQFLLAKTVIEQESRFVDELVLHAMLHASPIDLTSSENADKAVAELSGLLDEKEVALERIEGHEGHRFIKITRKLHGNVMVSYIEPKFLNSKAYQTLTQTAAALKGMVGEGAKLYKGENGYDADSFETALDILMSVAQKGMSIQRYKGLGEMNPEQLWETTMDPAVRRLLKVRIEDAIAADEVFVTLMGDEVEPRRAFIENNALIAQNIDA

SEQ ID NO: 26865 - protein, 147 aa, Neisseria meningitidis; identical to SEQ ID NO: 2189

SEQ ID NO: 26866 - protein, 499 aa, Neisseria meningitidis
VFKKYQYLALAALCAASLAGCDKAGSFFGADKKEASFVERIEHTKDDGSVSMLLPDFVQLVQSEGPAVVNIQAAPAPRTQNGSGNAETDSDPLADSDPFYEFFKRLVPNMPEIPQEEADDGGLNFGSGFIISKDGYILTNTHVVTGMGSIKVLLNDKREYTAKLIGSDVQSDVALLKIDATEELPVVKIGNPKDLKPGEWVAAIGAPFGFDNSVTAGIVSAKGRSLPNESYTPFIQTDVAINPGNSGGPLFNLKGQVVGINSQIYSRSGGFMGISFAIPIDVAMNVAEQLKNTGKVQRGQLGVIIQEVSYGLAQSFGLDKAGGALIAKILPGSPAERAGLQAGDIVLSLDGGEIRSSGDLPVMVGAITPGKEVSLGVWRKGKEITVAVKLGNASEQTGSSSEPDKAPYAEHQSGTFSVESAGITLQTHTDSSGGHLVVVRVSDAAERAGLRRGDEILAVGQVPVNDEAGFRKAMDKAGKNVPLLVMRRGNTLFIALNLQ

SEQ ID NO: 26867 - protein, 244 aa, Neisseria meningitidis
MSANVSRLVVQNLQKSFKKRQVVKSFSLEIESGEVVGLLGPNGAGKTTSFYMIVGLIAADAGSVTLDGQELRHLPIHERARLGVGYLPQEASIFRKMTVEQNIRAILEIRTKDKNQIDREIEKLLADLNIGHLRRSPAPSLSGGERRRVEIARVLAMKPHFILLDEPFAGVDPIAVIDIQKIIGFLKSRGIGVLITDHNVRETLSICDRAYIISDGAVLASGKPDDLVGNEQVRSVYLGKNFKY

SEQ ID NO: 26868 - protein, 45 aa, Neisseria meningitidis; identical to SEQ ID NO: 645

SEQ ID NO: 26869 - protein, 316 aa, Neisseria meningitidis
MSQHRKLIILGSGPAGYTAAVYAARANLNPVIITGIAQGGQLMTTTEVDNWPADADGVQGPELMARFLAHAERFGTEIIFDQINAVDLQKRPFTLKGDMGEYTCDALIVATGASAKYLGLPSEEAFAGKGVSACATCDGFFYKNQDVAVVGGGNTAVEEALYLANIAKTVTLIHRRSEFRAEKIMIDKLMKRVEEGKIILKLESNLQEVLGDDRGVNGALLKNNDGSEQQIAVSGIFIAIGHKPNTDIFKGQLETDEAGYLKTKGGTADNVGATNIEGVWAAGDVKDHTYRQAITSAASGCQAALDAERWLGSQNI

SEQ ID NO: 26870 - protein, 395 aa, Neisseria meningitidis
MTEDERFAWLQLAFTPYIGAESFLLLLRRFGSASNALSAPAEQVAPAVRHKQAAEAWRNAEKRALARQAAEAALEWEMRDGCRLMLLQDEDFPEMLTQGLTAPPVLFLRGNVRLLHKPSAAIVGSRHATPQAMRIAKDFGKSLGGQNIPVVSGMASGIDTAAHQGALEAEGGTIAVWGTGIDRIYPPSNKNLAYEIAEKGLIVSEFPIGTRPYAGNFPRRNRLIAALSQVTLVVEAALESGSLITAGLAAEMGREVMAVPGSIDNPHSKGCHKLIKDGAKLTECLDDILNECPGLLQNTGASSYSINKDTPDTGSRAVQTAYAPPPAAKMPSEGAAGGTAVGGILDKMGFDPIHPDVLAGQLAMPAADLYAALLELELDGSVAAMPGGRYQRIRT

SEQ ID NO: 26871 - protein, 424 aa, Neisseria meningitidis
MKTLQDWLSHLETAHSGGLIDMGLERTSEVKKRMKLEPQCPVVVVAGTNGKGSVCAYLTQIYKQAGYKTGTLTSPHLLRYNERIAINAEPVSDDTIIASFERIEAARSEISLTYFEFNTLAAVDIFMREQVDVMILEVGLGGRLDAVNAFDGDCAVVTSVDLDHQAFLGDTVEQVGFEKAGMFRSGKPAICGQNPAPESLLSHAEAIGAKLLMVQRDFEFHAMENIQWNYRFRPQHSDDPARNRNALPFPALRGTYQLSNAACTLTVLECLNAKLPVDIGAIKRGLLLVENPGRFQVLPGRPLTVLDVGHNPHAARALRRSLINLAFAQKRTAVFSMLSDKDIDGVLETVKDQFDEWYIAPLDVPRGMTLESLQNKLHEHSIENIQTFAAVREAYRAAASKAGENDRIVVFGSFHTVADVMSVL

SEQ ID NO: 26872 - protein, 145 aa, Neisseria meningitidis; identical to SEQ ID NO: 1767

SEQ ID NO: 26873 - protein, 322 aa, Neisseria meningitidis
MNEKTIILANPRGFCAGVDRAISIVERALEEFGAPIYVRHEVVHNKFVVDNLREKGAVFIEDLAEVPPGATLVYSAHGVSKAVQQEAAERGFRVFDATCPLVTKVHKEVARLDAQDCEIIMIGHKGHVEVEGTMGQLAPGKMLLVETVGDVAKLEVRNPDKLAYVSQTTLSVDETKDIIAALNARFPNIRNPHKEDICYATTNRQTAVKELAEQCDIVIVVGSPNSSNSNRLREVAASRGIDAYMVDNAGYLQRAWFEGKNKVGVTAGASAPEVLVREVLATIRGWGHETVREGEGAEESIVFVLPKELRREGETKPDLCKR

SEQ ID NO: 26874 - protein, 194 aa, Neisseria meningitidis
MPKSPPPKPPPFPSSAKIEVDEEGQINGQTTPSKDKDARWIKKNGLYRLGYKQHTRTDAEGYIEKLHITPANAHECKHLPPLLEGLPKGTTVYADKSYDSAENRQHLEERQLLDGIMRKACRNRPLSEAQTKRNRYLSKTRYVVEQSFGTLHRKFRYARAAYFGLIKVSAQSHLKAMCLNLLKAANRLSAPVAA

SEQ ID NO: 26875 - protein, 922 aa, Neisseria meningitidis
MKSSFRLKPICFYLMGVMLYHHSYAEDAGRAGSEAQIQVLEDVHVKAKRVPKDKKVFTDARAVSTRQDIFKSSENLDNIVRSIPGAFTQQDKSSGIVSLNIRGDSGFGRVNTMVDGITQTFYSTSTDAGRAGGSSQFGASVDSNFIAGLDVVKGSFSGSAGINSLAGSANLRTLGVDDVVQGNNTYGLLLKGLTGTNSTKGNAMAAIGARKWLESGASVGVLYGHSRRSVAQNYRVGGGGQHIGNFGAEYLERRKQRYFVQEGGLKFNSNSGKWERDFQRPYWKTKWYQKYNDPQELQKYIEGHDKSWRENLAPQYDITPIDPSSLKQQSAGNLFKLEYDGVFNKYTAQFRDLNTKIGSRKIINRNYQFNYGLSLNPYTNLNLTAAYNSGRQKYPKGSKFTGWGLLKDFETYNNAKILDLNNTATFRLPRETELQTTLGFNYFHNEYGKNRFPEELGLFFDGPDQDNGLYSYLGRFKGDKGLLPQKSTIVQPAGSQYFNTFYFDAALKKDIYRLNYSTNTVGYRFGGEYTGYYSSEGEFKRAFGENSPTYREHCNPSCGLYEPVLKKYGKKRANNHSVSISADFGDYFMPFASYSRTHRMPNIQEMYFSQIGDSGVHTALKPERANTWQFGFNTYKKGLLKQDDTLGLKLVGYRSRIDNYIHNVYGKWWDLNGDIPSWVSSTGLAYTIQHRNFKDKVHKHGFELELNYDYGRFFTNLSYAYQKSTQPTNFSDASESPNNASKEDQLKQGYGLSRVSALPRDYGRLEVGTRWLGNKLTLGGAMRYFGKSIRATAEERYIDGTNGGNTSNVRQLGKRSIKQTETLARQPLIFDFYAAYEPKKNLIFRAEVKNLFDRRYIDPLDAGNDAATQRYYSSFDPKDKDEEVTCNADKTLCNGKYGGTSKSVLTNFARGRTFLMTMSYKF

SEQ ID NO: 26876 - protein, 468 aa, Neisseria meningitidis
MTAAPDILYRQAAALLEQSNTAQALPLLQQAAEQGYAEAAFVLGNHLLQNGQPEQALSWLEAAAAQRHPKALFSLLQQREHNGTPTGQLLNDYAWLGEQGHSEAQLILMRYHAQRNDPQSLYWAELAAARYAAPAYYHLARHHQRQGDVETAIEQYEKAAALGVTAACWQLGQIYFYGTGVSPNHAQAEHYLEPAAQAGHIAAQTLLADLLAAQRKPEALEWYRRAADKEQAEAQSKLAQYALTGELSERDPFQAARYAKAAAEKNHPEALKIMGDLYRYGLGIKADNHIAHDYYHRAAALGSAAAAQKLISDAALYHPQQYEQIKTAALQQQQTETIYRLAEAQACAIGRPADYNAARKNYMEAAGFHHKNAAAALGRIYHYGLGTAQDPRAAAHWYAIAAEQNHPSAQYHLACFYYHGQGVGCHVPTACYWLQAAIGNGHTSAESLISLLEQWRREAHHAIGQKAV

SEQ ID NO: 26877 - protein, 178 aa, Neisseria meningitidis
VDLREVKLGGETIYEGGFVSISKDKVRLPNGNEGQRIVIRHPGAACVLAVTDDEKIVLVRQWRYAANQATLELPAGKLDVVGEDMAACALRELAEETPYVADSVRLLYSFYTAVGFCNEKMYLFEAEGVRLGSTLANDEDEITETVLMSKEEVRQALANDEIKDGKTLIGLQYWLMKD

SEQ ID NO: 26878 - protein, 318 aa, Neisseria meningitidis
MILTPPDTPFFLRNGNADTIAAKFLQRPAPTYRRELLPDSTGKTKVAYDFSDGISPDAPLVVLFHGLEGSSRSHYAVELMLAVRSRGWHGAVVHFRSCGGIANTAPVFYHLGDTAEIAFTLDTLAARYREIYAVGVSLGGNALAKYLGEQGENALPQAAAVISAPVDAEAAGRRFDSGITRLLYTRYFLRTLIPKARSLQGFQTAFAAGCKTLGEFDDRFTAPLHGFADRHDYYRRTSCKPLLKHVAKPLLLLNAVNDPFLPPEALPTPDEVSEAVTLFQPAHGGHVGFVGSTGGRLHLQWLPQTVLSYFDSFRTNSR

SEQ ID NO: 26879 - protein, 157 aa, Neisseria meningitidis
MTDFSVWETAPFGATVDHILQRYHNVHRAQFEELVPLAQKVAQVHADTFPAEIAGLLAYMQNELLMHMMKEERMLFPMINQGIGRGAAMPISVMMHEHEEHDRAIARLKELTDDFQVPEGACGSWTRLYALAKEMVEDLNDHIHLENDILFARVLDS

SEQ ID NO: 26880 - protein, 127 aa, Neisseria meningitidis; identical to SEQ ID NO: 4145

SEQ ID NO: 26881 - protein, 139 aa, Neisseria meningitidis; identical to SEQ ID NO: 8720

SEQ ID NO: 26882 - protein, 360 aa, Neisseria meningitidis; identical to SEQ ID NO: 1598

SEQ ID NO: 26883 - protein, 237 aa, Neisseria meningitidis
VALVKGDVNTAANAATVAVENNSLLARRRVNIRWTPRQELEHEYAILEIQAITNQIRRLDPKFNGIAIMRNPREPWTRHDVQTYRQYYNQLRESRGIPVLPIYRMRINNGNEFNRIMSSKYPYNELYVANPKSATGYFRVDSYDPATREIISRKFTQFSQIQESTGIGYIKEAVRKYSPGTVISNVPSTPTTIRGRKLEGKLILEVPAQVNPIPQSVLRAAQEENVIIRDTTGRIYK

SEQ ID NO: 26884 - protein, 207 aa, Neisseria meningitidis
MKIIHKGLVEYLPTFEAMKTFNAGRNADTEDELWVVEHPPVFTQGLAGKPEHLLIRDDIPVVQIDRGGQITYHGPGQLVVYTMIDFKRRKTSVRNIVSALENSIIATLAEYGIEAAADPKRPGVYVGERKIASLGLRIKNGSVYHGLALNVNMDLSPFTHINPCGYAGMEMTQIANFVQPCPTPDEVAAKLTAHLETQFTPKADNNE

SEQ ID NO: 26885 - protein, 463 aa, Neisseria meningitidis; identical to SEQ ID NO: 19775

SEQ ID NO: 26886 - protein, 206 aa, Neisseria meningitidis
MTKLYAEIAKREAQDDGTVKVWGYASSEAVDSDGEVIATAAMKAAIPDYMKFDAGREMHGSNAAGTAIEINVEDDGITFFGAHIIDPVVVSKVKTGVYKGFSIGGSVTARDDLNKSQITGLKLTEISLVERPANPDAVSTCFKADKGAEAVNNDTEHNTAYFSHFPSKQKSTGGSRCPFLYRFPYFFTAGSTGLAGPFGAGAPTEA

SEQ ID NO: 26887 - protein, 313 aa, Neisseria meningitidis
MWHGEEMEDEIDYEDLGLILTPEQLAVLEADDGAESAGDTDADGEKAPDAEDAADAPDGGKPETSESDADAREDGSDGGVPDDDADKVIRAKDGKHTIPYEKLVEAREAEKSAKAEAEALRKRIAQLEKGAEKPEVKTADDSGNSLFGDFSDEDMKKGVEKLIQEKLAGYEANLKQQEAAKAHYREIYTAHPDADSIVESRELEEWLAGQNPLVRKAFHDALKDGTAAEVIGAFDLFKAAKSAAEPEKPDEKPDEKPDEKPPVRKNTPNTLSDIPAGRDHTASDSPLDHLSGNALAEKLASMTEEQVEKFLNS

SEQ ID NO: 26888 - protein, 252 aa, Neisseria meningitidis
MITIRNVSYRIGTRPILDNVSLDIPEGGITALVGPNGAGKSTLFSFMARLRPLESGSIAYRGKNLACTPTAELARTLSILTQENSIMSRITVRDLLMFGRYPYHQGRPSENDKTIVEEALAEFHLQDFSDRYLTELSGGQRQRAMIAMVFCQSTDYVLLDEPLNNLDMYHARSLMQILQKLTREHKRTTVAVLHDINQAAAYADHVVAMKNGKVALTGTPEEVFTVHNIKELFDMDVDVLDYEGKKLIVHHI

SEQ ID NO: 26889 - protein, 227 aa, Neisseria meningitidis; identical to SEQ ID NO: 94

SEQ ID NO: 26890 - protein, 399 aa, Neisseria meningitidis; identical to SEQ ID NO: 2328

SEQ ID NO: 26891 - protein, 582 aa, Neisseria meningitidis; identical to SEQ ID NO: 8569

SEQ ID NO: 26892 - protein, 480 aa, Neisseria meningitidis
MHPTYSAVQARLLEANRLSPELLAKSLCIIGAHHVDYADIYCQRTAYESWHLEEGIVKSGSFQINQGVGVRAVSGDKTAFAYADSLCIDSINRSARAVRAIGAAGGKVSAKMPSETRGKPVCSASDPIAGLDSAAKVALLNKVEAIAKAADPRIVQVMAGLTCEYDMVYLARLDGKHAADIRPMVRLNVTVIAKQGERREQGSAGGGGRYDLAYFDENLVHRFVDAAVKQALTNLESRPAPAGEMTVVLGNGWPGVLLHEAVGHGLEGDFNRKGTSVFSGRIGERVAAKGVTVVDQGDIAGRRGSLNIDDEGNETRRTVLIEDGILTGYMQDETNARLTGTQSTGNGRRESYASAPMPRMTNTFMENGSYEPEEIIASIDKGIYAVNFGGGQVDITSGKFVFSASEAWWVEGGRLQYPVKGATIIGNGPEVLKHVSMIGNDTALDSGVGVCGKEGQSVPVGVGQPTLRIDAGLTVGGSAI

SEQ ID NO: 26893 - protein, 250 aa, Neisseria meningitidis; identical to SEQ ID NO: 18054

SEQ ID NO: 26894 - protein, 289 aa, Neisseria meningitidis
MKFIFFVLYVLQFLPFALLHKIADLTGLLAYLLVKPRRRIGEINLAKCFSEWSEEKRKTVLKQHFKHMAKLMLEYGLYWYAPAGRLKSLVRYRNKHYLDDALAAGEKVIILYPHFTAFEMAVYALNQDIPLISMYSHQKNKILDEQILKGRNRYHNVFLIGRTEGLRALVKQFRKSSAPFLYLPDQDFGRNDSVFVDFFGIQTATITGLSRIAALANAKVIPAIPVREEDNTVTLHFYPAWESFPSEDAQADAQRMNRFIEDRVREHPEQYFWLHKRFKTRPEGSPDFY

SEQ ID NO: 26895 - protein, 472 aa, Neisseria meningitidis
MENILSVLVGTVNRFLWDYLLIYALLGIGLFFTLYLGAPQITKLGAGFKSVFGGLFAKGNKDDKSLSQFQALAVAISAQIGTGNVAGVSTAITAGGPGAIFWMWLSAVLGMSTIFAEALLAQKYRVVSHGKYIGGPAFYITHGLTPKIGRGAARFLSGFFSIALIVALGFIGNATQANSIASAVTIAFDVPSLAVGIVLAVLAGMVVIGGVNRIANIAQFVVPFMAVVYILCAVVILFEFSDHIVPMFNHIFTAAFNPEAVLGGAAGIGMREAIRFGVARGLFSNEAGMGSTPHAHATADVKHPVQQGMAAFVGVFIDTILVCTATALIILLTDANLSGEQGAAVTQFAFNKAFPGFGSQLLAVCLTFFALTTIIGWYYFGESNIRFLFRGRHLGIYRALVLLAIVLGTLGKVDLVWSLSDMFNGFMVIPNLIALFLLRKEIRAIYDDYLAQKKAGRDLSYPYEFHEFHDKG

SEQ ID NO: 26896 - protein, 658 aa, Neisseria meningitidis
MNEFSLAPIVVVLLVSVITVILCRKFNIPSMLGYLLVGFLAGPGMLSLIPKSHATDYLGEIGIVFLMFSIGLEFSLPKLRAMRRLVFGLGGLQVGVTMLSVMGILMLTGVPFNWAFAVSGALAMSSTAIVSRILSEKTELGQPHGQMAMGVLLMQDIAVVLLMILIPALAGGGDGNIWAALGLAFAKMLLTLGLLFFVGSKIMSRWFRMVAKRKSSELFMINVLLVTLGVAYLTELEGLSMALGAFVAGMLLSETEYRFQVEDDIRPFRDILLGFFFITVGMKLDIQALIGGWRQVLMLLAMLLVLKALVVFAIAFKMKHSVGDSLKTALYLAQGGEFGFVMLAIAGQLDMVSPEWEQAATAAVLLSMIIAPFLLGGSDALVGRLVKSSWDMKSLDLHSMLVETMSKSDHVLIVGFGRGGQTVGRVLAQEDIPYFALDLDIARVQVARSAGEPVSFGDAKRREVLEAAGLGRAKMVVVTLNNMHETQHVLDNVLSMYPNMPVYVRATNDDYVKTFTDIGAEEAVSDTKETGLVLAGYAMLGNGASYRHVYQTMANIRHSRYAALEGLFVGSDDEAGFGENGETVRHAFPLAAEAYAVGKTVGTLPMAAYGIKLLFVRRRTGRIENPDASFTLEGGDVLVVAGKKEEIISFENWSLQGI

SEQ ID NO: 26897 - protein, 69 aa, Neisseria meningitidis
LLIHYKIPRVRHAPRSAMIGAVSFESAHRDECPRAVPIPVCRLFRIGCRREMTDGYRNGGRRKWEEMTD

SEQ ID NO: 26898 - protein, 512 aa, Neisseria meningitidis
MFHSIEKYRTPAQVLLGLIALTFVGFGVSTVSHPGADYIVQVGDEKISDHSINNAIQNEQADGGGPSRDAVFQSLLQRAYLKQGAKLMGISVSSEQIKQIIVDDPNFHDANGKFDHALLNRYLSQRHMSEDQFVEEIRDQFALQNLVNLVQNGVLVGDAQAEQLIRLTQVNRTIRSHTFNPDEFIAQVKVSEADLQKFYNANKKDYLLPKAVKLEYVALNLKDFADKQTVSETEVKNAFEERVARLPANEAKPSFEQEKAAVENELKMKKAVADFNKAKEKLGDDAFNHPSSLAEAAKNSGLKVETQETWLSRQDAQMSGMPENLINAVFSDDVLKKKHNSEVLTINSETAWVVRAKEVREEKTLPFAEAKDAVRQAYIRTEAAKLAENKAKDVLTQLNGGKAVDVKWSEVSVLGAQQARQSMPPEAYAELLKAKPANGKPAYVRLIGLPAPVIVEVQAVTPPDDIAAQLPLAKQALAQQQSANTFDLLIRYFNGKIKQTKGAQSVDNGDGQ

SEQ ID NO: 26899 - protein, 307 aa, Neisseria meningitidis; identical to SEQ ID NO: 6458

SEQ ID NO: 26900 - protein, 102 aa, Neisseria meningitidis; identical to SEQ ID NO: 1826

SEQ ID NO: 26901 - protein, 172 aa, Neisseria meningitidis; identical to SEQ ID NO: 601

SEQ ID NO: 26902 - protein, 375 aa, Neisseria meningitidis
MNLSARGEFETGPVTHNWSMAFDRVIRQRKTIRGTAAGASKVEVKANGNIENQLASFTADYPNSWENSANLDANIKVNSLALSDTLGFVDNKYRLTLGGRFQAVEYTDKKKSQSGNAKRFSPMLMAAWVPQPDLVVYGNYMEDLEPADIKTDDSGETTMAKPRVSRQFEVGVRKNWGDFVTTLNAFQIKRPGYWRGNTKKGTDFAAYKAAGGADGDEQGMERSRGIEFNAYANLLNKTLRPTFGLMYLQSTVKDYPNSRDMLVNGVQVANPRVIAKAGLEWDTPFAKGLTLNSNVSYFGKSYQDTQKQYAFPSYTLVDVGARYKTKLGKNTLTVSSSVENLFNKNYWQVQRGQYDRSFAVVGLPRTYWLKAELDF

SEQ ID NO: 26903 - protein, 164 aa, Neisseria meningitidis
MKKTLLAIVAVSALSACRQAEEGPPPLPRQISDRSVGHYCSMNLTEHNGPKAQIFLNGKPDQPVWFSTIKQMFGYTKLPEEPKGIRVIYVTDMGNVTDWTNPNADTEWMDAKKAFYVIDSGFIGGMGAEDALPFGNKEQAEKFAKDKGGKVVSFDDMPDTYIFK

SEQ ID NO: 26904 - protein, 210 aa, Neisseria meningitidis
MRKTKTEALKTKEHLMLAALETFYRKGIARTSLNEIAQAAGVTRGALYWHFKNKEDLFDALFQRICDDIENCIAQDAANAEGGSWTVFRHTLLHFFERLQSNDIHYKFHNILFLKCEHTEQNAAVIAIARKHQAIWREKITAVLTEAVENQDLADDLDKETAVIFIKSTLDGLIWRWFSSCERFDLGKTAPRIIGIMMDNLENHPDLRRK

SEQ ID NO: 26905 - protein, 431 aa, Neisseria meningitidis; identical to SEQ ID NO: 6377

SEQ ID NO: 26906 - protein, 441 aa, Neisseria meningitidis
MKKYLFRAALCGIAAAILAACQSKSIQTFPQPDTSVINGPDRPVGIPDPAGTTVGGGGAVYTVVPHLSLPHWAAQDFAKSLQSFRLGCANLKNRQGWQDVCAQAFQTPVHSFQAKQFFERYFTPWQVAGNGSLAGTVTGYYEPVLKGDDRRTAQARFPIYGIPDDFISVPLPAGLRSGKALVRIRQTGKNSGTIDNTGGTHTADLSRFPITARTTAIKGRFEGSRFLPYHTRNQINGGALDGKAPILGYAEDPVELFFMHIQGSGRLKTPSGKYIRIGYADKNEHPYVSIGRYMADKGYLKLGQTSMQGIKSYMRQNPQRLAEVLGQNPSYIFFRELAGSSNDGPVGALGTPLMGEYAGAVDRHYITLGAPLFVATAHPVTRKALNRLIMAQDTGSAIKGAVRVDYFWGYGDEAGELAGKQKTTGYVWQLLPNGMKPEYRP

SEQ ID NO: 26907 - protein, 312 aa, Neisseria meningitidis
VTVGYGFSASGDYSQSKIRANHASVTEQSGIYAGEDGYQIKVGNHTDLKGGIITSTQSAEDKGKNRFSTGTLAGSDIQNYSQYEGKSFGLGASASISGKTLGQGAQNKPQNKHLTSVADKNGASSSVGYGSDSDSQSSITKSGINTQNIQITDEAAQIRLTGKTAAQTKADIDTNVTTDTAERHSGSLKNVFDKDRVQSELDLQRTVSQDFSKNVQQANTEINQHLDKLKADKEAAETAAAEALANGDMETAKHKAHEAQDAAAKADNWQQGKVILNMLASGLAAPTQSGAGIAAATASPAVSYAIGQHFKD

SEQ ID NO: 26908 - protein, 680 aa, Neisseria meningitidis
MMSPETQKQLKITDVSAKKLDKLNLHTAWDLVLHLPLRYEDETHIMPIKDAPIGVPCQVEGEVIHQEVTFKPRKQLIVQIADGSGSVLFLRFIHFYASHQKQTAVGKRIRAVGEIKHGFYGDEMIHPKIRDAEGGGLAESLTPVYPTVNGLNQPTLRRIIQTALDVTPLHDTLPDALLCRLKLPHLAESLRLLHSPPPSFTIHQLSDGTLPAWQRLKFDELLAQQLSMRLARQKRIGGTAAALGGDGTLTQALRQALPFALTDAQEKVVSEICRDMAQTYPMHRLLQGDVGSGKTIVAALSALTAIESGAQVAVMAPTEILAEQHFIKFKQWLEPLGIEVVRLFGSLRKKAKDEAKAKLADGSVKIAVGTHALFSDGVAFHNLGLTIVDEQHRFGVAQRLALKNKGREVHQLMMSATPIPRTLAMSFFADLDVSVIDELPPGRTPIKTRLVNNVRRAEVEGFVLNTCRKGRQAYWVCPLIEESETLQLQTAAETLARLQTALPELNIGLVHGRMKAAEKAEVMARFSSGGLNVLVATTVIEVGVDVPNAALMVIEHAERMGLAQLHQLRGRVGRGAAESVCVLLFAEPLGELAKARLKVIYEHTDGFEIARQDLNIRGPGEFLGARQSGVPMLRFAKLEEDLHLLEQAREIAPILIEQNPEIVEAHLARWLSGREGYLGV

SEQ ID NO: 26909 - protein, 237 aa, Neisseria meningitidis; identical to SEQ ID NO: 13052

SEQ ID NO: 26910 - protein, 168 aa, Neisseria meningitidis
MVDAWSVPDFESKICPPEALAARLALLPRPLVFTNGCFDILHRGHVTYLAQARSMGDALVLALNTDASVRRLGKGGDRPINPLENRAAVAAALESVDLVTWFDGDTPAALIEAVKPEILVKGGDWAADKIVGAAETLARGGQVFSIPFLHQTSTTKTLAKIRAAEGGK

SEQ ID NO: 26911 - protein, 147 aa, Neisseria meningitidis; identical to SEQ ID NO: 5205

SEQ ID NO: 26912 - protein, 208 aa, Neisseria meningitidis
MVIAAIMAMIALPNMSQWIASRRIASHAERIANLLRFSRGEAVRLNLPVYICPVQVKKDGTPNNKCDSGKKGQGMLAFGDKNGNKGYDNDTADVLLRSVVLNDDINDKRINYAFNHIAFGQTQPTADRVVWTFNQNGTFGYSTNQDLTNTSKFVYSDGYIQIVLTDARAVSDADKKFRSAVVLIDSSGRVEVCPRGDRRTRRTMCQYK

SEQ ID NO: 26913 - protein, 366 aa, Neisseria meningitidis
MTRIAILGGGLSGRLTALQLAEQGYQIALFDKGCRRGEHAAAYVAAAMLAPAAEAVEATPEVVRLGRQSIPLWRGIRCRLNTHTMMQENGSLIVWHGQDKPLSSEFVRHLKRGGVADDEIVRWHADDIAEREPQLGGRFSDGIYLPTEGQLDGRQILSALADALDELNVPCHWEHECVPEDLQAQYDWLIDCRGYGAKTAWNASAEHGSTLRGIRGEVARVYTPEITLNRPVRLLHPRYPLYIAPKENHVFVIGATQIESESQAPASVRSGLELLSALYAVHPAFGEADILEIATGLRPTLNHHNPEIRYSRKRRLIEINGLFRHGFMISPAVTAAAVRLAVALFDGKDAPERDEESGLAYIRRQD

SEQ ID NO: 26914 - protein, 621 aa, Neisseria meningitidis
MIEKLTFGLFKKEDARSFMRLMAYVRPYKIRIVAALIAIFGVAATESYLAAFIAPLINHGFSAPAAPPELSAAAGIISTLQNWREQFTYMVWGTENKIWTVPLFLIILVVIRGICRFTSTYLMTWVSVMTISKIRKDMFAKMLTLSSRYHQETPSGTVLMNMLNLTEQSVSNASDIFTVLTRDTMIVTGLTIVLLYLNWQLSLIVVLMFPLLSLLSRYYRDRLKHVISDSQKSIGTMNNVIAETHQGHRVVKLFNGQAQAANRFDAVNRTIVRLSKKITQATAAHSPFSELIASIALAVVIFIALWQSQNGYTTIGEFMAFIVAMLQMYAPIKSLANISIPMQTMFLAADGVCAFLDTPPEQDKGTLAPQRVEGRISFRNVDVEYRSDGIKALDGFNLDIRQGERVALVGRSGSGKSTVVNLLPRFVEPSAGNICIDSIDIADIKLDCLRAQFALVSQDVFLFDDTLFENVRYSRPDAGEAEVLSALQAANLQSLIDSSPLGLHQPIGSNGSNLSGGQRQRVAIARAILKDAPILLLDEATSALDNESERLVQQALERLMENRTGIIVAHRLTTIEGADRIIVMDDGKIIEQGTHEQLMSQNGYYTMLRNISNKDAAVRTA

SEQ ID NO: 26915 - protein, 222 aa, Neisseria meningitidis
MTTHLSNVAPDLQNYLNAIGEPEHPVLMRLREKTGHHRMGKMAIAREQAAVLVWLAKLIRAEKYLEIGVFTGYSSTALALALPKHGRITACDINVSFTDTARQVWNEAGVAHKISLHLQPALLTLDDLIAQGEAGSYDLALIDADKPPTPQYFERCLKLVRQGGIIAIDNILLNGRVMREAASDAPPSVGILKDFNQNLPNDTRIVPITLPVGDGLTLLLKK

SEQ ID NO: 26916 - protein, 83 aa, Neisseria meningitidis
LLLIYKMVIFARGINKNQNKIEFVKIFTFYFMVILYIALITLFRQENFYFNMNIYSIIFIVILFCLTHFFFIIKFYFEVNKNV

SEQ ID NO: 26917 - protein, 163 aa, Neisseria meningitidis; identical to SEQ ID NO: 25444

SEQ ID NO: 26918 - protein, 231 aa, Neisseria meningitidis; identical to SEQ ID NO: 13

SEQ ID NO: 26919 - protein, 242 aa, Neisseria meningitidis
MGGKMSDKKYNVDEGEIAKFSRIADKWWDKSGEFKTLHDINPLRLDYIDGHADLRGKRVLDVGCGGGILAESMARRGAEFVKGIDMAEQSLETARLHAALNNVADIEYECIRVEDLAEAEPHSFDVVTCMEMMEHVPDPAAIVRACANLVKPDGMVFFSTINKNPKSYLHLIVAAEYLLKFVPKGTHDWKKFIAPAELARMCRQAGLDVADTKGMTYHVLSQTYALCDSTDVNYMFACRPAF

SEQ ID NO: 26920 - protein, 511 aa, Neisseria meningitidis; identical to SEQ ID NO: 3843

SEQ ID NO: 26921 - protein, 161 aa, Neisseria meningitidis; identical to SEQ ID NO: 3482

SEQ ID NO: 26922 - protein, 288 aa, Neisseria meningitidis; identical to SEQ ID NO: 2832

SEQ ID NO: 26923 - protein, 43 aa, Neisseria meningitidis; identical to SEQ ID NO: 2340

SEQ ID NO: 26924 - protein, 158 aa, Neisseria meningitidis
MPIEIERRFLIGNDNWRQYADEPLLLRQGYLSVEKERTVRVRIAGQRAWLTLKGYISEISRSEFEYEIPLADAEKMMETMCPFKMEKWRYPVRWNGSLFEVDVFLGENAPLVVAEIELPDENADFDRPDWLGREITADGMFTNAYLSKHPFSSWKNAV

SEQ ID NO: 26925 - protein, 223 aa, Neisseria meningitidis
MQILKAFKFELMPNGAQIRRLKQFCGCSRFVFNRALAYQNEQYEADKSFKFSYNKIANLLPEWKRELTWLKDCHSQVLQQSLEDLESSFKNFFAKRSDFPKFKRKGEKDSFRFPQGFKLEQQNNRIYLPKIGWIRYRNSRAIVGEMKNVTVSRKCGKWYISVQTEFEQKTPQPKGGEIGIDIGIVRFATLSSSEYFEPINAFKNLKGKLAKLQRRLKNKVKFS

SEQ ID NO: 26926 - protein, 260 aa, Neisseria meningitidis
MQETHFSILLDELAAKQEAAIAPHLLADGTKVWIRKAGRHNARWRYALLGMVARYLKLGVLKPVPSLGGEPAIATESKRLYELRAAGIAVPELLAVRKNALMFGNLEGIPLDTQIRQEAEAGKADAWLAGLEAIARVHKKQQFLSQAFARNMMSDGKNISFLDFEDDPSEVLTIAQCQARDWLCYIHSTALILKNGGLLEAAAEKWGGVLSDQPAEIQKLIAATVKPILPIRRLEHPRWGRDALRLAASISLISLADMPP

SEQ ID NO: 26927 - protein, 114 aa, Neisseria meningitidis; identical to SEQ ID NO: 9878

SEQ ID NO: 26928 - protein, 862 aa, Neisseria meningitidis
MKNQYSKSLHGVFYLAFYDKIHAFFAEQLFQLIINMNKKPTYISLFSSAGVGCYGFKTNGFECVATNELLEKRLKIQKYNQKCRFDSGYIAGDITLPETQAKLFAEIRRWNTEIDVVIATPPCQGMSVANHKKNNEMARNSLVVESIKIVREVQPKFFIFENVKAFLNTPCTDTDHQEKPIEEAIWSNLGGHYNILSNVLNFKDYGANSSRTRTLVIGVRKDIHHITPYDIFPKQTPPKTLRTLLADLPPLMQMGEISDDDIYHSYREFDPRMLPWIAQLKEGESAFQNTDPARIPHQIKNGEIIYNQNKNGDKYARWFLDREGPCIHTRNDILASQNTIHPTENRVFSVRELMRMMSIPPSFKWTAQDEKQLNALSFDEKKTFLKKEELNIRHCIGESVPTAVLANVAQNIQAALQQSELSMTEIQNLIKRENLSLADNLYRFIEQHFDAYPFSRLLQIAEYANAARSETAAYFTRIDIAFGLVNALPDFKKKKNLRILEPSVGIGNFIPLLAKKYADKEKVIFDLVDIDSNSLNLLSLLLKKLNLGSKFEFNIIHQDFLTATLPENYDLVIGNPPYGKVKASDKNLALYRKNATNKDTQNIFSFFIDKALTLSKTVALVVPKSVINAPEFQITRQQLITANINRIIDYGEKAFKGVKIETIAFIADQTDKDNQHITIESHIQETLIQNCKNYFFSDNFPYWLIYRNSEFDQIAQKLEFNVFQSFRDRQITKAHTQNSGNVRVLKSRNIGNNEIIDIEGYDSYVDSVAPFSVGKFINRKNVVMIPNLTYKPRAAFLPENSIADGSVALLTMKKHEKILTQRDLAYYATPEFEQFYRVARNYGSRSMNIDNHSVFFFGLLKD

SEQ ID NO: 26929 - protein, 337 aa, Neisseria meningitidis; identical to SEQ ID NO: 1101

SEQ ID NO: 26930 - protein, 344 aa, Neisseria meningitidis
MGACAAFAALVWLVFALGDTLTPFAVAAVLAYVLDPLVEWLQKKGLNRASASMSVMVFSLILLLALLLIIVPMLVGQFNNLASRLPQLIGFMQNTLLPWLKNTIGGYVEIDQASIIAWLQAHTGELSNALKAWFPVLMRQGGNIVSSIGNLLLLPLLLYYFLLDWQRWSCGIAKLVPRRFAGAYTRITGNLNEVLGEFLRGQLLVMLIMGLVYGLGLVLVGLDSGFAIGMVAGILVFVPYLGAFTGLLLATVAALLQFGSWNGILAVWAVFAVGQFLESFFITPKIVGDRIGLSPFWVIFSLMAFGQLMGFVGMLAGLPLAAVTLVLLREGVQKYFAGSFYRGR

SEQ ID NO: 26931 - protein, 129 aa, Neisseria meningitidis; identical to SEQ ID NO: 19870

SEQ ID NO: 26932 - protein, 436 aa, Neisseria meningitidis
MTDLFAREPDAPLAERLRPHTLDDVVGQEHLIGEGKPLRVAVEGGKPHSMLLWGPPGVGKTTLARILAQSFNAQFLPVSAVFSGVKDIRGAIDKAEIALQQGRATILFVDEVHRFNKAQQDAFLPYVESGLLTFIGATTENPSFEVNPALLSRAQVYVLQSLSSDGLKKLIAKVLALPEYRDFTIEADAQELLVNTADGDARRLLNLLEQLLRAADTRRLKTLTAEFLADSLGAQIRRFDKGGESFYNQISALHKSVRGSHPNAALYWFCRMLDGGTDPRYLARRIVRMAWEDIGLADPRALTIANDAAATYERLGSPEGELALAQAVLYLAAAAKSNAGYKAYNQMRRFVAENSSDEVPVHLRNAPTKLMKELGYGREYRYAHDEPNAYAAGESYMPDGLDEPDFYRPVPRGLEIKIGEKLAWLKSLDEEVLKAK

SEQ ID NO: 26933 - protein, 306 aa, Neisseria meningitidis
MTNKPTKRPVNGVLLLDKPEGLSSNTALQKARRLFRAEKAGHTGVLDPLATGLLPVCFGEATKFAQYLLDADKAYTATLKLGEASSTGDAEGEIVATARADISLAEFQTACQALTGDIRQVPPMFSALKHEGKPLYEYARKGIVIERKARDITVYAIDIAEFDAPKAVISVRCSKGTYIRTLSEDIAKHIGTFAHLTALRRAETAGFTIAQSHTLEALANLNETERDSLLLPCDVLVSHFPQTVLNDYAVHMLRCGQRPRFEEDLPSDTPVRVYTETGEFVGLAEYQKEICRLKALRLMNTAASAA

SEQ ID NO: 26934 - protein, 500 aa, Neisseria meningitidis
MAKVLIVPVSAGLDASAAAQAFAKALDAQIFQAVDATAETLLAQGKSDDWFDALVGKVAALDAANLVIEGFAPDADKIYLAGKNVELALSLDAAAVFAVRSDNADADELANRVNLAKQFFAAAPGVLEGFVVDGAAASVAEAAAEKTGLTFFGSSDALKDVSVLAGREAKRLSPAQFRYNLIDFARQADKRIVLPEGAEPRTVQAAAICHEKGIARCVLLAKREEVEAVAKERGISLPDSLEIIDPASLVEQYVEPMCELRKSKGLTPEDARKQLQDTVVLGTMMMAQNDVDGLVSGAVHTTANTIRPALQLIKTAPGASLVSSVFFMLLPNQVLVFGDCAVNPNPTAQQLADIAIQSADSAKAFGIDPKVAMISYSTVNSGSGPDVDTVIEATKLAREKRPDLAIDGPLQYDAATVPGVGKSKAPGSPVAGQATVLVFPDLNTGNCTYKAVQRNANVLSVGPLLQGLRKPVNDLSRGALVEDIVFTIALTAVQAKQMEG

SEQ ID NO: 26935 - protein, 185 aa, Neisseria meningitidis
MNIIDTALPDVKLLKPQVFTDGRGFFMETFRDGWFKTQVCERTFVQENHSKSGKGVLRGLHYQTENTQGKLVRVVVGEVFDVAVDMRKDSPTFGKWVGEILSAENKRQLWVPEGFAHGFYVLSDTTELTYKCTDYYKPEAEHSLIWNDPTVGIGWPLQTAPLLSPKDLAGKTWAQAEKLRLTLSR

SEQ ID NO: 26936 - protein, 562 aa, Neisseria meningitidis
MLNKDQFADNHFIRTFIEEDLKSGKHETIQTRFPPEPNGYLHIGHAKSICLNFGLAYIYDGLCNLRFDDTNPEKENDEYVNAIKEDVEWLGFHWAGEPRFASNYFDQLYDYAVGLVKDGKAYVDDLTPEEMREYRGTLTEAGKNSPYRDRSIEENLDLFTRMKNGEFPDGSKTLRLKIDMASGNINMRDPVIYRIRRAHHHNTGDKWCIYPMYDYTHCISDAIEGITHSLCTLEFEAHRPLYDWVLDNIPAPHATRPRQYEFSRLELLYTITSKRKLNQLVVEKHVSGWDDPRMPTISGMRRRGYTPEGLRLFAKRAGISKSENIVDMSVLEGAIREELENSAPRLMAVLNPLKVTLTNFETGRTQSRRAAFHPNHEEMGDREVPVSQTIYIEADDFAENPPKGFKRLIPGGEVRLRHGYVIKCDEVVKDEAGNVVELKCSIDHDTLGKNPEGRKVKGVIHWVSAEHAAEIKVRLYDRLFTVERPDAVRGEDGEYLPFTDFLNPESVKEITAYAEPAAKDLPAESRWQFERIGYFVTDRKDHGKDTPVFNRTVTLKDSWQPK

SEQ ID NO: 26937 - protein, 114 aa, Neisseria meningitidis; identical to SEQ ID NO: 565

SEQ ID NO: 26938 - protein, 159 aa, Neisseria meningitidis
MSTFFQQTAQAMIAKHIGRFPLLKLDQVIDWQPIEQYLNRQKTRYLRDHRGRPAYPLLSMFKAVLLGQWHSLSDPELEHSLITRIDFNLFCRFDELSIPDYSTLCRYRNWLAQDDTLSELLKLINRQLTEKNLKVEKASAAVVDATIIQTAGSKQRQAR

SEQ ID NO: 26939 - protein, 63 aa, Neisseria meningitidis
MAKIVITIKDEMPVNGLNGVTISYDGDLEPQGELTMAQMTAYNIKKLMDAVEFETAKRLSKAN

SEQ ID NO: 26940 - protein, 153 aa, Neisseria meningitidis
MPDFPPVSRFLADEAATLDLGAAWSSRLNAPLVIYLEGDLGAGKTTLTRGILRGLGHQGAVKSPTYAIVESYPLERFTLHHFDLYRFSFPEEWEDAGLDELFAANSVCLIEWPQQGGEFTPPADITATLTHDGGGRKCLLTAHTERGRESLPL

SEQ ID NO: 26941 - protein, 98 aa, Neisseria meningitidis; identical to SEQ ID NO: 7463

SEQ ID NO: 26942 - protein, 233 aa, Neisseria meningitidis; identical to SEQ ID NO: 8818

SEQ ID NO: 26943 - protein, 350 aa, Neisseria meningitidis; identical to SEQ ID NO: 5151

SEQ ID NO: 26944 - protein, 139 aa, Neisseria meningitidis
MNLVKLLANNRQPIAIIALVGTGLAVSHHQGYKSAFAKQQAVIDKMERDKAQALLLSAQNYARELELARAEAKKYEVKAHAVGMALAKKQAEVSRLKTENKKEIENVLTQDRKNAGGGCIDGFGSHGLQLYKRALGYGN

SEQ ID NO: 26945 - protein, 273 aa, Neisseria meningitidis; identical to SEQ ID NO: 6354

SEQ ID NO: 26946 - protein, 65 aa, Neisseria meningitidis; identical to SEQ ID NO: 127

SEQ ID NO: 26947 - protein, 413 aa, Neisseria meningitidis
MPNKTPSLFGGAMIIAGTVIGAGMLANPTATSGVWFAGSLIVLLYTWFSMLSSGLMILEVNTHYPHGASFDTMVKDLLGRGWNIINGIAVAFVLYLLTYAYIFVGGDLTAKGIGNALGGDVSLTVGQLVFFGILAFCVWASARLVDRFTSVLIGGMVLTFIWATGGLIADAKLPVLFDTQAPTGTNYWIYVATALPVCLASFGFHGNVSSLLKYFKGDAPKVAKSIWMGTLIALVIYVLWQTAIQGNLPRNEFAPVIAAEGQVSVLIETLSKFAQTGNMDKILSLFSYMAIATSFLGVTLGLFDYIADIFKWNDSVSGRTKTAALTFLPPLISCLLFPTGFVTAIGYVGLAATVWTGIIPAMLLYRSRKKFGAGKTYKVYGGLWLMVWVFLFGIINIAAQVLSQMELVPVFKG

SEQ ID NO: 26948 - protein, 110 aa, Neisseria meningitidis; identical to SEQ ID NO: 8460

SEQ ID NO: 26949 - protein, 107 aa, Neisseria meningitidis
MNAFAQALSSALDRCIATNTVAKQNQPVGFLYREAPVFENDSGWRFFSGDETDEYTDDPDNFSIVSLANIAKTNPETAALLSQPEGSAWELAEDGTFQTVADWQPKD

SEQ ID NO: 26950 - protein, 297 aa, Neisseria meningitidis
MIIVMSRRAAEADIAGVVAFIRSRGLREHISHGDERTVIGAIGDDRVLSVREVQTLPEVEKAVRILDTWKTVSRENRAEDSRVAAKGVAFGGGETVRIAAEPSVWRNADAVFLDPFFTSANLYDTSSADEGRGRCRRLAEQTASAHGAGKPVLVRVRNVRHVEAALNAGADILYLGGGLMSDLAVLNEAGSLNIPLVLCKDKHHSAEDWLNAAEYVVSRGNRHLILGESGVLSHTKDHPYRLDVESIVKVRQISHLPVIANITGLWNRDMPQEILYGLAKAAGACGIVGTCFEKSGG

SEQ ID NO: 26951 - protein, 357 aa, Neisseria meningitidis; identical to SEQ ID NO: 3038

SEQ ID NO: 26952 - protein, 321 aa, Neisseria meningitidis; identical to SEQ ID NO: 26363

SEQ ID NO: 26953 - protein, 299 aa, Neisseria meningitidis; identical to SEQ ID NO: 3610

SEQ ID NO: 26954 - protein, 335 aa, Neisseria meningitidis; identical to SEQ ID NO: 26749

SEQ ID NO: 26955 - protein, 109 aa, Neisseria meningitidis; identical to SEQ ID NO: 2743

SEQ ID NO: 26956 - protein, 120 aa, Neisseria meningitidis
MKLPRNRFSLLSALWFAGGIYSLLFKAADTAPPPFPHFDKAAHLALFFAQIWLLTKAFKTGKLPIPYRSLMVFALCFALFSECAQAWFTATRTGSLGDVLADLTGAALALFTARAADRPD

SEQ ID NO: 26957 - protein, 153 aa, Neisseria meningitidis
VSGEQTLETAALMCEIPQTTARAWKRADKEKGDDWDKMRAAYTLAGGGIEDLSRAMLAGFMVQYNSTMTMLQDSSTEDLPPSDRAKLLASLTDAFTKTVSANARVMPETSKLATALELIEFLMAFVQEKHPKHLPVFVEVLEPFGAEVEKKFG

SEQ ID NO: 26958 - protein, 308 aa, Neisseria meningitidis
MKVIFAGTPDFAAAALRAVAAAGFEIPLVLTQPDRPKGRGMQLTAPPVKQAALELGLRVEQPEKLRNNAEALQMLKEVEADVMVVAAYGLILPQDVLDVPKHGCLNIHASLLPRWRGAAPIQRAIEAGDAETGVCIMQMDAGLDTGDVVSEHRYAIQPTDTANEVHDALMEIGAAAVVADLQQLQSKGRLNAVKQPEEGVTYAQKLRKEEARIDWSESAAVIERKIRAFNPVPAAWVEYQGKPMKIRRADVVAQQGTAGEVLSCSADGLVVACGENALKITELQPAGGRRMNIAAFAAGRHIEAGTKL

SEQ ID NO: 26959 - protein, 324 aa, Neisseria meningitidis; identical to SEQ ID NO: 24794

SEQ ID NO: 26960 - protein, 226 aa, Neisseria meningitidis
MERYKNAVGEDKAAELYLLNLSLSRELFHVVSIFEIVLRNKIDICLQQAFKDRNWLYNSIQPQTNPALKYQGCFLRNGTKESAELIKVALSKIQNNSGGKFDHNQLVAGLGFGFWRYLFAGGKDAQFDATGKVLMKVFPKKPKSTPSVQYNQKWIFRELSNINNFRNRLAHHEPICFKGAIKDTNYARNIHQSIFELLNYMDVDTASVFSHFSDQVIAVCDEIDKL

SEQ ID NO: 26961 - protein, 291 aa, Neisseria meningitidis; identical to SEQ ID NO: 6524

SEQ ID NO: 26962 - protein, 313 aa, Neisseria meningitidis; identical to SEQ ID NO: 14222

SEQ ID NO: 26963 - protein, 429 aa, Neisseria meningitidis
MMNSILTVSENRMRKPRITHLDVWANDERIGTLEKGAMYRFTYDNPGSPLLGLHYQDRGKVYISNNMPHIFAQYFPEGFLDAHITSKYAFHDAPFEDNEMLRLAILGRETLGRIHVRCNDPLFNEWIDGLEMKNPRILTERDLLGINARQVFQQYMAEIFHHGRFVSVSGIQQKMSLDAISRNTKQTASYIAKGFDASEYPCLAANEFLCMQTIKQAGIPVAQTSLSEDSSVLLVRRFDVSEQEYFLGMEDFTSLRQYSAEDKYKGSYAAIAQIIRQISGRPDEDLIHFFNQLAASCILKNGDAHLKNFSVLYHDEYDVRLAPTYDVLDTSIYRIGTQGIFDAYDDTLALNLTNHGKKTYPSKNTLLDFAEKYCDLGREDASFMIDTIVQAKEQVLVKYSDVLRENEWLAQKWHFIPDENEEGLPFTFR

SEQ ID NO: 26964 - protein, 89 aa, Neisseria meningitidis
MMTESHGYLSNNLPVKIINDIIYATQLVEDLVLGKIKIVDFLKSYNNFYCWLGFDELPQSEKIKFLSYLNILSIHKEIQDETVNRVYTY

SEQ ID NO: 26965 - protein, 82 aa, Neisseria meningitidis
LVFWLQRLKYPLLLWIADMLLYRLLGGAEIECGRCPVPPMTDWQHFLLAMGTVSAWVAVIWAYLIIESEKTEDIESFGHNAV

SEQ ID NO: 26966 - protein, 65 aa, Neisseria meningitidis
MPSEKIYYGVLIFLCIASMLLSPFFYAGALKPKKAALRKDEQWKLILLSNAVAAAVLAWVWWKWF

SEQ ID NO: 26967 - protein, 718 aa, Neisseria meningitidis
MSVFRINMTAATVLAALSSSVFAAQTADLETVHIKGQRSYNAIVTEKNGDYSSFAVTVGTKIPASLREIPQSVSIITNQQVKDRNVDTFDQLARKTPGLRVLSNDDGRSSVYARGYEYSEYNIDGLPAQMQSINGTLPNLFAFDRVEVMRGPSGLFDSSGEMGGIVNLVRKRPTKAFQGHAAAGFGTHKQYKAEADVSGSLNSDGSVRGRVMAQTVGASPRPAEKNNRHETFYAAADWDINPDTVLGAGYLYQQRHLAPYNGLPADANNKLPSLPQHVFVGADWNKFKMNSHDVFADLKHYFGNGGYGKVGMRYSDRDADSNYAFAGSKLGMKTPAGRPGCNTADDKACAVGLGTEIKQKALAFDASYSRPFRLGNTANEFVIGADYNRFRSTNEQGRTTLYARGGLALNEFRSIPQVDLIANARKGVRGYSHTVATENLDEFGIYGKSTFHPADGLSLIGGGRLGHYKIESGEGKTLHKASKTKFTGYAGAVYDLNDNNSLYLSLSQLYTPQTNLDADGKLLKPRQGNQFEVGYKGSYMDDRLNARVSFYRMKDKNAAAPLNPNNKKTRYAALGKRVMEGVETEISGAVTPKWQIHAGYSYLHSQIKTASNSRDDGIFLLMPKHSANLWTTYQVTPELTIGGGVNAMSGITSSAGMHAGGYATFDAMAAYRFTPKLKLQINADNIFNRHYYARVGGANTFNIPGSERSLTANLRYSF

SEQ ID NO: 26968 - protein, 456 aa, Neisseria meningitidis
MPQNTLNIVILAAGKGTRMYSKMPKVLHEIGGETMLGRVIDTAAALNPQNICVVVGHGKEQVLDTVKRDVVWVEQTEQLGTGHAVKTALPHLSAEGRTLVLYGDVPLIDVETLETLLEAAGNEVGLLTDVPADPTGLGRIIRDSSGSVTAIVEEKDADAAQKAVKEINTGILVLPNAKLEAWLNSLSSNNAQGEYYLTDLIAKAVADGIKIHPVQVRSSHLAAGVNNKLQLAELERIFQTEQAQELLKAGVTLRDPARFDLRGRLKHGQDVVIDVNCIFEGKIELGDNVEIGANCVIKNAKIGANSKIAPFSHLEGCEVGENNQIGPYARLRPQAKLADDVHVGNFVEIKNAAIGKGTKANHLTYIGDAEVGSKTNFGAGTIIANYDGVHKHKTVIGDEVRIGSNCVLVAPVTLGNKVTTGAGSTITRNVEDNKLALARARQTVIEGWVRPEKDKQ

SEQ ID NO: 26969 - protein, 421 aa, Neisseria meningitidis; identical to SEQ ID NO: 12264

SEQ ID NO: 26970 - protein, 461 aa, Neisseria meningitidis
MMARDNRIQMFPHEWRASTTLSGVYALRMLGMFLVLPVLAVYAASLPGAEDNKTLVGLAMGIYGLTQALLQLPLGIASDKFGRKKTIYVGLIVFAAGSFLAAAADTLPMLVAARAIQGAGAVSAAVTALLADLTRDGVRTRAMAMIGLSIGLTFSVSLVVAPVIADAVGVRGLFLLTGILTVASIGVVAWMTPDPEVSKLHEDTQAQPSRIGEVLKNRRLLTLDFGIFALHAAQMALFTALPFAMTQLGLEKIQHWKVYLPSTITGLVVMVPLIIVGETRNKLKQVFILGIACIAAAQLGLLSGMRSVGLITAYLVVYFIGFNVLEASLPSMVSKIAPSDLKGTAMGVYNTMQSLGLFAGGAAGGLLFQKYGFSGVFAFCSILMLLWLVIAVLSPAPKPVKNLSYPVGGVWQVNRDGLQRALLQLEGVEDIGFSFDGQTVYLKVLQKGFDQAAAEKIITGV

SEQ ID NO: 26971 - protein, 618 aa, Neisseria meningitidis
MLNKIFSWFESRIDPYPEAAPKTPEKGLWRFVWSSMAGVRKWIAALAALTAGIGIMEALVFQFMGKIVEWLGKYAPAELFAEKGWELAAMAAMMVFSVVWAYAASNVRLQTLQGVFPMRLRWNFHRLMLNQSLGFYQDEFAGRVSAKVMQTALALRDAVMTVADMVVYVSVYFITSGVILASLDSWLLLPFIGWIVGFASVMRLLIPKLGQTAAWQADARSLMTGRITDAYSNIATVKLFSHGAREAAYAKQSMEEFMVTVRAQMRLATLLHSCSFIVNTSLTLSTAALGIWLWHNGQVGVGAVATATAMALRVNGLSQYIMWESARLFENIGTVGDGMATLSKPHTILDKPNALPLKVSQGEIKFEHIDFCYEAGKPLLNGFNLTIRPGEKVGLIGRSGAGKSTIVNLLLRFYEPQSGTVSIDGQDISGVTQESLRAQIGLVTQDTSLLHRSVRDNIIYGRPDATDAEMVSAAERAEAAGFIPELSDAKGRRGYDAHVGERGVKLSGGQRQRIAIARVMLKDAPILLLDEATSALDSEVEAAIQESLDKMMDGKTVIAIAHRLSTIAAMDRLVVLDKGRIIEEGTHAELLEKRGLYAKLWAHQSGGFLNEHVEWQHD

SEQ ID NO: 26972 - protein, 321 aa, Neisseria meningitidis; identical to SEQ ID NO: 3510

SEQ ID NO: 26973 - protein, 291 aa, Neisseria meningitidis; identical to SEQ ID NO: 8637

SEQ ID NO: 26974 - protein, 133 aa, Neisseria meningitidis; identical to SEQ ID NO: 2967

SEQ ID NO: 26975 - protein, 117 aa, Neisseria meningitidis; identical to SEQ ID NO: 6607

SEQ ID NO: 26976 - protein, 248 aa, Neisseria meningitidis; identical to SEQ ID NO: 2041

SEQ ID NO: 26977 - protein, 85 aa, Neisseria meningitidis; identical to SEQ ID NO: 539

SEQ ID NO: 26978 - protein, 159 aa, Neisseria meningitidis
MPESIFKQISLDILKLHRDSVYSLLATSGCNCQVHEAAYVNIDGKYYIALSCEPEVGEVKTGILLIEDESRNLRLSWVGSARELDCKDNAYKRALSALSRKMGRCKDKLHTAVQPFLLELVPEKGRFSVGDEEVWISRNDLVRALYPVGYSMRQAVLQI

SEQ ID NO: 26979 - protein, 160 aa, Neisseria meningitidis
MKYLNLAAITLAATFAAHTASADELAGWKDNTPQSLQSLKAPVRIVNLWATWCGPCRKEMPAMSKWYKAQKKGSVDMVGIALDTSDNIGNFLKQTPVSYPIWRYTGANSRNFMKTYGNTVGVLPFTVVEAPKCGYRQTITGEVNEKSLTEAVKLAHSKCR

SEQ ID NO: 26980 - protein, 141 aa, Neisseria meningitidis
LWLLRALTAKLPQQRYAALFITLFFAAVLVFGRHDSMYWYPVLVNLMMLAVFGGSLFAGQTVIEKLARLQQPDLPEKAVRYTRRVTQVWCVFFIANGTLAALLARLGRYDWWAVYTGVIAYVLMGMPFAGEWLYRKLVLKV

SEQ ID NO: 26981 - protein, 167 aa, Neisseria meningitidis; identical to SEQ ID NO: 6368

SEQ ID NO: 26982 - protein, 354 aa, Neisseria meningitidis
MLVLGIESSCDETGVALYDTERGLRAHCLHTQMAMHAEYGGVVPELASRDHIRRLVPLTEGCLAQAGASYGDIDAVAFTQGPGLGGALLAGSSYANALALALGKPVIPVHHLEGHLLSPLLAEEKPDFPFVALLVSGGHTQIMAVRGIGDYALLGESVDDAAGEAFDKTAKLLGLPYPGGAKLSELAESGRFEAFVFPRPMIHSDDLQMSFSGLKTAVLTAVEKVRAENGADDIPEQTRNDICRAFQDAVVDVLAAKVKKALLQTGFRTVVVAGGVGANRKLRETFGNMTVQIPTPKGKPKHPSEKVSVFFPPMAYCTDNGAMIAFAGAMHLGKGREVGAFNVRPRWPLSEIVR

SEQ ID NO: 26983 - protein, 242 aa, Neisseria meningitidis; identical to SEQ ID NO: 1183

SEQ ID NO: 26984 - protein, 171 aa, Neisseria meningitidis
MMILKTAPLKRRFAAMLYEMLLVGAATCLAALIAGIAAIFLNPVSIAVSAWVTSILIMESWWLYFRANWHGQGQTLAMRTWRIGLCDVNGMQPSLHLLRLRFIWACIFIVFIPMLAYAGLRHFLGIPPKGAAGAALIWLILPWGFALLNPDRQFLYDFLAGTRLVAVKGKP

SEQ ID NO: 26985 - protein, 131 aa, Neisseria meningitidis; identical to SEQ ID NO: 22183

SEQ ID NO: 26986 - protein, 285 aa, Neisseria meningitidis
MNYALDALWWKLTSQPVRDLASLLTAPPLWQSGCELGVRELLGERGFRYLLTLDADPAPLTEHLTRRAPFGHRLGIYAEELLAFWFANAPHAELLAHNLTVSGSDGNTQGAADFVARLNGKPYHIELTCKYYGGGTGRPEDMSGLDPKDTLLGKAAKLTAQLGLPHTSDGIRTLRQHGLPLDVKPVSIVRGIGFFPHGFHAFEPPLNPYGWRDVYIQDWAEYGFKRQEVRYHLLDRMAYLAPARVAETETLNATEIRRIDQGLIAVLECRPDGFWHEIERIMKAV

SEQ ID NO: 26987 - protein, 128 aa, Neisseria meningitidis; identical to SEQ ID NO: 567

SEQ ID NO: 26988 - protein, 59 aa, Neisseria meningitidis; identical to SEQ ID NO: 23106

SEQ ID NO: 26989 - protein, 386 aa, Neisseria meningitidis; identical to SEQ ID NO: 3047

SEQ ID NO: 26990 - protein, 517 aa, Neisseria meningitidis
MTQANRVIIFDTTLRDGEQSPGAAMTKEEKIRVARQLEKLGVDIIEAGFAAASPGDFEAVNAIAKTITKSTVCSLSRAIERDIRQAGEAVAPAPKKRIHTFIATSPIHMEYKLKMKPKQVIEAAVKAVKIAREYTDDVEFSCEDALRSEIDFLAEICGAVIEAGATTINIPDTVGYSIPYKTEEFFRELIAKTPNGGKVVWSAHCHNDLGLAVANSLAALKGGARQVECTVNGLGERAGNASVEEIVMALKVRHDLFGLETGIDTTQIVPSSKLVSTITGYPVQPNKAIVGANAFSHESGIHQDGVLKHRETYEIMSAESVGWATNRLSLGKLSGRNAFKTKLADLGIELESEEALNAAFARFKELADKKREIFDEDLHALVSDEMGSMNAESYKFISQKISTETGEEPRADIVFSIKGEEKRASATGSGPVDAIFKAIESVAQSGAALQIYSVNAVTQGTESQGETSVRLARGNRVVNGQGADTDVLVATAKAYLSALSKLEFSAAKPKAQGSGTI

SEQ ID NO: 26991 - protein, 300 aa, Neisseria meningitidis
MDSLMTLISVLIPMFAGFFIRVPKPYLPALDKVLSVLVYAVLLLIGVSLSRVEDLGSRLDDMALTVLWLFVCTVGTNLLAFAVLGKLFPWRIKGKGKGVSVGVSGSVGQLGCVLLGFASGKLMRDIWMPSESAGMYCLMLLVFLIGVQLKSSGLSLRQVLVNRRGIRLSVWFMLSSLSGGLLFAASADGVSWTKGLAMASGFGWYSLSGLVMTEAYGAVWGSIMLLNDLARELFALAFIPLLMKRFPDAAVGVGGATSMDFTLPVIQGAGGLEVVPVAVSFGVVVNIAAPFLMVVFSTLG

SEQ ID NO: 26992 - protein, 321 aa, Neisseria meningitidis; identical to SEQ ID NO: 5601

SEQ ID NO: 26993 - protein, 277 aa, Neisseria meningitidis
MPQALVLQFPSAEALPSDFPSRLPEPDCADEKRMRFIIEEGFSLSEKDAALLGSRQIDHAVLSDMDFGELGLIVSDMDSTLITIECVDEIAAGVGLKDKVAEITERSMRGELDFEQSLRSRVALLAGLDEQILADVYENVLKLSPGAEFLLDECKRHDVKFLLVSGGFTFFTERLQQRLGFEYQHANVLEIENGRLTGRLKGRIIDAQAKADLLREYRSRLGLQPHQVLAVGDGANDIPMLKETGIGVAYRAKPKVRAAADVCINFGGLERVRGLFR

SEQ ID NO: 26994 - protein, 207 aa, Neisseria meningitidis; identical to SEQ ID NO: 1673

SEQ ID NO: 26995 - protein, 81 aa, Neisseria meningitidis
LYCLRLRRLVLIFVNPLYLHQFHETQVGSVKQLIAHFDRLIDELDKQIDDHTHTHFDGKAQVAEQIKGIGSITTATLGARG

SEQ ID NO: 26996 - protein, 942 aa, Neisseria meningitidis
MMDEKLNFSYLFGSNAPYIEELYEAFLENPDAVDEKWKQYFTDLSKQPGTVAVDVAHTPIRESFVTLAKKKIASAVVGGADEAMLKKQVSVLRLISAYRIQGVGAAQLDPLKRIPPRDIEALDPKFHGLSDADMALQFNMGEGDFANRGKLPLSQIISNLKQTYCGHIALEYIYIPNTEERRWVRNYFESVLSTPHYNADQKRRILKEMTAAETLERYLHTKYVGQKRFGVEGGESAIAGLNYLIQNAGKDGVEEVIIGMAHRGRLNVLVNILGKKPGDLFAEFEGRAEIKLPSGDVKYHMGFSSDIATPHGPMHVSLAFNPSHLEIVNPVVEGSTRAKQKRLGENGRDKVLPVLIHGDSAFIGLGVNQATFNLSKTRGYTTGGTVHIVINNQIGFTTSDIRDTRSTVHCTDIAKMVSAPVIHVNGDDPERVCFAIQAALDYRKKFHKDIVIDVVCYRKWGHNEGDDPTLTQPMMYKKVSQHPGARALYTEQLIAEGVVTQAEADGYIQAYRDALDKGEHVEQTTLSNFQRTQIDWSKYQGKDWREHIETGLPAADIERLTEKFTAVPEGFALHPTAKRVIEARKAMASGKQAIDWGMAETLAYASLVTKGHGVRISGEDSGRGTFSHRHAVLHDQKREKWDDGTYVPLRHMGEGMGEFLVIDSILNEEAVMAFEYGFACSAPDKLTIWEAQFGDFANGAQVTIDQFLSSGETKWGRLCGLTTILPHGYDGQGPEHSSARVERWLQLCSENNMQVIMPSEASQMFHLLQRQVLGSYRKPLVIFMSKRLLRFKGAMSPLENFTEGSTFRPVIGDTAERASNDSVKRVVLCAGQVYYDLEAGRAERKLEDDVAIVRVEQLYPFPYDEVKAELAKYPNAKSVVWAQEEPKNQGAFYQIRHRIEDVISEEQKLSYAGRPSSASPAVGYSSKHIAQLKQLVEDALAL

SEQ ID NO: 26997 - protein, 88 aa, Neisseria meningitidis
LGRIRRYLGRKQPKTCVWVSAVGRDRNFAKVSIFLSTSSHSNQTKAVHRHTHVGSTAGQTTIRSGGDTTLKGAQLIGIGIQADPQLQP

SEQ ID NO: 26998 - protein, 548 aa, Neisseria meningitidis
MSEEKLKMSFEPTVIEHLGVKMYSHTVPAIAELIANAYDACATEVEVRLFDKPEHKIVIKDNGIGMSFDEINDFYLRIGRNRREEKQASPCGRIPTGKKGLGKLALFGLGNKIEISTIQGNERVTFTLDYAEIRRSKGIYQPEFRKESVESNIESGTTITLTELTKKQGYPLDNYVEHLSRLFDFPAQDFKIKVSLNGSEPKIIDGNLKYDLVTPQFEWEYQDLATNISSLSSKFEQYEYSGLIQGKFITTEKPLKNNMKGITLFANGRMVNMPEFFTDSESSHFYSYLTGWLNVDFIDNDDEDLIATDRTSLDWKHSKTSKLRVFLGEIVRAIGQDWRKRRKKEKDDEVKGESGVDIEDWKNKLPEKEREPVEVILNRLEDSELTNKEQAEVISALHSIIPEYPYYHWRHLHQDLHTACNDFYNEKKDYLSAAIEAVKVFEDKVQKQTGLHSIDGRELIEQAFGSKNSILLLTNNKTKAEQNLEDGLEQLACGTWTGFRNPVQHELRANLSPSIFNDKDALDLISLVSYLLRKVEQTKKRSKVVSSK

SEQ ID NO: 26999 - protein, 284 aa, Neisseria meningitidis; identical to SEQ ID NO: 1842

SEQ ID NO: 27000 - protein, 908 aa, Neisseria meningitidis
MGQNLTAPDGAPTGALYGVLNMLRRLRSEYPHDYCAVVFDAKGKNFRHQMFEEYKATRPPMPDDLRPQAEALPDLVRLTGWPVLVIGQVEADDVIGTLAKQGAEHGLRVIVSTGDKDMAQLVDERVTLVNTMSGETLDIEGVKAKFGVRPDQIRDYLALMGDKVDNVPGVEKCGPKTAVKWLEAYGSLQGVMEHASEIKGKVGENLRAALPRLPLSYDLVTIKTDVDLHAELSDGIESLRRTAPKWAQLVVDFKRWGFRTWLKEAESNMNTGSTDDVFGSDSIGEQAALNAEMPSEKQAEKATAPERLDYQAVTTEAQFAALLDKLSRANTIGIDTETTSLDAMNASLVGISIAFQAGEAVYIPVGHSLTAAPEQLDLQDVLGRLKPHLGNPALKKIGQNLKYDQHVFANYGIALNGIAGDAMLASYIIESHLGHGLDELSERWLGLETITYESLCGKGAKQIGFADVAIGQATEYAAQDADFALRLEAHLRAQMDEKQLEMYEKMELPVAQVLFEMERNGVQIDRAELARQSAELGAELMKLEQQAYAAADQPFNLNSPKQLQEILFDKMGIPTKGLKKTAKGGISTNEAVLEQLAPDYPLPKIILQNRSLAKLKSTYTDKLPEMISPKDGRVHTTYAQAVAITGRLASNNPNLQNIPIRTAEGRRVRRAFTAPQGSVIVSADYSQIELRIMAHLSGDKTLIAAFQNGEDVHRRTAAEVFGTAPENVSSEQRRYAKTINFGLIYGMGQYGLAKSLGIDNLSAKNFIDRYFARYPGVAEYMQRTKEQAAAQGYVETLFGRRLYLPDIRNKNANARAGAERAAINAPMQGTASDLIKRAMIDVRNCLSDGIGSKLVMQVHDELVLEVVETELDFVKEKLPQIMAKVDGGLLDVPLVAEVGVGENWEEAH

SEQ ID NO: 27001 - protein, 278 aa, Neisseria meningitidis
MDKERILTPAVVFSVALLHLAMVALLWQAHKLPVIESGNVIEFVDLGDFGGGDGAPEGAGAPAAPEPQPEPEPPKPVEPPKPVLKPVVTKKADADIQQPKEEPKPEEKPKPEEKPKPEPKPEAKPVPKPAEKPVEKPSEKPAEHPGNASAKADSEQGNGEETGTKGDGTGRGEGSGKGSGGVKGEHGEGAGSSKGNPLRANGSIPRPAYPTLSMENDEQGTVVLSVLVSPGGHVESVKIVKSSGFSRLDNAARKAAQNGHFQANAWTEFKVPVKFELN

SEQ ID NO: 27002 - protein, 398 aa, Neisseria meningitidis
MQNYLTPNFAFAPMIPERASGSRVWDTEGREYIDFSGGIAVNALGHCHPALADALNAQMHKLWHISNIYTTRPAQELAQKLVANSFADKVFFCNSGAEANEAALKLARKYARDRFGGGKSEIVACINSFHGRTLFTVSVGGQPKYSKDYAPLPQGITHVPFNDIAALEAAVGEQTCAVIIEPIQGESGILPATAEYLQTARRLCDQHNALLILDEVQTGMGHTGRLFAYEHYGVVPDILSSAKALGCGFPIGAMLATETIAAAFQPGTHGSTFGGNPMACAVGSRAFDIINAPETLHNVRSQGQKLQTALLDLGRKTGLFSQVRGMGLLLGCVLDEAYRGRASEITAAALKHGVMILVAGADVLRFAPSLLLNDEDTAEGLRRLEHALTEFAATSDNP

SEQ ID NO: 27003 - protein, 447 aa, Neisseria meningitidis
MNQNHTILQNLPIGQKVGIAFSGGLDTSAALLWMKLKGALPYAYTANLGQPDEDDYNAIPKKAMEYGAENARLIDCRAQLAHEGIAAIQCGAFHVSTGGIAYFNTTPLGRAVTGTMLVSAMKEDDVNIWGDGSTYKGNDIERFYRYGLLTNPALKIYKPWLDQQFIDELGGRHEMSEFLIANGFNYKMSVEKAYSTDSNMLGATHEAKDLEFLNSGIKIVKPIMGVAFWDENVEVSPEEVSVRFEEGVPVALNGKEYADPVELFLEANRIGGRHGLGMSDQIENRIIEAKSRGIYEAPGMALFHIAYERLVTGIHNEDTIEQYRINGLRLGRLLYQGRWFDSQALMLRETAQRWVAKAVTGEVTLELRRGNDYSILNTESPNLTYQPERLSMEKVEGAAFTPLDRIGQLTMRNLDITDTRVKLGIYSQSGLLSLGEGSVLPQLGNKQ

SEQ ID NO: 27004 - protein, 99 aa, Neisseria meningitidis; identical to SEQ ID NO: 1110

SEQ ID NO: 27005 - protein, 347 aa, Neisseria meningitidis
MQVNIQIPYILPRCVRAEDTPYACYLKQLQVTKDVNWNQVQLAYDKWDYKQEGLTGAGAAIIALAVTVVTSGAGTGAVLGLNGAAAAATDAAFASLASQASVSFINNKGDVGKTLKELGRSSTVKNLVVAAATAGVADKIGASALNNVSDKQWINNLTVNLANAGSAALINTAVNGGSLKDNLEANILAALVNTAHGEAASKIKQLDQHYIVHKIAHAIAGCAAAAANKGKCQDGAIGAAVGEILGEALLDGRDPGSLNVKDRAKIIAKAKLAAGTVAALSKGDVNAAANAAAVAVESNALSKERMDKLTKCLSGKTCSTTMEKVNAIKKDEQFSKVIDTEIQKSLF

SEQ ID NO: 27006 - protein, 318 aa, Neisseria meningitidis; identical to SEQ ID NO: 19442

SEQ ID NO: 27007 - protein, 238 aa, Neisseria meningitidis; identical to SEQ ID NO: 3469

SEQ ID NO: 27008 - protein, 283 aa, Neisseria meningitidis; identical to SEQ ID NO: 17266

SEQ ID NO: 27009 - protein, 336 aa, Neisseria meningitidis
MNDNTHTLPPRRLSVAPMLDWTDRHYRYMARQITRNTWLYSEMVNAGAIVYGDKDRFLMFNEGEQPVALQLGGSDPSDLAKAAKAAEEYGYNEVNLNCGCPSPRVQKGSFGACLMNEVGLVADCLNAMQDAVGITVTVKHRIGVDRQTEYQTVADFVGTLRDKTACKTFIVHARNAWLDGLSPKENRDVPPLKYDYVYRLKQEFPELEIIINGGITTNEAIAGHLQHVDGVMVGREAYHNPMVMREWDRLFYGDNHAPIEYADLVQRLYTYSQAQIQAGRGTILRHIVRHSLGLMHGLKGARTWRRMLSNATLLKDNDGGLILEAWEEVERANTRE

SEQ ID NO: 27010 - protein, 310 aa, Neisseria meningitidis; identical to SEQ ID NO: 8806

SEQ ID NO: 27011 - protein, 135 aa, Neisseria meningitidis
MTVWFVAAVAVLIIELLTGTVYLLVVSAALAGSGIIYGLTGSTPAAVLTAALLSALGIWFVHAKTAVGKVETDSYQDLDAGQYVEILRHTGGNRYEVFYRGTHWQAQNTGQEELEPGTRALIVRKEGNLLIIAKP

SEQ ID NO: 27012 - protein, 359 aa, Neisseria meningitidis
MKTLTVHTPSHSYPIFIGNGLLPQAGSLLKPHLGKRAAIITNETVAPLYLHTLQTALDAAGVSHFSIILPDGEAYKNWQTLNLIFDGLMQHRAERKTTLIALGGGVIGDMVGFAAATYQRGAPFIQIPTTLLSQVDSSVGGKTAINHPLGKNMIGAFYQPQAVLADLDTLHTLPARELSAGMAEVIKYGTLGDISFFEWLEQHMPELMALERAPLIQAVYRCCQMKADIVAQDETEQGIRAWLNLGHTFGHAVEAEMGYGVWLHGEAVAAGCVLAARLSEQLGKISAADTARLAALFEAAGLPSAPPVFAFEKWLEHMSHDKKVSGGIMRFIGLNRLGEANITEITDTDILRRTLQPYL

SEQ ID NO: 27013 - protein, 489 aa, Neisseria meningitidis; identical to SEQ ID NO: 1073

SEQ ID NO: 27014 - protein, 245 aa, Neisseria meningitidis; identical to SEQ ID NO: 388

SEQ ID NO: 27015 - protein, 87 aa, Neisseria meningitidis; identical to SEQ ID NO: 205

SEQ ID NO: 27016 - protein, 284 aa, Neisseria meningitidis; identical to SEQ ID NO: 506

SEQ ID NO: 27017 - protein, 425 aa, Neisseria meningitidis
MAYGDPQAMMKQAAGLFAMHMQRNSTLNRLAGKMPAGTAGAEATLRKQTTQHMPIVRCQDLTRGMGDEIRFNLVNPVSALPIMGDNTAEGKGVGMSLSEAGLRVNQARFPVDGGGTMTNQRSPADYRALMRPVAQSLMDRYADQTLLVHMAGARGFHNNIEWGVPLAGDPKFNDYVVNPVKAPSKNRHFVASGGAVTGVAAKGGELKIASTDLFTMDTVDSMRTVLDQIPLPPPIVKFEGDKAASDSPLRVWLLSPAQYNRFAADPKFRQLQASAIARASQANQNPLFLGEAGLWNGFILVKMPRPIRFYAGDEMKYCADKFSEAESGLKIPASFADKFAVDRSVILGGQAVLEAFANTGKHGGMPFFWSEKELDHGNRVETLIGTIRGVAKTRFAVDVGEGEKEITDYGATVVDTVVPLQGGIR

SEQ ID NO: 27018 - protein, 116 aa, Neisseria meningitidis; identical to SEQ ID NO: 4624

SEQ ID NO: 27019 - protein, 275 aa, Neisseria meningitidis
MKPDIYALLERALLSGDPDEKGRLTDEAFAAVQNADGAETNAPPADFPRAGRPDKPVLVAPSQLTPRKMNTTEGYAAMLHAIAHIEFNAINLALDAAYRFRTLPFQFVRDWVKVAKEEVCHFRLMRDRLRAFGFDYGSFEAHNHLWDMAYKTAYDPLLRMALVPRVLEARGLDVTPGIRAKVEQRGDSETCGVLDIIYRDEVGHVAIGNHWYQHLCRERGLEPVALFRSLIARYDMFIFRGHVNIEAREKAGFSRFELDMLEDFEQGLKQNKNTV

SEQ ID NO: 27020 - protein, 128 aa, Neisseria meningitidis; identical to SEQ ID NO: 605

SEQ ID NO: 27021 - protein, 335 aa, Neisseria meningitidis
MSTFFQQTAQAMIAKHIDRFPLLKLDQVIDWQPIEQYLNRQKTRYLRDHRGRPAYPLLSMFKAVLLGQWHSLSDPELEHSLITRIDFNLFCRFDELSIPDYSTLCRYRNWLAQDNTLSELLKLINRQLTEKGLKIEKASAAVIDATIIQTAGSKQRQAIEVDEEGQISGQTTPSKDSDARWIKKNGLYKLGYKQHTRTDVEGYIEKLHITPANAHECKHLPPLLEGLPKGTTVYADKGYDSAENRQHLEERQLLDGIMRKACRNRPLSETQTKRNRYLSKTRYVVEQSFGTLHRKFRYARAAYFGLIKVSAQSHLKAMCLNLLKAANRLSAPAAA

SEQ ID NO: 27022 - protein, 758 aa, Neisseria meningitidis
MAQTTLKPIVLSILLINTPLLAQAHETEQSVGLETVTVVGKSRPRATSGLLHTSTASDKIISGDTLRQKAVNLGDALDGVPGIHASQYGGGASAPVIRGQTGRRIKVLNHHGETGDMADFSPDHAIMVDTALSQQVEILRGPVTLLYSSGNVAGLVDVADGKIPEKMPENGVSGELGLRLSSGNLEKLTSGGINIGLGKNFVLHTEGLYRKSGDYAVPRYRNLKRLPDSHADSQTGSIGLSWVGEKGFIGVAYSDRRDQYGLPAHSHEYDDCHADIIWQKSLINKRYLQLYPHLLTEEDVDYDNPGLSCGFHDDDNAHAHTHSGRPWIDLHNKRYELRAEWKQPLPGFEALRVHLNRNDYRHDEKAGDAVENFFNNQTQNARIELRHQPIGRLKGSWGVQYLQQKSSALSATSEAVKQPMLLDNNVQHYSFFGVEQAEWDNFTLEGGVRVEKQKASIRYDKALIDRENYYNHPLPDLGAHRQTARSFALSGNWYFTPQHKLSLTASHQERLPSTQELYAHGKHVATNTFEVGNKHLNKERSNNIELALGYEGDRWQYNLALYRNRFGNYIYAQTLNDGRGPKSIEDDSEMKLVRYNQSGADFYGAEGEIYFKPTPRYRIGVSGDYVRGRLKNLPSLPGREDAYGNRPFIAQDDQNAPRVPAARLGFHLKASLTDRIDANLDYYRVFAQNKLARYETRTPGHHMLNLGANYRRNTRYGEWNWYVKADNLLNQSVYAHSSFLSDTPQMGRSFTGGVNVKF

SEQ ID NO: 27023 - protein, 335 aa, Neisseria meningitidis
MSTFFQQTAQAMIAKHIDRFPLLKLDQVIDWQPIEQYLNRQKNRYLRDHRGRPAYPLLSMFKAVLLGQWHSLSDPELEHSLITRIDFNLFCRFDELSIPDYSTLCRYRNWLAQDDTLSELLELINRQLTEKGLKIEKASAAVVDATIIQTAGSKQRQAIEVDEEGQISGQTTPSKDSDARWIKKNGLYKLGYKQHTRTDAEGYIEKLHITPANAHECTHLSPLLEGIAEGTTVYADKGYDCAENRQHLKEHQLPDGIMRKACRNRPLTEAQTKRNRYLSKTRYVVEQSFGTLHRKFCYVRAAYFGLIKVSAQSHLKAMCLNLLKAANRLSAPAAA

SEQ ID NO: 27024 - protein, 260 aa, Neisseria meningitidis
LQKVVRHIAQTEIMPRFLNTPSHRKEDGSMLSEADIAAQTAFAAALPLLIDSPMLGEEMSRQEQSALWEQYSGEKGLWIVDPIDGTNNFVNGLPHFAVSVAFVRNGRAELGVIYNPVSGECFYAERGQGAFLNGTRLPLRLVDKKLNEAIAGVEIKYLRSGKLSSRMSTLAPFGTVRSMGSSTLDWCYLACGRYDVYVHGGQKLWDYAAGALIFEEAGGRLTTLEGDGFWSGEHVFKRSVVAALEPKLFERWVGWIRENQ

SEQ ID NO: 27025 - protein, 1392 aa, Neisseria meningitidis
MSYSFTEKKRIRKSFAKRENVLEVPFLLATQIDSYAKFLQLENAFDKRTDDGLQAAFNSIFPIVSHNGYARLEFVHYTLGEPLFDIPECQLRGITYAAPLRARIRLVILDKEASKPTVKEVRENEVYMGEIPLMTPSGSFVINGTERVIVSQLHRSPGVFFEHDKGKTHSSGKLLFSARIIPYRGSWLDFEFDPKDLLYFRIDRRRKMPVTILLKALGYNNEQILDIFYDKETFYLSSNGVQTDLVADRLKGETAKVDILDKEGNVLVAKGKRITAKNIRDITNAGLTRLDVEPESLLGKALAADLIDSETGEVLASANDEITEELLAKFDINGVKEITTLYINELDQGAYISNTLRTDETAGRQAARVAIYRMMRPGEPPTEEAVEQLFNRLFFSEDSYDLSRVGRMKFNTRTYEQKLSEAQQNSWYGRLLNETFAGAADKGGYVLSVEDIVASIATLVELRNGHGEVDDIDHLGNRRVRSVGELTENQFRSGLARVERAVKERLNQAESENLMPHDLINAKPVSAAIKEFFGSSQLSQFMDQTNPLSEVTHKRRVSALGPGGLTRERAGFEVRDVHPTHYGRVCPIETPEGPNIGLINSLSVYARTNDYGFLETPYRRVIDGKVTEEIDYLSAIEEGRYVIAQANADLDKDGNLIGDLVTCREKGETIMATPDRVQYMDVATGQVVSVAASLIPFLEHDDANRALMGANMQRQAVPCLRPEKPMVGTGIERSVAVDSATAIVARRGGVVEYVDANRVVIRVHDDEATAGEVGVDIYNLVKFTRSNQSTNINQRPAVKAGDVLQRGDLVADGASTDLGELALGQNMTIAFMPWNGYNYEDSILISEKVAADDRYTSIHIEELNVVARDTKLGAEDITRDIPNLSERMQNRLDESGIVYIGAEVEAGDVLVGKVTPKGETQLTPEEKLLRAIFGEKASDVKDTSLRMPTGMSGTVIDVQVFTREGIQRDKRAQSIIDSELKRYRLDLNDQLRIFDNDAFDRIERMIVGQKANGGPMKLAKGSEITTEYLAGLPSRHDWFDIRLTDEDLAKQLELIKVSLQQKREEADELYEIKKKKLTQGDELQPGVQKMVKVFIAIKRRLQAGDKMAGRHGNKGVVSRILPVEDMPYMADGRPVDIVLNPLGVPSRMNIGQILEVHLGWAAKGIGERIDRMLKEQRKAGELREFLNKLYNGSGKKEDLDALTDEEIIELASNLRKGASFASPVFDGAKESEIREMLNLAYPSDDPEVEKLGFNDSKTQITLYDGRSGEAFDRKVTVGVMHYLKLHHLVDEKMHARSTGPYSLVTQQPLGGKAQFGGQRFGEMEVWALEAYGAAYTLQEMLTVKSDDVNGRTKMYENIVKGEHKIDAGMPESFNVLVKEIRSLGLDIDLERY

SEQ ID NO: 27026 - protein, 162 aa, Neisseria meningitidis
MTPLFRKAVWLLFAVSVCAFAGSLAAQYVLGMEPCVLCISQRLCVLATALCAAIVLMCRPRRKAGGLFGAVFISIPAVTGISVAAYQLWLQSLPPGTAPSCGAPWTFRLKGWPLFDWFEPVVRGFGNCAEPDYLLGIALPVWSVAYFLAVVLTVWWAWARAK

SEQ ID NO: 27027 - protein, 402 aa, Neisseria meningitidis; identical to SEQ ID NO: 13595

SEQ ID NO: 27028 - protein, 281 aa, Neisseria meningitidis
MNKFSQSGKGLSGFFFGLILATVIIAGILFYLNQSGQNAFKIPASSKQPAETEILKPKNQPKEDIQPEPADQNALSEPDAATEAEQSDAEKAADKADEVEEKAGEPEREESDGQAVRKKVLTEEREQTVREKAQKKDAETVKKQAVKPSKETEKKAPKEEKKAEKEKVAPKPTPEQILNSGSIEKARSAAAKEVQKMKTSDKAEATHYLQMGAYADRRSAEGQRAKLAILGISSKVVGYQAGHKTLYRVQSGNMSADAVKKMQDELKKHEVASLIRSIESK

SEQ ID NO: 27029 - protein, 1328 aa, Neisseria meningitidis
MSVVLPLRGVTALSDFRVEKLLQKAAALGLPEVKLSSEFWYFAGSEKALDAATVEKLQALLAAQSVEQTPKAREGLHLFLVTPRLGTISPWASKATNIAENCGLAGIERIERGMAVWLEGALTDEQKQQWAALLHDRMTESVLPDFQTASKLFHHLESETFSSVDVLGGGKEALVKANTEMGLALSADEIDYLVENYQALQRNPSDVELMMFAQANSEHCRHKIFNADFILNGEKQPKSLFGMIRDTHNAHPEGTVVAYKDNSSVIEGAKIERFYPNAAENQGYRFHEEDTHIIMKVETHNHPTAIAPFAGAATGAGGEIRDEGATGKGSRPKAGLTGFTVSNLNIPDLKQPWEQDYGKPEHISSPLDIMIEGPIGGAAFNNEFGRPNLLGYFRTFEEKFDGQVRGYHKPIMIAGGLGSIQAQQTHKDEIPEGALLIQLGGPGMLIGLGGGAASSMDTGTNDASLDFNSVQRGNPEIERRAQEVIDRCWQLGGKNPIISIHDVGAGGLSNAFPELVNDAGRGAVFKLRDVPLEEHGLTPLQIWCNESQERYVLSILEKDLDTFRAICERERCPFAVVGTATDDGHLKVRDDLFANNPVDLPLNVLLGKPPKTTRTDKTVAPYATEGNPFGKKPFNAGDIDITEAAYRVLRLPAVAAKNFLITIGDRSVGGMTHRDQMVGKYQTPVADCAVTMMGFNTYRGEAMSMGEKPTVALFDAPASGRMCVGEAITNIAAVNIGDIGNIKLSANWMAACGNEGEDEKLYRTVEAVSKACQALDLSIPVGKDSLSMKTVWQDGEEKKSVVSPLSLIISAFAPVKDVRKTVTPELKNVEDSVLLFIDLGFGKARMGGSAFGQVYNNMSGDAPDLDDTSRLKAFYNVIQQLVAEDKLLAYHDRSDGGLFAVLVEMAFAGRCGLDIDLNLLLAQTFITNHTALSQSLRTEEVKALAEWQETIARTLFNEELGAVIQVRKQDVADIINLFYQQQLHHNVFEIGTLTDENTLIIRDGQTHLISDNLIKLQQTWQETSHQIQRLRDNPACADSEFALIGDNGRSALFANLKFDVNEDIAAPFINSGAKPKIAILREQGVNGQIEMAAAFTRAGFDAYDVHMSDLMAGRIHLADFKMLAACGGFSYGDVLGAGEGWAKSILFHPALRDQFAAFFADPDTLTLGVCNGCQMVSNLAEIIPGTAGWPKFKRNLSEQFEARLSMVHVPKSASLILNEMQGSSLPVVVSHGEGRADFALHGGNISADLGIALQYVDGQNQVTQTYPLNPNGSPQGIAGITNADGRVTIMMPHPERVYRAAQMSWKPEGWTELSGWYRLFAGARKALG

SEQ ID NO: 27030 - protein, 512 aa, Neisseria meningitidis
MNMLGALAKVGSLTMVSRVLGFVRDTVIARAFGAGMATDAFFVAFKLPNLLRRVFAEGAFAQAFVPILAEYKETRSKEAAEAFIRHVAGMLSFVLVIVTALGILAAPWVIYVSAPGFAKDADKFQLSIDLLRITFPYILLISLSSFVGSVLNSYHKFSIPAFTPTFLNVSFIVFALFFVPYFDPPITALAWAVFVGGILQLGFQLPWLAKLGFLKLPKLNFKDAAVNRVMKQMAPAILGVSVAQISLVINTIFASYLQSGSVSWMYYADRMMELPGGVLGAALGTILLPTLSKHSANQDTEQFSALLDWGLRLCMLLTLPAAVGMAVLSFPLVATLFMYREFTLFDAQMTQHALIAYSFGLIGLIMIKVLAPGFYARQNIKTPVKIAIFTLICTQLMNLAFIGPLKHAGLSLAIGLGACINAGLLFFLLRRHGIYRPGKGWAAFLAKMLLSLAVMGGGLWAAQACLPFEWVRAGGMRKAGQLCILIAVGGGLYFASLAALGFRPRHFKRVEN

SEQ ID NO: 27031 - protein, 318 aa, Neisseria meningitidis
MKEFDFIKRYLQTGTDNDVVLGIGDDAAIVRPREGFDLCFSADMLLKDRHFFADVKPEDLAWKVLAVNISDMAAMGAIPRWVLLSAALPELDEVWLKRFCGSFFGLAKKFGVTLIGGDTTKGDMAFNVTIIGELPKGRALRRDAAVAGDDIWVSGRVGMAAAALNCRLKRCVLPDDVFAECEQKLLRPEPRVGLGLALLPFARAAQDVSDGIAQDLGHILTASGVGAEIWADSLPSLSVLKDILPRAQWLSYTLAGGDDYELVFTAPESCRSRVLDAAERCGVPVTRIGKINGGCRLKVLDDGGRELELHSLGFDHFG

SEQ ID NO: 27032 - protein, 436 aa, Neisseria meningitidis; identical to SEQ ID NO: 1523

SEQ ID NO: 27033 - protein, 140 aa, Neisseria meningitidis; identical to SEQ ID NO: 6690

SEQ ID NO: 27034 - protein, 295 aa, Neisseria meningitidis; identical to SEQ ID NO: 3063

SEQ ID NO: 27035 - protein, 741 aa, Neisseria meningitidis
MTSKATIIYTHTDEAPALATQSLLPIVQAFTRHAGIEVKTSDISLSGRILAAFPEYLTEAQRVPDALAELGELVKQPDANVIKLPNISASVPQLTAAIKELQSKGFAVPDYPADPQTDEEKAVRERYDRIKGSAVNPVLREGNSDRRAPKAVKNFAKKNPHSMGAWTKDSKTHVATMQSGDFFHNEQSVTVPDATSVSIVFTDKQGNKKELRAPVALKAGEITDATVMSKKALLAFLAEQVQDAKAKGVLFSLHMKATMMKVSDPIIFGHAVKVFFAPVFEKFGGKLAAAGVNVNNGFGNLLANLDKLDADTRTAVEAEIAAVYAANPDLAMVDSDKGITNLHVPSDVIVDASMPAMIRNSGRMWDKDGKAQDTKAVIPDSSYAGVYQATIDFCREHGAFDPTTMGTVPNVGLMAQAAEEYGSHNKTFEIEADGQVQVIDAAGKVLMQHDVEAGDIWRMCQTKDAPVKDWVQLAVNRARLSNTPAVFWLDENRPHDKSLLAKVKAYLAELDTNGLDIRILAPEEAAKFSLGRLKNGEDTISVTGNVLRDYLTDLFPILELGTSAKMLSIVPLMNGGGMFETGAGGSAPKHVQQFLEENHLRWDSLGEFLALAVSFEHLAQKTGNTKAQVLADTLDAATEKLLLNDKSPKRKAGELDNRGSHFYLTLYWAQELAAQDKDAELKAAFTPLAAALTADEAKIVAELSAVQGKAADIGGYYAANPEKAAQVMRPSVTFNQALNAL

SEQ ID NO: 27036 - protein, 446 aa, Neisseria meningitidis; identical to SEQ ID NO: 17245

SEQ ID NO: 27037 - protein, 296 aa, Neisseria meningitidis
VSEIHQIYWEESGNPDGVPVIFLHGGPGAGASPECRGFFNPDVFRIVIIDQRGCGRSRPYACAEDNTTWDLVADIEKVREMLGIGKWLVFGGSWGSTLSLAYAQTHPERVKGLVLRGIFLCRPSETAWLNEAGGVSRIYPEQWQKFVAPIAENRRNRLIEAYHGLLFHQDEEVCLSAAKDWADWESYLICFEPEEVDEDAYASLAIARLENHYFVNGGWLQGDRAILNNIGKIQHIPTIIVQGRYDLCTPMQSAWALSKAFPEAELRVVQAGHRAFDPPLVDALVQAVEDILPHLL

SEQ ID NO: 27038 - protein, 425 aa, Neisseria meningitidis
MRSSDILIVDDEIGIRDLLSEILQDEGYSVALAENAEEARKLRHQARPAMVLLDIWMPDCDGITLLKEWAKNGQLNMPVVMMSGHASIDTAVEATKIGALDFLEKPISLQKLLSAVENALKHGAAKIETGPVFDKLGNSAAIQEMNREVGAAVKRASPVLLTGEAGSPFETVARYFHKNGTPWVSPARVEYLIDMPMELLQKAEGGVLYVGDIAQYSRNIQAGIAFIVGKAEHRRVRVVASGSRAAGSDGIACEEKLAELLSESVVRIPPLRMQHEDIPFLIQGIACNVAESQKIAPAAFSEEALAALTRYDWPGNFDQLQSVVATLLLEADGQEIGAAAVSSLLGQNVPAEGAEDMVGGFNFNLPLRELREEVERRYFEYHIAQEGQNMSKVAQKVGLERTHLYRKLKQLGIGVSRRAGEKTEE

SEQ ID NO: 27039 - protein, 270 aa, Neisseria meningitidis
MDKIRVVAVQMVSGVSPETNVAAMKRLVARAAEQGADWVLLPEYWVLMGANDTDKLALAEPLGGGRFQTALSETAKECGVVLFGGTVPLQSPEAGKVMNTLLVYGRDGKRTGLYHKMHLFGFSGLGERYAEADTIRAGGEVPHLSAEGVSVAAGICYDVRFPEFFRRQLPFDVLMLPAAFTHTTGKAHWELLLRARAVENQCYVVAAAQGGLHENGRRTFGHSMIVDPWGDVLDVLPEGEGVVTADIDANRLNSVRNRLPALKYRVLDAV

SEQ ID NO: 27040 - protein, 305 aa, Neisseria meningitidis; identical to SEQ ID NO: 5961

SEQ ID NO: 27041 - protein, 335 aa, Neisseria meningitidis
MSTFFQQTAQAMIAKHIDRFPLLKLDQVIDWQPIEQYLNRQKNRYLRDHRGRPAYPLLSMFKAVLLGQWHSLSDPELEHSLITRIDFNLFCRFDELSIPDYSTLCRYRNWLAQDDTLSELLELINRQLTEKGLKIEKASAAVVDATIIQTAGSKQRQAIEVDEEGQVGGQTTPSKDKDARWTKKNGLYKLGYKQHTRTDAEGYIEKLHITPANAHECNHLPPLLEGLPKDTTVYADKGYDSAENRQHLEEHQLQDGIMRKTCRNRPLTETQTKRNRYLSKTRYVVEQSFGTLHRKFRYVRAAYFGLIKVSAQSHLKAMCLNLLKAANRLSAPAAA

SEQ ID NO: 27042 - protein, 135 aa, Neisseria meningitidis
MTYTTAKAAEKIGISAHTLRFYDKEGLLPNIGRDEYGNRCFTDNDLQWLGLLQCLKNTGMSLKDIKRFAECPVIGDDTIEERLSLFENQIENVKCQIAELKRYLDLLEYKLAFYQKAKALGSVKAVNLPQIPETA

SEQ ID NO: 27043 - protein, 265 aa, Neisseria meningitidis; identical to SEQ ID NO: 1691

SEQ ID NO: 27044 - protein, 352 aa, Neisseria meningitidis
MITPQQAIERLISNNELFYDEMTDLMRQIMRGQVLPEQIAAILTGLRIKVETVSEITAAAAVMREFATKVPLENAEGLVDIVGTGGDGAKTFNISTTSMFVAAAAGAKVAKHGGRSVSSSSGAADVVEQMGANLNLTPEQVAQSISQTGIGFMFAPNHHSAMRHVAPVRRSLGFRSIFNILGPLTNPAGAPNQLLGVFHTDLCGILSRVLQQLGSKHVLVVCGEGGLDEITLTGKTRVAELKDGKISEYDIRPEDFGIETRRNLDEIKVANTQESLLKMNEVLDGKEGAARDIVLLNTAAALYAGNVAASLSDGISAAREAIDSGRAKSKKEEFVGFQPQQRCHFLGKMELG

SEQ ID NO: 27045 - protein, 522 aa, Neisseria meningitidis; identical to SEQ ID NO: 739

SEQ ID NO: 27046 - protein, 113 aa, Neisseria meningitidis; identical to SEQ ID NO: 3580

SEQ ID NO: 27047 - protein, 215 aa, Neisseria meningitidis
MKGVYFVSGIDTDIGKTVATGVLAKQLLQQGKSVITQKPVQTGCQNIADDIAVHRKIMGIPMQEADKRRLTMPEIFSYPASPHLAARLDGRALDLDKIRTATQELAAQYEVVLVEGAGGLMVPLTEKLLTIDYIRQQGYPVILVTSGRLGSINHTLLSFAALKQYGIRLYSLVFNHIHDSRDAHIAQDSLNYLKCRLKADFSEAEWMELAKTDAV

SEQ ID NO: 27048 - protein, 161 aa, Neisseria meningitidis; identical to SEQ ID NO: 555

SEQ ID NO: 27049 - protein, 1454 aa, Neisseria meningitidis
MKTTDKRTTETHRKAPKTGRIRFSPAYLAICLSFGILPQAWAGHTYFGINYQYYRDFAENKGKFAVGAKDIEVYNKKGELVGKSMTKAPMIDFSVVSRNGVAALVGDQYIVSVAHNGGYNNVDFGAEGSNPDQHRFTYKIVKRNNYKAGTNGHPYGGDYHMPRLHKFVTDAEPVEMTSYMDGRKYIDQNNYPDRVRIGAGRQYWRSDEDEPNNRESSYHIASAYSWLVGGNTFAQNGSGGGTVNLGSEKIKHSPYGFLPTGGSFGDSGSPMFIYDAQKQKWLINGVLQTGNPYIGKSNGFQLVRKDWFYDEIFAGDTHSVFYEPRQNGKYSFHDNNNGTGKIDAKHEHNSLPNRLKTRTVQLFNVSLSETAQEPVYHAAGGVNSYRPRLNNGENISFIDEGKGELILTSNINQGAGGLYFQGDFTVSPENNETWQGAGVHISEDSTVTWKVNGVANDRLSKIGKGTLHVQAKGENQGSISVGDGKVILDQQADENNKKQAFSEIGLVSGRGTVQLNADNQFNPDKLYFGFRGGRLDLNGHSLSFHRIQNTDEGAMIVNHNQDKESTVTITGNKDIATTGNNNSLDSKKEIAYNGWFGEKDTTKTNGRLNLVYQPAAEDRTLLLSGGTNLNGNITQTNGKLFFSGRPTPHAYNHLNDHWSQKEGIPRGEIVWDNDWINRTFKAENFQIKGGQAVVSRNVAKVKGDWHLSNHAQAVFGVAPHQSHTICTRSDWTGLTNCVEKTITDDKVIASLTNTDISGNVSLADHAHLNLTGLATLNGNLSANGDTRYTVSHNATQNGDLSLVGNAQATFNQATLNGNTSASGNASFNLSDHAVQNGSLTLSGNAKANVSHSALNGNVSLADKAVFHFESSRFTGQISGSKDTALHLKDSEWTLPSGTELGNLNLDNATITLNSAYRHDAAGAQTGSATDAPRRRSRRSLLSVTPPASVESRFNTLTVNGKLNGQGTFRFMSELFGYRSDKLKLAESSEGTYTLAVNNTGNEPASLEQLTVVEGKDNKPLSENLNFTLQNEHVDAGAWRYQLIRKDGEFRLHNPVKEQELSDKLGKAEAKKQAEKDNAQSLDALIAAGRDAVEKTESVAEPARQAGGENVGIMQAEEEKKRVQADKDSALAKQREAETRPATTAFPRARRARRDLPQLQPQPQPQPQRDLISRYANSGLSEFSATLNSVFAVQDELDRVFAEDRRNAVWTSGIRDTKHYRSQDFRAYRQQTDLRQIGMQKNLGSGRVGILFSHNRTENTFDDGIGNSARLAHGAVFGQYGIDRFYIGISAGAGFSSGSLSDGIGSKIRRRVLHYGIQARYRAGFGGFGIEPHIGATRYFVQKADYRYENVNIATPGLAFNRYRAGIKADYSFKPAQHISITPYLSLSYTDAASGKVRTRVNTAVLAQDFGKTRSAEWGVNAEIKGFTLSLHAAAAKGPQLEAQHSAGIKLGYRW

SEQ ID NO: 27050 - protein, 144 aa, Neisseria meningitidis; identical to SEQ ID NO: 1668

SEQ ID NO: 27051 - protein, 404 aa, Neisseria meningitidis
MTVKTPVYLDYAATTPVDKRVAEKMIPYLTETFGNPASNSHAFGWEAEEAVEKARADIAALINADSKEIVFTSGATESDNLAIKGAANFYKTKGKHLITVKTEHKAVLDTMRELERQGFEVTYLGVQENGLIDLEELKAAIRDDTILISVMWANNEIGVVQDIPAIGEICRERKIVFHVDAAQACGKVPVDVEAAKIDLLSMSAHKVYGPKGIGALYVRRKPRVRLEAQMHGGGHERGFRSGTLPTHQIVGMGEAFRIAKEELEQDMAHYRKLRDIFLKGIEGIEEVYINGDLGHRAPNNLNVSFNFVEGESLIMAVKELAVSSGSACTSASLEPSYVLRALGRNDELAHSSLRITFGRMTSEEEVQFAAELIKSKIGKLRELSPLWEMFKDGIDLNSIEWAAH

SEQ ID NO: 27052 - protein, 241 aa, Neisseria meningitidis
MDFLSCWRRIADAPTIRRCVLCHGSSGVSDGICAGCRDDLAAYRTDAANSCPLCFMHVQGGAVCGGCQKKPPAFDRMWASLHYEPPVSNMIHALKHLADLSMVQPLADLMMQNPPDRLADECFDFVLPVPLSRERLLQRGFNQSESIVGLLAQRYGWRTLPLHTVFRRHRPPQSTLKGGERLKNIKNAFEIREPLPKGCNILLIDDVFTTGATLDELAKMLKKSGANRICCWTLARTPMKK

SEQ ID NO: 27053 - protein, 112 aa, Neisseria meningitidis
MKKIEAIVKPFKLDDVREALTEIGITGMTVSEVKGFGRQKGHTEIYRGAEYAVDFLPKIKIELVLADDAVERAIDVIVEVARSGKIGDGKIFVLPVEEAIRIRTGERADAAV

SEQ ID NO: 27054 - protein, 146 aa, Neisseria meningitidis
MNIRRASPSDCAALAALDAVCNPSAWTQRQFESALVSPSEQVFLAEKDGGIAAFIVWQNLPDESELHLIATAPECRRRGVASALLEYWFANLPEGTQRLLLEVRAGNTAAQALYAAHGFSIAGRRKNYYRTADGKTEDAVLMEKIC

SEQ ID NO: 27055 - protein, 644 aa, Neisseria meningitidis; identical to SEQ ID NO: 24244

SEQ ID NO: 27056 - protein, 405 aa, Neisseria meningitidis; identical to SEQ ID NO: 13355

SEQ ID NO: 27057 - protein, 566 aa, Neisseria meningitidis
VQSLKAEGVEYVFGYPGGAVIEIYDALFQLNKFKHILTRHEQAAVHAADAYARVSGKVGVALVTSGPGVTNALTGIATAYTDSIPMVVISGQVGNSLIGTDAFQEVDTVGITRPCVKHNFLVTDINELAETIKKAFQIAASGRPGPVVVDVPKDVTQAMAKFSYPQEDIFIRSYQPVVQGHIGQIKKAVQMLASAKRPVVYFGGGVVLGNASEELTRFVRMTGAPCTGTLMGLGAYPSGDRQFLGMLGMHGTYEANLAMQNADVVLAVGARFDDRVVSVPSKFFEKAKKVIHIDVDPSSIAKRVKVDIPIVGDVKNVLSEMVALWQKQESVPSEDALGKWWKTIEEWRSRDCLWFDNGSEIIKPQYVIQKLAEITGNSAIITSDVGQHQMFAAQYYPFERPRQWLNSGGLGTMGVGLPYAIGAKLAAPDQDVFCITGDGSIQMNIQELSTCFQYRIPVNVITLNNGYLGMVRQWQEIYYGGRESETYFDSLPDFVKLAEAYGHIGIRVDKKSDVEGALLEALNQKDRLVFIDFLTDQKQNVMPMVGNGKGLDEMVLPPHMRADGKA

SEQ ID NO: 27058 - protein, 195 aa, Neisseria meningitidis
MPLPDLTDAELIESRKLLLHFARLQLPDHPDLAEDLVQETLLSAYSAGDNFQGRALVNSWLFAILKNKIIDALRQIGRQRKVFTTLDDELLDEAFESHFSQNGHWTPEGQPQHWNTPEKSLNNNEFQKILQSCLYNLPENTARVFTLKEILGFSSDEIQQMCGISTSNYHTIMHRARESLRQCLQIKWFNQENPK

SEQ ID NO: 27059 - protein, 395 aa, Neisseria meningitidis
MNTLLNQLKPYPFARLREAMQGISAPEGLEAVPLHIGEPKHPTPKVITDALTASLHELEKYPLTAGLPELRQACANWLKRRYDGLTVDADNEILPVLGSREALFSFVQTVLNPVSDGIKPAIVSPNPFYQIYEGATLLGGGEIHFANCPAPSFNPDWRSISEEVWKRTKLVFVCSPNNPSGSVLDLDGWKEIFDLQDKYGFIIASDECYSEIYFDGNKPLGCLQAAAQLGRSRQKLLMFTSLSKRSNVPGLRSGFVAGDAELLKNFLLYRTYHGSAMSIPVQRASIAAWDDEQHVIDNRRLYQEKFERVIPILQQVFDVKLPDASFYIWLKVPDGDDLAFARNLWQKAAIQVLPGRFLARDTEQGNPGEGYVRIALVADVATCVKAAETIVSLYR

SEQ ID NO: 27060 - protein, 214 aa, Neisseria meningitidis
VLASAIDFILHIDQHLLALSAQYGVWIYAILFLIVFCETGLIVTPLLPGDSLLFAAGGIAALGGMDIHLMVALLSLAAILGDALNFTVGKYFGGRLFANPDSKIFRREYLDKTHRFYEKHGGKTIIIARFVPIVRTFAPFVAGMGKMHYAKFIRYNIIGGLLWVILFSYAGYFFANFPVVKNNLGLVMGGIIIVSVLPGAVEIARAKLAVKSKR

SEQ ID NO: 27061 - protein, 247 aa, Neisseria meningitidis
MLSARYLHLHEALGLGPMWLKRGAVVLPSATLPESPTQIRPQKQTVLSIPQRPSEQHTGQARLETMKALETAAVPTRKPAPETETPLSGVSDGIAPVPAASGITKLAVVSLCPPIEDAVYGQLFYGKAGVLLDNILKAVGLDAAYVHKTCWVKTAAVGNPMPSEAAIETATVSVMQELDGCRAPAVLFLGQAFVQPERQTMIETLCGSRPFFIIDHPARLLRQPELKARAWQVLKQLKRALRQGGGS

SEQ ID NO: 27062 - protein, 201 aa, Neisseria meningitidis
MILLHLDFLSALLYAAVFLFLIFRAGMLQWFWASIMLWLGISVLGAKLMPGIWGMTRAAPLFIPHFYLTLGSIFFFIGHWNRKTDGNGWQADPEHPLLGLFAVSNVSMTFAFVGICALVHYCFSGTVQVFVFAALLKLYALKPVYWFVLQFVLMAVAYVHRCGIDRQPPSTFGGSQLRLGGLTAALMQVSVLVLLLSEIGR

SEQ ID NO: 27063 - protein, 75 aa, Neisseria meningitidis; identical to SEQ ID NO: 17033

SEQ ID NO: 27064 - protein, 139 aa, Neisseria meningitidis; identical to SEQ ID NO: 921

SEQ ID NO: 27065 - protein, 451 aa, Neisseria meningitidis
MSDFFHSDVLSVSELNAFAKSILENHLAGLWIAGEVSNLTRAASGHYYFSLKDSRAQVRCAMFKGAAARLAKPLKEGDHIEVSGKISIYEARGEFQITVNEVRLKGLGQLYEAYERLKAQLQAEGAFAAERKKPLPARPQCIGIVTSLAAAALRDVVTTLKRRAPEIPVIVYPTVVQGTGSELQIAQVIKTASQRAECDVLIVCRGGGSIEDLWAFNEEPVVRAIEACTIPVVSGVGHETDFTLADFVADVRAPTPTGAAELVSPNRQESLHRLAQAQGRLKTVLEQRYFDASQKLDWLARQIRHPRQKLDEQRTYIHKLAQTLSYSMTQNLRAHAARFERQTQALQHYRPDISVCKKNIDRFQTALPAAFSQLLARRRQSLSAQAALLEAVSPQHILERGFSVVKNTRGQVIRNADVLKQGQKLHIIFADGETDVRVSKEQGQQDLFDCI

SEQ ID NO: 27066 - protein, 271 aa, Neisseria meningitidis; identical to SEQ ID NO: 1333

SEQ ID NO: 27067 - protein, 83 aa, Neisseria meningitidis; identical to SEQ ID NO: 5051

SEQ ID NO: 27068 - protein, 374 aa, Neisseria meningitidis
MTATTASSAKPYLKIQGLVKKFGDNYAVDNIDLDIYQHEIFALLGSSGSGKSTLLRMLAGMESPNQGKIILDGQDITKLAPYDRPINMMFQSYALFPHMTVEQNIAFGLKQDKMPKGEIAARVEEMLRLVQMTKFAKRKPHQLSGGQQQRIALARSLAKRPKILLLDEPLGALDKKLRQQTQLELVNTLEQVGVTCIMVTHDQEEAMTMATRIAIMSDGQLQQVGTPSDVYDYPNSRFTAEFIGETNIFDGVVIEDHADYAVIECEGLENHVRIDHGLGGPSEQDLWVSIRPEDIDLYKEKPEYLGDYNWAKGTVKEIAYLGSFAIYHIKLANGRVVKSQVPAPYWYVCNITPPTWDETVYISWPENQPTPLFR

SEQ ID NO: 27069 - protein, 334 aa, Neisseria meningitidis
MSGAAAALLAGIILYFKSDKKRQENGEWSSGLEYAYILTAVGVFAALSLFMSFTAVFLIFVVLCGTAWGVYKYRLKTHPEISESSHFGDYFGSFFPTVLVLFLIRSFIAEPFQIPSSSMRPGLIKGDFILVGKFSYGLRVPVLNNVFIPTGKIERGDVVVFNYPLQPEMTYIKRIVGIPGDVVEYRNKVLTVNGKPASDIPDGTYRYPDDTDPSEIHNTDMFHSGLDGKSFNILKKEGQPAVSLPVLGKYTSDIMSENGYSIEQSGLEHCQYADDGSGFVCKVPEGRYFAMGDNRDNSADSRYWGFVDDKLVVGKAMFILMNFGDFGRAGTAIR

SEQ ID NO: 27070 - protein, 167 aa, Neisseria meningitidis
MSDPNLIDPEVFAAEGQNLQGSFLLEELDERVSSHDYPADRQTKISFTLTGGRDRLQRLFLDLNVKADMPLICQRCIKPMPFMLDESSRIVLFSNEESLDESMLADEELEGILIEKELDMRTLVEDQILMSLPFSPRHEDCGDNGTLEEVNRDKPNPFAVLAGLKSS

SEQ ID NO: 27071 - protein, 458 aa, Neisseria meningitidis
MHDKTWSGRFNEPVSELVKQYTASIGFDRRLAEWDIQGSLAHAQMLKETGVLDEGDLADIRRGMAEILEEIRSGKIEWSSDLEDVHMNIERRLTDKIGDAGKRLHTGRSRNDQVATDIRLWLRDQITVIRSLIQSLQTALLDLAEQNAETVMPGFTHLQVAQPVSFGHHMLAYVEMLGRDNERMADCRRRVNRMPLGAAALAGTTYPIRREITAELLGFEQICQNSLDAVSDRDFAIEFTAAASLVMVHLSRLSEELILWMSPRFGFIDIADRFCTGSSIMPQKKNPDVPELVRGKSGRVIGHLIGLITLMKSQPLAYNKDNQEDKEPLFDTADTLIDTLRIYADMMRGVTVKPDNMRAAVMQGFATATDLADYLVKKGMPFRDAHEVVAQAVRHADQAGVDLSELPLEVLQGFSDLIADDVYGVLTPEGSLNARNHLGGTAPEQVRFQVKRWREMLA

SEQ ID NO: 27072 - protein, 213 aa, Neisseria meningitidis; identical to SEQ ID NO: 2169

SEQ ID NO: 27073 - protein, 1067 aa, Neisseria meningitidis
MAKFFIDRPIFAWVISIFIIAAGIFGIKSLPVSQYPSVAAPNITLRATYPGASAQVMEDSVLSVIERNMNGVEGLDYMSTSADSSGSGSVSLTFTPETNEDLAQVEVQNKLSEVLSMLPATVQQYGVTVSKARSNFLMIVMLSSDVQSTEEMNDYAQRNIVPELQRIEGVGQVRLFGAQRAMRIWVDPKKLQNYNLSFADIGSALSAQNVQISAGSIGSLPAVRGQTVTATVTAQGQLGTAEEFGNVILRANTDGSNVYLKDVARVGLGMEDYSSSTRLNGVNTTGMAVMLSNSGNAMATAKAVKERMATLEKYFPQGMSWKTPYDTSKFVEISIEKVIHTLIEAMVLVFVVMYLFLQNIRYTLIPTIVVPISLLGGFAFISYMGMSINVLTMFAMVLVIGIVVDDAIVVVENVERIMAGEGLPPKEATKKAMGQISGAVIGITAVLISVFVPLAMFSGATGNIYKQFALTMASSIAFSAFLALTLTPALCATMLKTIPKGHHEEKKGFFGWFNKKFNSWTHGYEGRVAKVLRKTFRMMVVYIGLAVVGVFLFMRLPTSFLPTEDQGFVMVSVQLPAGATQERTNATLAQVTQLAKSIPEIENIITVSGFSFSGSGQNMAMGFAILKDWNERTAPGSDAVAIAGKLTGMMMGTLKDGFGIAVVPPPILELGNGSGLSINLQDRNNTGHTALLAKRNELIQKMRASGLFDPSTVRAGGLEDSPQLKIDINRAAAAAQGISFADIRTALASALSSSYVSDFPNQGRLQRVMVQADEDARMQPADILNLTVPNKSGVAVPLSTIATVSWENGTEQSVRFNGYPSMKLSASPATGVSTGQAMAAVQKMVDELGGGYSFEWGGQSREEAKGGSQTLILYGLAVAAVFLVLAALYESWSIPLAVILVIPLGLIGAAAGVTGRNLFEGLLGSVPSFANDIYFQVGFVTVMGLSAKNAILIIEFAKDLQAQGKSAVEAALEAARLRFRPIIMTSFAFILGVVPLYIAGGASSASQRAIGTTVFWGMLIGTLLSVFLVPLFYVVVRKFFKETAHEHEMAVKHAAEAGITGSDDSQH

SEQ ID NO: 27074 - protein, 206 aa, Neisseria meningitidis; identical to SEQ ID NO: 4402

SEQ ID NO: 27075 - protein, 260 aa, Neisseria meningitidis; identical to SEQ ID NO: 2560

SEQ ID NO: 27076 - protein, 239 aa, Neisseria meningitidis
MKDDVLKQQAHAAIQKKLGYAFRDISLLRQALTHRSCHTKHNERFEFVGDSILNYTVARMLFDAFPKLTEGELSRLRASLVNEGVLAEMAAEMNVGDGLYLGAGELKSGGFRRPSILADAMEAMFAAVSFDADFNTAEKVVRHLFADRVRCADFQNQAKDGKTALQEALQARRFALPKYRIEEQIGHANDSMFVVSCDLGELGFVCRAKGTSRKAAEQEAAKEALKWLEEKLPLKKKKK

SEQ ID NO: 27077 - protein, 489 aa, Neisseria meningitidis
LALALAVITRRVLLSLGIGILVGVAFLVGGNPVDGLTHLKDMVVGLAWSDGDWSLGKPKILVFLILLGIFTSLLTYSGSNQAFADWAKRHIKNRRGAKMLTACLVFVTFIDDYFHSLAVGAIARPVTDKFKVSRTKLAYILDSTAAPMCVLMPVSSWGASIIATLAGLLVTYKITEYTPMGTFVAMSLMNYYALFALIMVFVVAWFSFDIGSMARFEQAALNEAHDETAVSDGSWGRVYALIIPVLALIASTVSAMIYTGAQASETFSILGAFENTDVNTSLVFGGTCGVLAVVLCTLGTIKTADYPKAVWQGAKSMFGAIAILILAWLISMVVGEMHTGDYLSTLVAGNIHPGFLPVILFLLASVMAFATGTSWGTFGIMLPIAAAMAVKVDPALIIPCMSAVMAGAVCGDHCSPISDTTILSSTGARCNHIDHVTSQLPYALTVAAAAASGYLALGLTKSALLGFGTTGIVLAVLIFLLKDKKLANA

SEQ ID NO: 27078 - protein, 65 aa, Neisseria meningitidis
MKWTDTQRIAEDLYDLHGEDIDPKSLRFTQLRDLIMALPEFDDDPARCGERILEAVQQAWIDEAE

SEQ ID NO: 27079 - protein, 162 aa, Neisseria meningitidis
MTALLVILALALIAAGTAGIVYPALPGLALMFAGTWLLAYSGGYQIYGAGVLWTVGLISLAGILADYVAGIWGTKYTGAGKLAVRGALAGSIIGIFFSLPGLILGPFIGAAAGELIDRRNMLQAGKAGLGTLLGLVVGTAFKIGCAVSILFILLVKYIAYLF

SEQ ID NO: 27080 - protein, 676 aa, Neisseria meningitidis
LTIFSVLLPKKGMKRHFMPKILQQTTLHRFFRANTHHPISPSVLQQAGDLIRWLCFSDGISDFRPCRLKPQNPIGGTVMNTVSNYLSALREAMRAQGLDALVIPSADPHLSEYLPAHWQARRELSGFTGSVGTFVVTADEAGVWVDSRYWEQAAKQLSGSGIELQKSGQVPPYNEWLAANLPENAAVGIPSDMVSLTGKRTLAQSLTAKNIRIEHPNDLLDQVWTSRPALPAETVFIHDPAYVSETAAEKLARVRAVMAEKGADYHLVSSLDDIAWLTNLRGSDVPFNPIFVSFLLIGKDNAVLFTEQCRLNAEAAAALQTAGIAVEPYAQVAGKLAQIGGALLIEPNKTAVSTLVRLPKSVRLIEGINPSTLFKSCKSEADIARIREAMEHDGAALCGFFAEFEDIIGNGGSLTEIDVDTMLYRHRSVRPGFISLSFDTIAGFNANGALPHYSATPESHSTISGNGLLLIDSGAQYKGGTTDITRVVPVGTPTAEQKRDNTLVLKAHIALAEAVFPENIPSPLIDAICRKPLWQAQCDYGHGTGHGVGYFLNVHEGPQRIAFAAPATPETAMKKGMVTSIEPGLYRPGKWGIRIENLAANQAVAAPQETEFGSFLCFETLTLCPIDTRLMDTALMTDGEIDWVNRYHAEVRRRLEPLTEGAAKAWLIKRTEPLAR

SEQ ID NO: 27081 - protein, 199 aa, Neisseria meningitidis; identical to SEQ ID NO: 2856

SEQ ID NO: 27082 - protein, 720 aa, Neisseria meningitidis
MQQKIRFQIEGMTCQACASRIEKVLNKKDFVESAGVNFASEEAQVVFDDSKTSVADIAKIIEKTGYGAKEKTEDTLPQPEAEHHIGWRLWLLFTINVPFLIGMAGMMIGRHDWMIPPLWQFALASVVQLWLAIPFYKSAWASIKGGLANMDVLVTIGTVSIYLYSVYMLFFSPHAAYGMAHVYFEVGVMVIGFVSLGKFLEHRTKKSSLNSLGLLLKLTPTQVNVQRNGEWKQLPIDQVQIGDLIRANHGERIAADGIIESGSGWADESHLTGESNPEEKKAGGKVLAGALMTEGSVVYRATQLGSQTQLGDMMNALSEAQGSKAPIARVADKAAAVFVPAVVGIALLTFIVTWLIKGDWTVALMHAVAVLVIACPCALGLATPAAIMVGMGKAVKHGIWFKDAAAMEEAAHVDAVVLDKTGTLTEGRPQVAAVYCVPDSGFDEDALYRIAAAVEQNAAHPLARAIVSAAQARGLDIPAAQNAQTVVGAGITAEVEGVGLVKAGKAEFAELALPKFLDGVWDIASIVAVSVDNKPIGAFALADALKADTAEAIGRLKKHNIDVYIMSGDNQGTVEYVAQQLGIAHAFGNMSPRDKAAEVQKLKAAGKTVAMVGDGINDAPALAAANVSFAMKGGADVAEHTASATLMQHSVNQLADALLVSQATLKNIKQNLFFAFFYNILGIPLAALGFLNPVIAGAAMAASSVSVLSNALRLKRVKID

SEQ ID NO: 27083 - protein, 282 aa, Neisseria meningitidis; identical to SEQ ID NO: 1323

SEQ ID NO: 27084 - protein, 366 aa, Neisseria meningitidis
MITLKTTPFHQAHQDAGAKLVDFAGWELPIHYGSQIAEHEAVRTDAGMFDVSHMLVTDVAGANAKAFFRKLIANDVAKLAFVGKALYSALLNDNGGVIDDLIVYRTNEAETQYRIVSNGATREKDTAQFHKVGQEFGVSFNPRYDLGMLAVQGPKAIEKLLTVKPEWADVVHNLKPFQGADLGNDWFVARTGYTGEDGVEVILPGTEAVAFFKALQAAGVQPCGLGARDTLRMEAGMNLYGNDMDDDTSPLEAGMGWTVDLKDESRDFVGKAALLALKEKGVAVKQVGLLLGKGGILRAHMEVLTDKGKGETTSGVFSPSLKQSIAIARVPKDFDGDTAKVLIRGKEADVRVLKLPFVRNGQKQFD

SEQ ID NO: 27085 - protein, 311 aa, Neisseria meningitidis
MGHNMMTTQKWYEHITNVIIGNTANFNSGCPESIDYVDEKKGVPLAAMKYILMYTEAAASHAYLFEHDLKKFKQYAYVAGKLGILQSVDDEDPEPFFFPCDMLNIQDPMFLMLMSDSPQLREFLVRNIDNIANDTEAFVNRYDLNRHMIYNTLLMVEGKQLDRLKQRSEKVLAHPTPSKWLQKRLYDYRFFLAFAEQDAEAMKAALEPLFDKKTARMAAKETLSYFDFYLQPQIVTYAKIASMHGFDLGIDQEIAPRDLIVYDPLPADEYQDIFDFMKQYDLSYPYEYLQDWIDYYTFKTDKLVFGNAKRE

SEQ ID NO: 27086 - protein, 222 aa, Neisseria meningitidis
MNHDITFLTLFLLGFFGGTHCIGMCGGLSSAFALQLPPHINRFWLILLLNTGRVSSYTAIGLMLGLIGQVGVSLDQTRVLQNILYTAANLLLLFLGLYLSGISSLAAKIEKIGKPIWRNLNPILNRLLPIKSIPACLAVGILWGWLPCGLVYSASLYALGSGSAATGGLYMLAFALGTLPNLLAIGIFSLQLKKIMQNRYIRLCTGLSVSLWALWKLAVLWL

SEQ ID NO: 27087 - protein, 172 aa, Neisseria meningitidis
MPKLHMFYLGGNAGRSNIEVHDIQFAVCDDYREAVPTLKAAWFGDADKIHIDGWQVVEWADGYDIAVSETPKTEMPSEHAPRLYFANVGGYRAGQLAEAHAFGLFAAATPAEAKQKALQTLLTDSYVQQHKDNLKDVDNLLALDRIGNFHIRLTPNPHGKPAEIGFQGYLPI

SEQ ID NO: 27088 - protein, 265 aa, Neisseria meningitidis
MNRLYPHPIIAREGWPIIGGGLALSLLVSICCGWWSLPFWVFTVFALQFFRDPVREIPQNPEAVLSPVDGRIVVVERARDPYRDVDALKISIFMNVFNVHSQKSPADCTVTKVVYNKGKFVNADLDKASTENERNAVLATTASGREITFVQVAGLVARRILCYTQAGAKLSRGERYGFIRFGSRVDMYLPVDAQAQVAIGDKVTGVKTVLARLPLTAPQIESEPESEPALQTASVETAANPSAEQRQIEAAAAKIQAAVQDVLKD

SEQ ID NO: 27089 - protein, 290 aa, Neisseria meningitidis
VKGLDYCRQKAEESRSSFLSGFRFLTQEKRDAVTVLYAFCRELDDVVDECSNPDVAQATLNWWRGDLDKVFGGAMPEHPVNQALRQVKETFKLPKYELEALIDGMQMDLVRARYGSFEELKLYCRRVAGVVGCLIARILGFSDGKTLEYADKMGLALQLTNIIRDVGEDARRGRIYLPMEEMQRFDVPASVILQCSPTGNFAELMAFQIKRARETYREAVSLLPAADKKAQKVGLVMAAVYYELLNEIDRDGAQNVLKYKIALPSPRKKRIALKTWLFGFKPRPGTPERA

SEQ ID NO: 27090 - protein, 85 aa, Neisseria meningitidis; identical to SEQ ID NO: 15519

SEQ ID NO: 27091 - protein, 212 aa, Neisseria meningitidis; identical to SEQ ID NO: 3536

SEQ ID NO: 27092 - protein, 75 aa, Neisseria meningitidis; identical to SEQ ID NO: 8304

SEQ ID NO: 27093 - protein, 156 aa, Neisseria meningitidis
VQPVAQAVRLLSTSSLLSVATALIEAHGEEMTAPDLIEVNRAMRRRMQAEIAALRAVQTAAAESGGLTANAVYTEAYQTAESLRAAAGRLNALVAAVINQKPPLIVRQAPIDGTIHQIAHEFYGDIARAAELVRLNPHIHHPAFIKRGTLVNSYAK

SEQ ID NO: 27094 - protein, 392 aa, Neisseria meningitidis
MTGRTGRNGSTQAQPERVMLVGVMLDKDGTGSSAARLNGFQTALAEAVELVKAAGGDSVRVETAKRDRPHTALFVGTGKAAELSEAVAADGIDLVVFNHELMPTQERNLEKELKCRVLDRVGLILAIFARRARTQEGRLQVELAQLSHLAGRLIRGYGHLQSQRGGIGMKGPGETKLETDRRLIAHRINALKKQLANLKKQRALRRKSRESGTIKTFALVGYTNVGKSSLFNRLTKSGIYAKDQLFATLDTTARRLYISPECSIILTDTVGFVSDLPHKLISAFSATLEETAQADVLLHVVDAAAPNSGQQIEDVENVLREIHAGDIPCIKVYNKIDLLPSEEQNTGIWRDAAGKIAAVRISVAENTGIDALREAIAEYCAAAPNTDETEMP

SEQ ID NO: 27095 - protein, 354 aa, Neisseria meningitidis
MALVSMRQLLDHAAENSYGLPAFNVNNLEQMRAIMEAADQVDAPVIVQASAGARKYAGAPFLRHLILAAVEEFPHIPVVMHQDHGASPDVCQRSIQLGFSSVMMDGSLLEDGKTPSSYEYNVNATRTVVNFSHACGVSVEGEIGVLGNLETGEAGEEDGVGAAGKLSHDQMLTSVEDAVRFVKDTGVDALAIAVGTSHGAYKFTRPPTGDVLRIDRIKEIHQALPNTHIVMHGSSSVPQEWLKVINEYGGNIGETYGVPVEEIVEGIKHGVRKVNIDTDLRLASTGAVRRYLAENPSDFDPRKYLSKTIEAMKQICLDRYLAFGCEGQAGKIKPVSLEKMANRYAKGELNQIVK

SEQ ID NO: 27096 - protein, 61 aa, Neisseria meningitidis; identical to SEQ ID NO: 1125

SEQ ID NO: 27097 - protein, 610 aa, Neisseria meningitidis
MSEHDMQNTNPPLPPLPPEITQLLSGLDAAQWAWLSGYAWAKAGNGASAGNGASAGLPALQTALPAAEPFSVTVLSASQTGNAKSVADKAADSLEAAGIQVSRTELKDYKAKNIADERRLLLVTSTQGEGEPPEEAVVLHKLLNGKKAPKLDKLQFAVLGLGDSSYPNFCQAGKDFDRRFEELGAKRLLERVDADLDFTASADGWTGRIVARLKEEAAKNRATPAPQTTPPAGLQTAPDGRYCKADPFPAALLANQKITSRQSDKDVRHIEIDLSGSDLHYLPGDALGVWFDNDPALVREILDLLGIDPATEIQAGGKTLPVASALLSHFELTQNTPAFVKGYAPFADDDELDRIAADNAVLQGFVQSTPIADVLHRFPAKLTAEQFAGLLRPLAPRLYSISSSQAEVGDEVHLTVGAVRFEHEGRARAGGASGFLADRLEEDGTVRVFVERNDGFRLPEDSRKPIVMIGSGTGVAPFRAFVQQRAAENAEGKNWLIFGNPHFARDFLYQTEWQQFAKDGFLHRYDFAWSRDQEEKIYVQDKIREQAEGLWQWLQEGAHIYVCGDAAKMAKDVEAALLDVIIGAGHLDEEGAEEYLDMLREEKRYQRDVY

SEQ ID NO: 27098 - protein, 168 aa, Neisseria meningitidis; identical to SEQ ID NO: 5003

SEQ ID NO: 27099 - protein, 526 aa, Neisseria meningitidis
MSVIKRALISLSDKAGAVEFAQTLHKLGVEILSTGGTAKLLADAGVPVIEVADYTGFPEMLDGRVKTLHPKIHGGILGRRDLDEHVAKMEEHGIGNIDLVCVNLYPFAATIAKPNCTLEDAIENIDIGGPTMVRSAAKNWKHVAIVTDTADFPAIAAELEANNGALSDKTRFNLSRKAFSHTAQYDGMISNYLTSLSDDVLSGQPQIGEFPSQFNQSWIKVQDMRYGENPHQRAAFYRDIDPAAGSLSAYKQLQGKELSYNNIADADAAWEAVKSFDAPACVIVKHANPCGVAVAADTLTAYKLAYVTDTTSAFGGIIAFNREVDGETVKQITDNQFMEVLMAPKFTAEALEIAAAKKNVRVLEIPLEAGANRFEFKRVGGGLLVQTPDIHRISRSDLKVVSKRQPTEQEWNDLLFVWNVAKYVKSNAIVFGKGGQTYGIGAGQMSRVDSTRIAARKAQDAGFDLNGACAASDAFFPFRDGVDVIAEQGIKAIIHPAGSMRDQEVFDAADEHGIAMVVTDVRHFRH

SEQ ID NO: 27100 - protein, 365 aa, Neisseria meningitidis
MNHTFTLPDTRPYPQNPIKNHLLLNAYQLAHNSSQASRKLSSGQLQTEIRGMLEQNHYINLSLALTMSPDAGTYAALLSSVNAVLDCEKEGEVQWFALPVVLVSGCKKERAIEMKLPTEALFACLQNYPHLRALTQDTQWLPYLVHSSDLSAVAPDEWWRAKQNTEAAAQHLRRFAPRPLLLPEGQSVHVVYALGFGSGKVQTALGQNLLQAGLPLMQVWQENLASEGVTLFANPLSPDSPVRALSDGSHTRQRMAMDVFAANAIRAVRMQSPRVGVVAAAKVGGQVLFGFNATDGAFEVVPQVFSWQLSFTDNIGVVQQNFLDLMAECRVEHVYLLHNALGEQENIPSYAEALKREGHNPFFSA

SEQ ID NO: 27101 - protein, 119 aa, Neisseria meningitidis; identical to SEQ ID NO: 6994

SEQ ID NO: 27102 - protein, 887 aa, Neisseria meningitidis
MSTQLHDVDPIETQEWLDALSSVLEYEGGERAQYLLENLVKYCRDKGVRMPHGTTTPYLNTVSVENEKGIPGDQNIEHRIRAFVRWNAAAIVLRAGKKDLELGGHIASFQSAATMYEVGFNHFWKAKGEGEEGDLVFFQGHVAPGIYARAFVEGRLTEDQLNNFRQEVDGHGLPSYPHPHLLPDFWQFPTVSMGLGPIMAIYQARFLKYLESRGLAKTKGRKVWCFCGDGEMDEPESQGAIALAAREGLDNLIFVINCNLQRLDGPVRGNGKIIQELEGNFAGAGWNVVKVIWGRRWDRLLAKDKDGILRQRMEECLDGDYQTYKSKDGAYVREHFFNTPELKALVADMTDEQLWALNRGGHDPQKVYNAYDRAANHADGKPTVILAKTIKGYGMGASGEGQNVAHQAKKMDKASLKQFRDRFDIPVTDEQIESGDLPYLTFAPDTEEYKYLHARRDALGGYLPQRKPTQEVLEVPELSAFDAQLKSSGEREFSTTMAFVRILSTLLKDKKIGKRVVPIVPDESRTFGMEGMFRQYGIWNPKGQQYTPQDKDQLMFYKESVDGQILQEGINEPGAMADWIAAATSYANSNFAMIPFYIYYSMFGFQRIGDLAWAAGDMHARGFLLGGTAGRTTLNGEGLQHEDGHSHIQADLIPNCVSYDPTFQYEVAVIVQDGLRRMYANNEDVFYYITLMNENYAHPDMPEGAEQDILKGMYLLKAGGKGDKKVQLMGSGTILQEVIAGAELLKADFGVEADIWSCPSFNLLHRDAIETERFNRLHPLEAEKVPFVTSQLQGHDGPVIAATDYIRSYADRIRAYIPNDYHVLGTDGFGRSDSRANLRRFFEVDRYNVAVAALAALAEQGKVSKETVQQAIEKYGIKADSAPSWKR

SEQ ID NO: 27103 - protein, 65 aa, Neisseria meningitidis; identical to SEQ ID NO: 981

SEQ ID NO: 27104 - protein, 182 aa, Neisseria meningitidis; identical to SEQ ID NO: 2877

SEQ ID NO: 27105 - protein, 152 aa, Neisseria meningitidis
MKTQISLAAAAITLLLSACGNGGAPAQPKGEISENRTAAFKSMMPDFSRMGKMVKGEEPYDVEKFKQAAAAFTESSKKPFTLFESDPNGNGRALPAVWSDGAKFEAEKTKFAAAVEKLNAAAQTGKLDEIKAAYSETGSSCKSCHDSFRAPE

SEQ ID NO: 27106 - protein, 179 aa, Neisseria meningitidis
MNIIDTALPDVKLLKPQVFTDGRGFFMETFRDGWFKTQVCERTFVQENHSKSGKGVLRGLHYQTENTQGKLVRVVVGEVFDVAVDMRKDSPTFGKWVGEILSAENKRQLWVPEGFAHGFYVLSDTTELTYKCTDYYKPEAEHSLIWNDPTVGIDWPLQGEPNLSPKDLAGKVLAEAVTF

SEQ ID NO: 27107 - protein, 224 aa, Neisseria meningitidis; identical to SEQ ID NO: 8175

SEQ ID NO: 27108 - protein, 685 aa, Neisseria meningitidis
MTRKILVTSALPYANGSIHLGHMVEHIQTDVWVRFQKLRGNECHYCCADDTHGTPVMLAAQKQGIAPEDMIAKVREEHLADFTGFGIGYDNYYSTHSPENKQFSQDIYRALKANGKIESRVIEQLFDPEKQMFLPDRFVKGECPKCHTRDQYGDNCEVCGTTYSPTELINPYSAVSGAKPELRESEHFFFKLGECADFLKAWTSGNNPHDGKPHLQPEALNKMKEWLGEGEETTLSDWDISRDAPYFGFEIPDAPGKYFYVWLDAPVGYMASFKNLCDRIGVDFDEYFKADSQTEMYHFIGKDILYFHALFWPAMLHFSGHRAPTGVYAHGFLTVDGQKMSKSRGTFITAKSYLEQGLNPEWMRYYIAAKLNSKIEDIDLNLQDFISRVNSDLVGKYVNIAARASGFIAKRFEGRLKDVADSALLAKLAAESDTIAEQYENREYARALRDIMALADAVNEYVDANKPWELAKQEGQDERLHEVCSELINAFTMLTAYLAPVLPKVAENAAKFLNLEAITWANTRETLGKHAINKYEHLMQRVEQKQVDDLIEANKQSIAAAAAPAAEEGKYEKVAEQASFDDFMKIDMRVAKVLNCEAVEGSTKLLKFDLDFGFEKRIIFSGIAASYPNPAELNGRMVIAVANFAPRKMAKFGVSEGMILSAATADGKLKLLDVDAGAQPGDKVG

SEQ ID NO: 27109 - protein, 433 aa, Neisseria meningitidis
MAIYQSGVIFDQVDTANPDCWTLGEYVKRGGYTALRKILSENISQTDVIDEVKTSGLRGRGGAGFPTGLKWSFMPRSFPGEKYVVCNTDEGEPGTFKDRDIIMFNPHALIEGMIIAGYAMGAKAGYNYIHGEIFEGYQRFEAALEQARAAGFLGKNILGSDFEFKLFAHHGYGAYICGEETALLESLEGKKGQPRFKPPFPASFGLYGKPTTINNTETFSSVPFIIRDGGQAFADKGIPNAGGTKLFCISGHVERPGNYEVPLGTPFAEVLKMAGGMRGGKKLKAVIPGGSSAPVLPADIMMQTNMDYDSISKAGSMLGSGAIIVMDEDVCMVKALERLSYFYYDESCGQCTPCREGTGWLYRIVHRIVEGKGRMEDLDLLDSVGNQMAGRTICALADAAVFPVRSFTKHFRDEFVHYIEHGGPMKEHKWGGW

SEQ ID NO: 27110 - protein, 123 aa, Neisseria meningitidis; identical to SEQ ID NO: 4020

SEQ ID NO: 27111 - protein, 232 aa, Neisseria meningitidis; identical to SEQ ID NO: 1935

SEQ ID NO: 27112 - protein, 112 aa, Neisseria meningitidis
MERKYFHENYLYKKPFIFKKSLDVSCISWKEINELYQRADPTDWQFKFRKGEIIPKEAYVESFNDVGRIRHRFNKTAVYQYLQDGATMVYNRIDNEPFVDSIAKQIAQFAQA

SEQ ID NO: 27113 - protein, 371 aa, Neisseria meningitidis; identical to SEQ ID NO: 8192

SEQ ID NO: 27114 - protein, 87 aa, Neisseria meningitidis; identical to SEQ ID NO: 13703

SEQ ID NO: 27115 - protein, 150 aa, Neisseria meningitidis
MAKPLKYPVSALVVLYSGDGGILLIERTHPKGFWQSVTGSLEPGETVAQTARREVWEETGILLADGQLQDWHDSTVYEIYHHWRHRYPKGVFENREHLFSAEIPRDTPVVLQPEEHVSYGWFDMEEAAEKVFSSSNRCAILELGRFLGKR

SEQ ID NO: 27116 - protein, 123 aa, Neisseria meningitidis; identical to SEQ ID NO: 3099

SEQ ID NO: 27117 - protein, 124 aa, Neisseria meningitidis
MIILHGIPNCDTVKKAKNRLAGYGLEFEFRDFKKQMPSEAEICSWLEQVPLETLLNKRGTSWRKLDAETQQKVLSSTAEAVKLMSEMPSLIKRPVLECGGKVYAGFSEETYDGIFNRQAPCRQG

SEQ ID NO: 27118 - protein, 103 aa, Neisseria meningitidis; identical to SEQ ID NO: 2548

SEQ ID NO: 27119 - protein, 335 aa, Neisseria meningitidis
MSTFFRQTAQAMIAKHIDRFPLLKLDQVIDWQPIEQYLNRQRTRYLRDHRGRPAYPLLSMFKAVLLGQWHNLSDPELEHSLITRIDFNLFCRFDELIIPDYSTLCRYRNWLAQDDTLSELLKLINCQLTEKGLKIEKASAAVVDATIIQTAGSKQRQAIEVDEEGQISGQTTPSKDSDARWIKKNGLYKLGYKQHTRTDAEGYIEKLHITPANAHECKHLSPLLEGLPEGTTVYADKGYDSAENRQHLEEHQLLDGIMRKACRNRPLSEVQTKRNRYLSKTRYVVEQSFGTLHRKFRYARAAYFGLIKVSAQSHLKAMCLNLLKAANRLSAPVAA

SEQ ID NO: 27120 - protein, 350 aa, Neisseria meningitidis
MKPTYQDIKAAARYRWQEIHAAIGIDPKFLRNKHQPCPACGGEDRFRYDDKDGKGTFICTHWESGAGDGFGLVMHFLGCDFQTALKQVSGILGMDETNPLPIPTTRPQPQPRPEKDYIGKLAALWDGAEPLTPDCPVVQYWTSRGLNAAYLPENIRHHAGMEYWTQGEDGKPLFIGRFHAAIAASTRGSTVCGLHITYLEAQRGGGFAKARIKHPQTGEDLPAKKMRSRKQGAMTGGAVYLFPVPENGRLMVAEGIETALAARELFNAHDWGLCAALSANGMKRLELSDGIKELAVIADHDAPRPVGETAALSLAKRAQSGGIAVRYWISGTAGYDALDELNDRKRSGKA

SEQ ID NO: 27121 - protein, 363 aa, Neisseria meningitidis
MNAQTLIANVAELVKTKLKPIVDDIDRKGYYPEAFMRELGAIGGFGAVGTEAEGGNGLGLATQIAVLREIGKECGATSFSAWCQAACAWYLHQTPNQAVKDKYLADILQGRVLAGTGMSNTVKHLAGIEKHNLQAERADGGYTVNGALPWVSNIGEDHIWANTAQIGGGYVMFITGGQWEGVSLQNCPEFCALEGTRTFSLNFKDVFIPDEDIIAAPEQFADYIQSIKAGFILLQIGIGAGVIDGSLGIIRLANIVNAEVNRYLDDGYDSLKARLDGAWAETERLAGLAWNNTPDTLATLKLREAAAVLALAAAQSAALHSGAKGYLMRSPAQRRVREAMFVAIVTPAIKHLRKEIAAIEAAK

SEQ ID NO: 27122 - protein, 445 aa, Neisseria meningitidis
MTFQNKKILVAGLGGTGISMIAYLRKNGAEVAAYDAELKPERVSQIGKMFDGLVFYTGRLKDALDNGFDILALSPGISERQPDIEAFKQNGGRVLGDIELLADIVNRRGDKVIAITGSNGKTTVTSLVGYLCIKCGLDTVIAGNIGTPVLEAELQREGKKADVWVLELSSFQLENTESLRPTAATVLNISEDHLDRYDDLLDYAHTKDKIFRGDGVQVLNADDTFCCAMKRAGREVKWFSLEHEADFWLERETGRLKQGNEDLIATQDIPLQGLHNAANVMAAVALCEAVGLPRNELLEHVKTFQGLPHRVEKIGEKNGVVFIDDSKGTNVGATAAAIAGLQNPLFVILGGMGKGQDFTPLRDALAGKAKGVFLIGVDAPQIRHDLDGCGLNMTDCATLEEAVQKAYAQAEAGDIVLLSPACASFDMFKGYAHRSEVFIGAFKAL

SEQ ID NO: 27123 - protein, 242 aa, Neisseria meningitidis
MAGHSKWANIQHKKARQDAKRGKIFTRLIKEITVAARMGGGDPGANPRLRLALEKAAENNMPKDNVQRAIDKGTGNLEGVEYIELRYEGYGIGGAALMVDCLTDNKTRTVADVRHAFTKNGGNLGTDGCVAFNFVHQGYLVFEPGVDEDALMEAALEAGAEDVVANDDGSIEVITAPNDWAGVKSALEAAGYKSVDGDVTMRAQNETELSGDDAVKMQKLIDALEDLDDVQDVYTSAVLNLD

SEQ ID NO: 27124 - protein, 1983 aa, Neisseria meningitidis
MNKGLHRIIFSKKHSTMVAVAETANSQGKGKQAGSSVSVSLKTSGDLCGKLKTTLKTLVCSLVSLSMVLPAHAQITTDKSAPKNQQVVILKTNTGAPLVNIQTPNGRGLSHNRYTQFDVDNKGAVLNNDRNNNPFLVKGSAQLILNEVRGTASKLNGIVTVGGQKADVIIANPNGITVNGGGFKNVGRGILTTGTPQIGKDGALTGFDVRQGTLTVGTSGWNDKGGADYTEVLARAVALQGKLQGKNLAVSIGPQKVDYASGEISAGTAAGTKPTIALDTAALGGMYADSITLIANEKGVGVKNAGTLEAAKQLIVTSSGRIENSGRIATTADGTEASPTYLSIETTEKGAAGTFISNGGRIESKGLLVIETGEDISLRNGAVVQNNGSRPATTVLNAGHNLVIESKTNVNNAKGPATLSAGGRTTINDATIQAGSSVYSSTKGDTELGENTRIIAENVTVLSNGSISSAAVIEAQDTAHIESGKPLSLETSTVASNIRLNNGNIKGGKQVVLMADGDIQAKASNLNASGNLYIHAGKDLDLNADKDLSTQSISLRADNTALISSNGNTLTAEKNLDIQAGSLSVRQSNLQSSGGNVQMSATKGNISLNQSWINASQNIDTAALQGNIISDGLTAVAEVGRVSLLANGNVDFNGLNTLIAEGDINAGSVGKGRLKMDNTDIYASAGDVKLVAGGQLDLGNGTVNGGHISLDSNKGSMVVQNVHLNARASLKVDADQTLTINNSKLNSGHNTQINTNHGHMTLNQLDAHSHRHMSISAQGKGKGKDSGQILQNDQQNSKSTLAADGVLSLNSSALQVLDNTTLRGGAINIKAGGGIIKRGHIDWETQDTATMRSAELKPLSGMMSIESGGNNPLTVEPGNRIVSAGDLAVKHNGTFQISARAGNNGNPSAQTASVSAKGNIGIVAGEVDIDAANIAAGKDLALVATKGNISLNSIRNTFSNYQLKTDKHNITQQLTDVEQELSKLTSDPKYRKAQDLPQMLRRKYKRRDKVFGDSEARLRGLRAEINAADEAWAELQSPVKALLERKQLLQQALLTVSQPGSGHENQGSTLSGQNIKLLAAGGIRIQGSKVAATQQANIQAAGFLPAPAAEELQEGRLQSAIDISGVFDTFEYGQQGSDKYGYAIFSRPSEISGKTGVTLSAPNANENSRISLSAANIEAENGKIKIQSYGDQYYYARQSELYTFERRSYKTGKWYNRKHITEVKEHKNAKPDAVTLSASQGIDIKSGGSIDAYATAFDAPKGSINIEAGRKLTLYAVEELNYDKLDSQKRRRFLGISYSKAHDTTTQVMKTALPSRVVAESANLQSGWDTKLQGTQFETTLGGATIRAGVGEQARADAKIILEGIKTTIHNETVSSSKSALWQKQAGRGSNIETLQLPSFTGPVAPVLTAPGGYIADIPKGNLKTEIETLTKQPEYAYLKQLQVAKNINWNQVQLAYDRWDYKQEGLTEAGAAIIALAVTVVTSGAGTGAVLGLNGAAAAATDAAFASLASQASVSFINNKGDVGKTLKELGRSSTVKNLVVAAATAGVADKIGASALNNVSDKQWINNLTVNLANAGSAALINTAVNGGSLKDNLEANILAALVNTAHGEAASKIKQLDQHYIAHKIAHAVAGCAAAAANKGKCQDGAIGAAVGEIVGEALVKNTDFSRMSATEIEKAKAKITAYSKLAAGTATAVAGGDVNAAANAAQIAVENNTLYPKCIGAKCDEFQKEQQKWIRENPEEYREVLLLQTGFIPIIGDIQSFVQAQTAADHLFALLGVVPGIGESIQAYKVAKAAKNLQGMKKALDKAATVATAQGYVSKTKIKIGQTELRVTAATDKQLLKAIGEGRDTTGKMTEQLFDSLAKQNGFRVLSGGKYGGNNGFDHVWQAADGSVVLIVESKQIRNGTVQLNPNGAGGYTQMSEDWIKQVANSLPDGSPAKAAVFKAEREGKLKTAIAGVDRQTGKAVILSVKVPSKTNIRR

SEQ ID NO: 27125 - protein, 386 aa, Neisseria meningitidis; identical to SEQ ID NO: 2901

SEQ ID NO: 27126 - protein, 469 aa, Neisseria meningitidis
MKYISTRGETAHKPFSEVLLMGLAPDGGLMLPEHYPQIGREALDKWRGLAYPELAFEIMRLFVTDIPEDDLRDILNRTYTEAAFGTKEITPVRTLSDGIKIQALSNGPTLAFKDMAMQFLGNAFEYVLNKEGKKLNILGATSGDTGSAAEYALRGKKGVNVFMLSPDGKMSAFQRAQMYSLQDGNIHNIAVKGMFDDCQDIVKAVQNDAAFKEKYHIGTVNSINWGRIVAQVVYYFAGYFKATQSNDEQVSFCVPSGNFGNVCAGHIAKQMGLPVRRLIVATNENDVLDEFFKTGAYRPRNSAHTYVTSSPSMDISKASNFERFVFDLMDRDPQEINTLWAEVAAGKGFDLRFALDKVGGKYGFTSGKSTHADRLATIKQVYGQDQELIDPHTADGVKVAREVREEGETVVCLETALAAKFDATIREAVGDVAIPRPAALEGLENLPQRVQTVPNSADAVKGIIEQTLA

SEQ ID NO: 27127 - protein, 128 aa, Neisseria meningitidis; identical to SEQ ID NO: 1074

SEQ ID NO: 27128 - protein, 107 aa, Neisseria meningitidis
VATSASDIKGKYVQSVEVAKGVITATMLSTGVNKEIQGKKLSLWAKRQNGSVKWFCGQPVTRDATNADDVTADGNDKIDTKHLPSTCRDDSSVVCIETPPTAFYKNT

SEQ ID NO: 27129 - protein, 213 aa, Neisseria meningitidis; identical to SEQ ID NO: 6185

SEQ ID NO: 27130 - protein, 193 aa, Neisseria meningitidis; identical to SEQ ID NO: 1378

SEQ ID NO: 27131 - protein, 64 aa, Neisseria meningitidis; identical to SEQ ID NO: 2003

SEQ ID NO: 27132 - protein, 513 aa, Neisseria meningitidis
MKIGIPRESLSGETRVACTPATVALLGKLGFETVVESGAGLAASLDDAAYQTAGATVADKAAVWACPLIYKVNAPSEGELPLLNEGQTIVSFLWPRQNEALVEALRAKKVNALAMDMVPRISRAQALDALSSMANISGYRAVIEAANAFGRFFTGQITAAGKVPPAQVLVIGAGVAGLAAIGTANSLGAVVRAFDTRLEVAEQIESMGGKFLKLDFPQESGGSGDGYAKVMSDEFIAAEMKLFAEQAKEVDIIITTAAIPGKPAPKLITKEMVESMKSGSVIVDLAAATGGNCELTRPGELSVTDNGVKIIGYTDMANRLAGQSSQLYATNLVNLTKLLSPNKDGEITLDFEDVIIRNMTVTHDGEITFPPPPIQVSAQPQQTPSEKAASAAKPEPKPVSLWKKLAPAVIAAVLVLWVGAVAPAAFLNHFIVFVLACVIGYYVVWNVSHSLHTPLMSVTNAISGIIVVGALLQIGQGNGFVSLLSFVAILIASINIFGGFAVTRRMLNMFKKG

SEQ ID NO: 27133 - protein, 436 aa, Neisseria meningitidis
MSVTVETLENLERKVVLSLPWSEINAETDKKLKQTQRRAKIDGFRPGKAPLKMIAQMYGASAQNDVINELVQRRFYDVAVAQELKVAGFPRFEGVEEQDDKESLKIAAIFEVFPEVVIGDLSAQEVEKVTASVGDAEVDQTVEILRKQRTRFNHVEREARNGDRVIIDFEGKIDGEPFAGGASKNYAFVLGASQMLPEFEAGVVGMKAGESKDVTVNFPEDYHGKDVAGKTAVFTITLNNVSEATLPEVDADFAKALGIADGDVAKMREEVKKNVSHEVERRVNEQTKESVMNALLKAVELKAPVALVNEEAARLANEMKQNFVNQGMADAANLDLPLDMFKEQAERRVSLGLILAKLVDENKLEPTEEQIKAVVANFAESYEDPQEVIDWYYAEPSRLQAPTSLAIESNVVDFVLGKAKVNEKALSFDEVMGAQA

SEQ ID NO: 27134 - protein, 453 aa, Neisseria meningitidis; identical to SEQ ID NO: 5696

SEQ ID NO: 27135 - protein, 542 aa, Neisseria meningitidis
MISTNGITMQFGAKPLFENVSVKFGEGNRYGLIGANGSGKSTFMKILGGDLEQTAGEVAIENGVRLGKLRQDQFAYEDMRVLDVVMMGHTEMWAAMTERDAIYANPEATEDDYMKAAELEAKFAEYDGYTAEARAAELLSGVGISEDLHNATMAEVAPGFKLRVLLAQALFSKPDVLLLDEPTNNLDINTIRWLEGVLNQYDSTMIIISHDRHFLNEVCTHMADLDYNTITIYPGNYDDYMLASAQSRERALKDNAKAKEKLQELQEFVARFSANKSKARQATSRLKQADKIKSEMVEVKPSTRQNPYIRFEADEKAKLHRQAVEVEKLAKRFETQLFKNLNFILEAGQRLAIIGPNGAGKSTLLKLLAGAYNPEYSDGLLPDEGSIKWAEKASVGYYPQDHENDFDVDMDLSEWMRQWGQEGDDEQVIRGTLGRLLFGSNDVVKKVKILSGGEKGRMLYGKLLLLKPNVLVMDEPTNHMDMESIESLNMALEKYKGTLIFVSHDRQFVSSLATQIIELDGKGGYEHYLGDYESYLEKKGVA

SEQ ID NO: 27136 - protein, 328 aa, Neisseria meningitidis
MQYRIRRENEAPEAKNAGETLWERDMMREVLLSAYRDRRRERMWKNIWRAVSTLILVALIAGIFRKDEAALQLAGNTPHTAVVNLYGEIGNGVEDQVKKLKDGMEAAYKNPQAKAIIIRANSPGGSPVVSNTAFEEIRRLKAQHPGIPVYLVAEDMCASGCYYIAAAADKIYADPSSIIGSIGVIGSSFDATGLMEKIGVKRRVKIAGSNKGMGDPFSPETPEQSKIWEEMLTGIHGEFIKAVKTGRGDRLKFRQYPDVFSGRVYTGADALKVGLVDGLGNIYSVARDVVKAPDVVDYTPKDDFGRILGRRFGAELKASVREALQAVR

SEQ ID NO: 27137 - protein, 69 aa, Neisseria meningitidis; identical to SEQ ID NO: 5143

SEQ ID NO: 27138 - protein, 307 aa, Neisseria meningitidis
MDIETFLAGERAAGGYRCGFVAIVGRPNVGKSTLMNHLIGQKISITSKKAQTTRNRVTGIYTDDTAQFVFVDTPGFQTDHRNALNDRLNQNVTEALGGVDVVVFVVEAMRFTDADRVVLKQLPKHTPVVLVVNKIDKDKAKDRYALEAFVAQVRAEFEFAAAEAVSAKHGLRIANLLELIKPYLPESVPMYPEDMVTDKSARFLAMEIVREKLFRYLGEELPYAMNVEVEQFEEEDGLNRIYIAVLVDKESQKAILIGKGGERLKKISTEARLDMEKLFDTKVFLKVWVKVKSGWADDIRFLRELGL

SEQ ID NO: 27139 - protein, 144 aa, Neisseria meningitidis
MTEPKHEMPTEEQVAARKKAKAKIRTIRIWAWVILALLASTALLSQCAMSKPQAKQKIVESCVKNIPFAEKWQNDLRARGLDSNNTRLAVDYCKCMWEQPLDRLSEKQIRSFGKLGAQEQLDLLGGANAFEARDKQCVADLKSE

SEQ ID NO: 27140 - protein, 481 aa, Neisseria meningitidis
MNWSDLNLMPAMPEIVLLALLVLLLLADLWVSDDKRRWTHYGALATVAVTAVVQLAVWEQGSTSSFNGMYIADGMSRLAKMVLYALTFALFVYAKPYNQVRGIFKGEFYTLSLFALLGMSVMVSAGHFLTAYIGLELLSLALYALIALRRDSGFAAEAALKYFVLGALASGLLLYGISMVYGATGSLEFAGVLASSFNEEANEWLLKLGLVFIVVAVAFKLGAVPFHMWVPDVYHGAPTSVTALVGTAPKIAAVVFAFRILVTGLGTVHHDWSLMFALLAAASLLVGNLAAIMQTNIKRMLAYSTVSHMGFILLAFMAGAVGFAAGLYYAITYALMAAAGFGVLMVLSDGDNECENISDLAGLNQHRVWLAFLMLLVMFSMAGIPPLMGFYAKFGVIMALLKQGYVWLSVFAVIMSLIGAFYYLRVVKVMYFDESGRAHPTVGGNNAAKFLLSVNALLLVLWGIMPQTVIDWCAKALENTL

SEQ ID NO: 27141 - protein, 105 aa, Neisseria meningitidis; identical to SEQ ID NO: 3278

SEQ ID NO: 27142 - protein, 210 aa, Neisseria meningitidis; identical to SEQ ID NO: 3436

SEQ ID NO: 27143 - protein, 328 aa, Neisseria meningitidis; identical to SEQ ID NO: 6244

SEQ ID NO: 27144 - protein, 219 aa, Neisseria meningitidis; identical to SEQ ID NO: 8152

SEQ ID NO: 27145 - protein, 201 aa, Neisseria meningitidis; identical to SEQ ID NO: 291

SEQ ID NO: 27146 - protein, 310 aa, Neisseria meningitidis; identical to SEQ ID NO: 2585

SEQ ID NO: 27147 - protein, 330 aa, Neisseria meningitidis
MKKESRPAFDAAAVFDAAAVPVSDSGFAANANVRRFVDDEVGKGDFSRAEWQDFFDKAAYKADIVKIMHRPSTSRPWYVFRTGNSGKAKFRGARRFYAENRALIDDVAQKYGVPAELIVAVIGIETNYGKNTGSFRVADALATLGFDYPRRAGFFQKELVELLKLAKEEGGDVFAFKGSYAGAMGMPQFMPSSYRKWAVDYDGDGHRDIWGNIGDVAASVANYMKQHGWRTGGKILVSATLAPGADVQAIIGEKTALTRTVADLKAYGIIPGEELADDEKAVLFKLETAPGVFEYYLGLNNFYTVWQYNHSRMYVTAVRDIANSLGGSGL

SEQ ID NO: 27148 - protein, 133 aa, Neisseria meningitidis
MNTTRLPTALVLGCLCAAASAADNNIMTKGQKVYESNCVACHGKKGEGRGTMFPPLYRSDFIMKKPQVLLHSMVKGINGTIKVNGKTYNGFMPATAISDADIAAVATYIMNAFDNGGGSVTEKDVKQAKGKKN

SEQ ID NO: 27149 - protein, 102 aa, Neisseria meningitidis
MVERYKTMITEANGKIHRLEDWGRRQLAYPINKIHKAHYVLMNIETTPEVVEELETAFRFNDAVLRHLTIKTKHAVTEASPMLGGEKAKNLLSGASEEAAAQ

SEQ ID NO: 27150 - protein, 436 aa, Neisseria meningitidis
MPSESKLVSRIVTDSRDSRAGDVFFALAGGRFDAHDFVEDVLAAGAAAVVVSREDCVAMDGALKVDDTLTALQMLAKAWRDNVNPFVFGITGSGGKTTVKEMLAAVLRRRFGDDAVLATAGNFNNHIGLPLTLLKLNEKHRYAVIEMGMNHFGELAVLTQIAKPDAALVNNVLRAHVGCGFDGVGDIAKAKSEIYQGLCSDGMALIPQEDANMAVFKTATLNLNTRTFGVDSGDVHAENIVLKPLSCEFDLVCGDERAAVVLPVPGRHNVHNAAAAAALALAAGLSLNDVAEGLQGFSNIKGRLNVKSGIKGATLIDDTYNANPDSMKAAIDVLARMPAPRIFVMGDMGELGEDEAAAMHAEVGAYARDQGIEAAYFVGDNSVEAAEKFGADGLWFAAKDPLIQVLRHDLPERATVLVKGSRFMQMEEVVEALEDK

SEQ ID NO: 27151 - protein, 127 aa, Neisseria meningitidis; identical to SEQ ID NO: 5330

SEQ ID NO: 27152 - protein, 108 aa, Neisseria meningitidis
MSEAKFMRIIVFFDLPVITAAKRKAANQFRQFLLKDGYQMLQLSVYSRIVKGRDSLQKHHNRLCANLPQEGSIRCLETTEKQYAAMKLLLGELKTQEKKVNSDQLLLF

SEQ ID NO: 27153 - protein, 272 aa, Neisseria meningitidis; identical to SEQ ID NO: 1475

SEQ ID NO: 27154 - protein, 312 aa, Neisseria meningitidis
MLELNGLCKRFGDKTVADNICLTVGRGKILAVLGRSGCGKSTLLNMIAGIVRPDGGEIWLNRENITRMPPEKRRISLMFQDYALFPHMSALENAAFGLKMQKMPKAEAESLAMAALAEVGLENEAHRKPEKLSGGEKQRLALARALVVRPSLLLLDESFSSLDTHLRDRLRRMTAERIRNGGIPAVLVTHSPEEACTAADEIAVMHGGRILQYGTPETLVKTPSCVQVARLMGLPNTDDDRHIPQHAVRFDQDGMECRVLSRTCLPESFSLSVLHPEHGILWLNLDMRHAGAVSGKDTVRIHIEEREIVRFR

SEQ ID NO: 27155 - protein, 524 aa, Neisseria meningitidis
MKKSLFVLFLYSSLLTASEIAYRFVFGIETLPAAKMAETFALTFMIAALYLFARYKASRLLIAVFFAFSIIANNVHYAVYQSWMTGINYWLMLKEITEVGGAGASMLDKLWLPALWGMLEVMLFCSLAKFRRKTHFSADILFAFLMLMIFVRSFDTKQEHGISPKPTYSRIKANYFSFGYFVGRVLPYQLFDLSKIPVFKQSAPSKIGQGSVQNIVLIMGESESAAHLKLFGYGRETSPFLTQLSQADFKPIVKQSYSAGFMTAVSLPSFFNVIPHANGLEQISGGDTNMFRLAKEQGYETYFYSAQAENQMAILNLIGKKWIDHLIQPTQLGYGNGDNMPDEKLLPLFDKINLQQGRHFIVLHQRGSHAPYGALLQPQDKVFGEADIVDKYDNTIHKTDQMIQTVFEQLQKQPDGNWLFAYTSDHGQYVRQDIYNQGTVQPDSYLVPLVLYSPDKAVQQAANQAFAPCEIAFHQQLSTFLIHTLGYDMPVSGCREGSVTGNLITGDAGSLSIRDGKAEYVYPQ

SEQ ID NO: 27156 - protein, 278 aa, Neisseria meningitidis; identical to SEQ ID NO: 8180

SEQ ID NO: 27157 - protein, 725 aa, Neisseria meningitidis
MTRFKYSLLFAALLPVYAQADVSVSDDPKPQESTELPTITVTADRTASSNDGYTVSGTHTPLGLPMTLREIPQSVSVITSQQMRDQNIKTLDRALLQATGTSRQIYGSDRAGYNYLFARGSRIANYQINGIPVADALADTGNANTAAYERVEVVRGVAGLLDGTGEPSATVNLVRKRPTRKPLFEVRAEAGNRKHFGLGADVSGSLNTEGTLRGRLVSTFGRGDSWRQRERSRDAELYGILEYDIAPQTRVHAGMDYQQAKETADAPLSYAVYDSQGYATAFGPKDNPATNWANSRHRALNLFAGIEHRFNQDWKLKAEYDYTRSRFRQPYGVAGVLSIDHNTAATDLIPGYWHADPRTHSASVSLIGKYRLFGREHDLIAGINGYKYASNKYGERSIIPNAIPNAYEFSRTGAYPQPSSFAQTIPQYGTRRQIGGYLATRFRAADNLSLILGGRYSRYRTGSYDSRTQGMTYVSANRFTPYTGIVFDLTGNLSLYGSYSSLFVPQSQKDEHGSYLKPVTGNNLEAGIKGEWLEGRLNASAAVYRARKNNLATAAGRDPSGNTYYRAANQAKTHGWEIEVGGRIMPEWQIQAGYSQSKTRDQDGSRLNPDSVPERSFKLFTAYHFAPEAPSGWTIGAGVRWQSETHTDPATLRIPNPATKARAADNSRQKAYAVADIMARYRFNPRAELSLNVDNLFNKHYRTQPDRHSYGALRTVNAAFTYRFK

SEQ ID NO: 27158 - protein, 257 aa, Neisseria meningitidis; identical to SEQ ID NO: 5811

SEQ ID NO: 27159 - protein, 96 aa, Neisseria meningitidis; identical to SEQ ID NO: 11797

SEQ ID NO: 27160 - protein, 107 aa, Neisseria meningitidis; identical to SEQ ID NO: 2106

SEQ ID NO: 27161 - protein, 181 aa, Neisseria meningitidis; identical to SEQ ID NO: 9829

SEQ ID NO: 27162 - protein, 60 aa, Neisseria meningitidis; identical to SEQ ID NO: 4635

SEQ ID NO: 27163 - protein, 540 aa, Neisseria meningitidis
MKTKEFLKSLAELAASLRQVIEAEVDGFDASPKAIAARRAKVFDPVGGYEYFVNTYFPHYIRSPEKSELHAFLFSRLPEIIRSPKGENEAVGAPRGEGKSTQVTQLFTLWCIVTGQKHYAVIVMDSIDQAYPMLEAIKAELEFNPRLKTDFPEVCGQGRVWQAGTIVTANDVKVQVAGSGKKLRGLRHGPYRPDLTILDDIENDEQVRNPEQRNKLNAWLTKTVLPLGGVGQKYDVIYIGTILHYDSVLNRTLNNPFWHGIKFKAMKRWPDRMDLWDRWEELFRNDGETVAEAFYLANKDEMERGAQTSWAARGVLALMKIRARDGHATFDSEYQNDPVSGEDAPFAKSMKFWNDLPSDLVYFGALDPSLGKAGASRDPSAIIIGGYQRETGKLYVVEAQIKKRLPDLIIEDVIRLHRQYRCKLWFVETVQFQEFLKDELVKRSAARGIPVPARAVKPVSDKLLRIETLQPHMANGLILLNESQQTLIQQFRHFPKADHDDGPDAVHMLWSGAVANCVPIEWQSPTDNDFDDEIKSKWSR

SEQ ID NO: 27164 - protein, 201 aa, Neisseria meningitidis; identical to SEQ ID NO: 9165

SEQ ID NO: 27165 - protein, 503 aa, Neisseria meningitidis; identical to SEQ ID NO: 15667

SEQ ID NO: 27166 - protein, 241 aa, Neisseria meningitidis
MRIPLLAPDNYAFPDPAYALARCDGLVGVSRDLDAGRLLEAYRNGVFPWFSRDGWFFWYAVGPRAVIVPERLHVPRSLAKTLRNGSYRVAVNGCFAEVVAHCAAAARPNQDGTWIAPEFQTAYLKLHEMGYAHSFECHYPDENGKTRLAGGFYGVQIGRVFYGESMFALQPDASKIAFACAVPFLADLGVELIDCQQDTEHMRRFGSELLPFADFAERLRMLNAVPLKEEIGRREVACRGL

SEQ ID NO: 27167 - protein, 221 aa, Neisseria meningitidis
MDAWFEDTAMGRYVAKLEQDFFGRYLDSYRFSGMCAVQVGGRWLSLSEDVVCVPRDMSMSAENMALADVSADMLLFPHTLEGGVPSQILSEAHRILKPSGRLMLTGFNPYSLWGFSCWFDGERLPEKRFCLPLPELKRRLADVGFDIEFGKFMVYLPPVSSLGQIRFWRFMEKAGDRWWPQCAAVYGLVLVKRAAGVTPLPAWDGYLGGKALAAGAARVAD

SEQ ID NO: 27168 - protein, 87 aa, Neisseria meningitidis; identical to SEQ ID NO: 932

SEQ ID NO: 27169 - protein, 470 aa, Neisseria meningitidis
VKILILGNGQVGSTVAQNLAAIPNNDVTVIDIDEKALQETGSRLDVQTVFGNGASPFTLERAGAEDADLLLALSRSDETNIVACKVAADLFNIPGRIARVRSSEYLEYLSPKLENNENGSLSIFGITETISPEQLVTEQLAGLIDCPGALQVLRFADDRVRMVIIQARRGGLLVGRSIADIAQDLPDGADCQICAVYRNNRLIVPTPQTVIIEGDEILFAAAAENIGAVIPELRPKETSTRRIMIAGGGNIGYRLAKQLEHAYNVKIIECRPRRAEWIAENLDNTLVLQGSATDETLLDNEYIDEIDVFCALTNDDESNIMSALLAKNLGAKRVIGIVNRSSYVDLLEGNKIDIVVSPHLITIGSILAHIRRGDIVAVHPIRRGTAEAIEVVAHGDKKTSAIIGRRISGIKWPEGCHIAAVVRAGTGETIMGHHTETVIQDGDHIIFFVSRRRILNELEKLIQVKMGFFG

SEQ ID NO: 27170 - protein, 106 aa, Neisseria meningitidis; identical to SEQ ID NO: 3331

SEQ ID NO: 27171 - protein, 105 aa, Neisseria meningitidis; identical to SEQ ID NO: 895

SEQ ID NO: 27172 - protein, 307 aa, Neisseria meningitidis
MPSEHPFSDGISTPNPKETMNDTAQITASYGRRYIVRTPDGTTYEASTRKKRVDFACGDRVRISPVNAEQVVIEDFLPRQSLLYRQDAWKTKLIAANVTQLLIVTAAVPSPSVRLLQRALLAAEAAGIEAVIVLNKADLPETALWREKLKFYETLGYPVIETRALENAGSLRPALQGHSNILLGQSGMGKSTLTNALLGSQTARTGDISAALDSGKHTTTHARLYDLNGETQLIDSPGLQEFGLHHLQAADLPRYFPDFRHLVGQCRFHNCTHRAEPGCAFKAAAQTGAASPERLAFLQGITDELPG

SEQ ID NO: 27173 - protein, 249 aa, Neisseria meningitidis; identical to SEQ ID NO: 2006

SEQ ID NO: 27174 - protein, 417 aa, Neisseria meningitidis
MQTYLVGGAVRDYLLGLPVKDRDWVVVGADAQTMLAQGFQPVGKDFPVFLHPETHEEYALARTERKTAKGYVGFSFHADKDVTLEQDLMRRDLTINAMAQDADGKIIDPFGGQRDLAAGILRHVSPAFAEDPVRILRTARFTARYRFEIAEETIKLMRQMVENGEADALVAERVWQEFAKGLMEKNPRKMIEVLRECGALKVLLPEVNALFGVPQRADYHPEIDSGIHTLMTLQRAADMGLSLPERYAALLHDLGKAKTPSDILPRHHGHDLAGVEPVREVNQRLRAPKHCAELAELVCRWHIIFHQVGQLKSRTILNVLKKTDAFRRPERFSAALNVCIADTQGRLNREHTPYPQRAHWLALLEVANQVDSGKIAAECRAQGKVHLIAEQIDRARLAQIAPLQKAFRAAQDKTEKH

SEQ ID NO: 27175 - protein, 225 aa, Neisseria meningitidis
MPAALIKDFLLTQGLKLPLDEVRAAYLTAQTVMGMGTASIDRSVLWRSDEGWKLADYLSCDNVREDALKRLFMALDSVFSRSTGVRSAAVYALMPSENQAFQLICLSQQGEGLENIWNLDENVADVSLACRCAQSGWMNVASDVRRWLDLGELSGERNHASAAQISIPICTESGGVLGVVHVEFECAECAGTAAQVEWVALALALSEPLKLLLGMSAGKDGSEDV

SEQ ID NO: 27176 - protein, 421 aa, Neisseria meningitidis
MSKNQPAQPTRRTLFKTAIAAGAVGAIGGYLGGKKQGETAERTAESQHSPQAYPCYGEHQAGIVTPQQAFSIMCAFDVTAQSAKQLENLFRTLTARIEFLTQGGEYQDGDDKLPPAGSGILGKAFNPDGLTVTVGVGSSLFDGRFGLKDKKPVHLQEMRDFSNDKLQKSWCDGDLSLQICAFTPETCQAALRDIIKHTVQTAVIRWSIDGWQPKSEPGAMAARNLLGFRDGTGNPKVSDPKTADEVLWTGVAANSLDEPEWAKNGSYQAVRLIRHFVEFWDRTPLQEQTDIFGRRKYSGAPMDGKKEADQPDFAKDPEGNTTPKDSHIRLANPRDPEFLKKHRLFRRAYSYSRGLASSGQLDVGLVFVCYQANLADGFIFVQNLLNGEPLEEYISPFGGGYFFVLPGVEKGGFLGQGLLGV

SEQ ID NO: 27177 - protein, 107 aa, Neisseria meningitidis; identical to SEQ ID NO: 2314

SEQ ID NO: 27178 - protein, 129 aa, Neisseria meningitidis
MWKIIKEDSDDLEFAIKCLFSQSIDLNEFKLWIEQVIRDMPIEDIPFYIFDLADLDEEIDNIYNIIGFVSSYSLSKLRRNALTGIAFLRGIDVYDPPVSKEKALKALEKYPEIYQKFQHFFPFVELPPL

SEQ ID NO: 27179 - protein, 77 aa, Neisseria meningitidis; identical to SEQ ID NO: 1677

SEQ ID NO: 27180 - protein, 132 aa, Neisseria meningitidis; identical to SEQ ID NO: 1178

SEQ ID NO: 27181 - protein, 514 aa, Neisseria meningitidis
MCGVLGLVSHEPVNQLLYDGLQMLQHRGQDAAGIATAEGGTFHMHKGKGMVREVFRTRNMRDLVGNAGIAHVRYPTAGNAGSSAEAQPFYVSSPFGIVLAHNGNLTNTAELYENVCNKHLRHVNTSSDSEVLLNVFAHELRREVSKNADPHRLNADNIFNAVAEVHRLVRGAYGVVAMIAGYGMLAFRDPYGIRPLVLGSQTDNEGRKSYAVASESVAFNALAYDLERDIRPGEAVFVGFDGTMIARQCSDRAKLSPCLFEYVYFARPDSVIDGVSVYQSRLDMGVSLAEKIKRELPVDDIDVVMPIPDTSRPSAMELAVHLDKPYREGLIKNRYIGRTFIMPGQATRKKSVRQKLSPMETEFAGKSVLLVDDSIVRGTTSREIVEMVRAAGARKVYIASAAPEVRYPNVYGIDMPTREELIANGRSAAEIAAEIGADGIVFQDLDDLEAVVKALNPKIESFDSSCFNGIYQTGDIDDAYLDRLSAEKSGCGGLKIHPSRMEHSISISDAGDEE

SEQ ID NO: 27182 - protein, 195 aa, Neisseria meningitidis
MEHKLPQLPYELDALSPHLSKETLEFHYGKHHQTYITNLNNQIKGTEFENLPLEEIVKKSSGGVFNNAAQTWNHTFYWLGFTSKGQGKPAGELAAAIDAKWGSFEKFQEAFNACAAGTFGSGWAWLVKTPAGGLDLVSTSNAATPLTTENTPLLTCDVWEHAYYIDYRNSRPNYLKGFWEIVNWNEVAKRFAALS

SEQ ID NO: 27183 - protein, 77 aa, Neisseria meningitidis
MWHIVAIGYLFVAVMFSAAQPSIARALIYLVFWAVLPTVFTVFTITVRRRNHLMRQQEQAEFEQQRAQRQKDSGTKP

SEQ ID NO: 27184 - protein, 319 aa, Neisseria meningitidis
MSKKTKQELENNKLSKRLRHAVGDAINDFNMIEPDDKIMVCLSGGKDSYALLDILRQLQASAPIDFQLVAVNLDQKQPGFPEEVLPTYLESIGVPYKIVEEDTYSTVKRVLDEGKTTCSLCSRLRRGILYRTAKELGCTKIALGHHRDDILATLFLNMFYGGKLKAMPPKLVSDNGEHIVIRPLAYVKEKDLIKYAELKQFPIIPCNLCGSQPNLQRQVIGDMLRDWDKRFPGRIESMFSALQNVVPSHLADTELFDFVGLERGQSLKHGGDLAFDSEKMPERFSDGSEEDESEIKIEPQKAERKVINILANKPKTCGA

SEQ ID NO: 27185 - protein, 254 aa, Neisseria meningitidis; identical to SEQ ID NO: 14364

SEQ ID NO: 27186 - protein, 318 aa, Neisseria meningitidis; identical to SEQ ID NO: 3073

SEQ ID NO: 27187 - protein, 477 aa, Neisseria meningitidis
MSQYDVVVIGAGPGGYVAAIRAAQLGFKTACVDAGVNKAGNAPALGGTCLNVGCIPSKALLQSSEHFHAAQHDFAEHGITVGDVKFDAAKMIERKDAIVTKLTGGVKFLFQKNKVTSLFGTASFAGKNGDAYQIEVDNKGEKTVIEAKHVIVATGSVPRPLPQVAIDNVNVLDNEGALNLTEVPAKLGVIGSGVIGLEMGSVWNRVGAEVTILEAAPTFLAAADQQIAKEAFKYFTKEQGLNIELGVKIGDIKSEGKGVSVAYETAAGEAKTEVFDKLIVAIGRIPNTKGLNAEAVGLEKDERGFIKVDGGCRTNLPNVWAIGDVVRGPMLAHKASDEGVAVAERIAGQKPHIDFNNVPFVIYTDPEIAWVGKTEEQLKAEGVEYKKGTSGFGANGRALAMGKAKGTVKVLADAKTDRILGVHMIGPVVSELVIEGVTALEFFASSEDIARIIHAHPTLSEVVHEAALAADKRALHG

SEQ ID NO: 27188 - protein, 213 aa, Neisseria meningitidis
MLKPETIHISGPAGILETIHIPSEQVPARGVAVINHPNPLQGGTNTNKVIQTAAKALSKLGFHCYLPNLRGVGGSEGTHDYGRGETQDCLAVIDYARAQHPEAPEFALSGFSFGGYVATFAAQARIPDLLLLIGAAVCHYTGRPEPSAVPNVAKTLMIHGAEDEVVEIGKALKWAEPQDLPVITIAGSTHFFHGKLIVLRDTILRFAPVCLNG

SEQ ID NO: 27189 - protein, 131 aa, Neisseria meningitidis; identical to SEQ ID NO: 4721

SEQ ID NO: 27190 - protein, 92 aa, Neisseria meningitidis
MKWVTVVLSFALVCCQYSLWFGKGSIGRNNNLKNQIAVQEEKNQTLALRNHSLAAEVYDLENGQEAISEIARVELGYIQDGETFYRLIRHNR

SEQ ID NO: 27191 - protein, 85 aa, Neisseria meningitidis; identical to SEQ ID NO: 4382

SEQ ID NO: 27192 - protein, 146 aa, Neisseria meningitidis; identical to SEQ ID NO: 6964

SEQ ID NO: 27193 - protein, 508 aa, Neisseria meningitidis; identical to SEQ ID NO: 11835

SEQ ID NO: 27194 - protein, 99 aa, Neisseria meningitidis; identical to SEQ ID NO: 15935

SEQ ID NO: 27195 - protein, 284 aa, Neisseria meningitidis
VGQSGELFCFGQMPVWKVENLPEVLLSGYSSEEGEWVCLNVLQGDVEVRAPDGSAEVWSAESGDCVFAPQQVFSVKPKTDDAEIRLSLYCAAADYFHKKYGMSATHSAVAAAQDTVPAGRALDMGCGQGRNALFLGLKGFEVTAVDHNPAALANVAELAEAEGLNVRTLEYDLNAAALQGEFDYIVATVVLMFLMPQRVPDVIADMQAHTAAGGYNLIVSAMDTADFPCPMPFPFKFKEGELKDYYRDWELVEYKEELGAMHAKDENGNPIRFKFVTMLAKRPE

SEQ ID NO: 27196 - protein, 88 aa, Neisseria meningitidis
MDFEFGFRTLWPIATAAFWFWVNGISSRLKEADKRIDDLKEELHAVKLSYHTKQDAQDDRKNIAASLERIENKLEKVNEKLDRKADKS

SEQ ID NO: 27197 - protein, 150 aa, Neisseria meningitidis
MNIEVEMKVLDERMADFIPAYATEGSAGLDLRACLDEEVVLKPGETFLVPTGLVIYLANPAYAAVLLPRSGLGHKHGIVLGNLVGLIDSDYQGELKVSLWNRSSEPFTVKPFERIAQMVIVPVVQARFKRVEEFVGSSRGEGGFGSTGLH

SEQ ID NO: 27198 - protein, 249 aa, Neisseria meningitidis; identical to SEQ ID NO: 2888

SEQ ID NO: 27199 - protein, 157 aa, Neisseria meningitidis; identical to SEQ ID NO: 7285

SEQ ID NO: 27200 - protein, 428 aa, Neisseria meningitidis; identical to SEQ ID NO: 5517

SEQ ID NO: 27201 - protein, 658 aa, Neisseria meningitidis
MEYMDLKSLLNFGLPNMPRTVIGLRKKAQRDGWQTRRRQGKGGGVEYALPAEIRAAIMKRQSDELAEKMPKTLPQVRPGTAMSAQALAEAAKLLNEKQRSVADARCAVVAAVLGIKYQYDCSAKAAVAQFLGLLAEGKLDAVTLGNLEKANDRSRSAKVGERTLDGWISAYLKAENATERLVALAPKTTKAVKPIESYGWLPMFMQFHNIPSAPKLAHSYRRFVQWAEAENMPVNDVPNLSMVRRVWDKLPLIMQERGRKTGAAYKSLLPYVKRDWGALKPNDVWIGDGHSFKAKVAHPVHGRPFKPEVTVIIDGCTRFVVGFSVSLAESCVAVSDALRIGVKHFGLPIIYYSDNGGGQTGKTIDHEITGITSRLGIRHETGIAGNPQGRGIIERWWKDNLIEMARQYEMFAGAGMDSSTKNLMYRKMESAFNALEKGKDLTEEQQKYLKKLPSWSRFIADVAKCIDEYNNRPHGELPRHPDGGHYSPKAYREMRLEQDGIAPDMLSAEELATMFMPQEVRKVQRGWLDLFNNSYFSTELAEYHKDEVRVSYDLDDASAVNVFDMDGKFITKAQADGNTREAFPTARIDQLAEKRRKGKIKRAENAIKLANAEVNPALEQAAVWDELGHLGGNVIEAEYAVLPKTGTDDFVLFETDRS

SEQ ID NO: 27202 - protein, 217 aa, Neisseria meningitidis
MPSEPPSDGIARHPKSTIKMAKKPNKPFRLTPKLLIRVVLLICITAIGALAIGIVSTFNPNGGKTLQTEPQHTDSPRETEFWLPNGVVGQDAAQPEHHHAASSEPAQPDGTDESGSGLPSPAAPKKNRVKPQPADTAQTDRQPDDAGTQAENTLKETPVLPTNVPRPEPRKETPEKQAQPKETPKEKETPKENHTKPDTPKNTPAKPHKKEILDNLF

SEQ ID NO: 27203 - protein, 199 aa, Neisseria meningitidis; identical to SEQ ID NO: 1276

SEQ ID NO: 27204 - protein, 317 aa, Neisseria meningitidis
MHQYYDAVILSVGNGLLKRFFKQNAQLNIASRPLIITLFPGVVFGDQASILSRMGADIVLYNNKHDFRIAEEYKKQYKLSCQNILYGYPIFRHASKGRHGEKIYFIDQVKIPFKKEERIYTLKKLIALAEKYPEKEFTILLRVADKDITVHQDKHSYIELAKQFQLPSNLTIERKSTAQAFQEMGYCLSYSSTMLFEAECKGIPVGIVADLGFSKSYANQHFLGSGVLVYFDQIDFTSPKIADPDWLDCYATKKVITTDEFNKLLKQVVPLQHDYQEYLSAVNSIESTKTIFLRKFKKLIRDPKKFFYDSKWLRKVI

SEQ ID NO: 27205 - protein, 366 aa, Neisseria meningitidis
METQLYIGIMSGTSMDGADAVLVRMDGGKWLGAEGHAFTPYPDRLRRQLLDLQDTGTDELHRSRILSQELSRLYAQTAAELLCSQNLAPSDITALGCHGQTVRHAPEHGYSIQLADLPLLAELTQIFTVGDFRSRDLAAGGQGAPLVPAFHKALFRDDKETRAVLNIGGIANISVLPSDAPAFGFDTGPGNMLMDAWTQAHWQLPYDKNGAKAAQGNILPQLLDRLLAHPYFARPHPKSTGRELFALNWLETYLGGGENRYDVLRTLSRFTAQTVFDAVSHAAANARQMYICGGGIRNPVLMADLAECFGTRVSLHSTADLNLDPQWVEAAAFAWLAACWINRIPGSPHKATGASKPCILGAGYYY

SEQ ID NO: 27206 - protein, 431 aa, Neisseria meningitidis; identical to SEQ ID NO: 2927

SEQ ID NO: 27207 - protein, 44 aa, Neisseria meningitidis; identical to SEQ ID NO: 6328

SEQ ID NO: 27208 - protein, 553 aa, Neisseria meningitidis
MTESITRDSMQYDVVIVGAGPSGLSAAIKLKQLAEQNGREISVCVVEKGSEAGAHSLAGAVIDPIALNELIPDWKEKGAPLTRTVTQDKVLFLTEKKAFNLPITPNFDNHGNYIVSLGEVVRWLAEQAENMGVEIYPGFAAAEVLYHKDGSVKGIATGNMGVGKNGEPTDSFQPGMELWARQTLFAEGCRGSLSKQIIERFKLDQNSQPQTYGLGMKEVWEVPSEQHQPGLVVHSAGWPLDSKTYGGAFVYHFDDNKVAVGFVVGLDYQNPYLSPFEEFQRFKTHPEIRKTFEGGRRIAYGARSLIEGGFQSLPKLSFKGGVLVGDAAGFLNMPRIKGIHTAMKSAMLAAEAVFPLLENLEEVEGFDSGKEAADYQQRFEQSWLYQELYAARNVRPSFKWGVYLGSIYTGIDQMIFRGKAPWTLKHHGKDNEQLKKAAACKPIDYPKPDGVLTFDRLSSVFLANLAHEENQPDHLVLNNPQTMIDVNYKEYASPETRYCPAGVYEIVEENGNPRLQINAANCVHCKTCDIKDPTQNITWICPEGASGPNYGGM

SEQ ID NO: 27209 - protein, 79 aa, Neisseria meningitidis; identical to SEQ ID NO: 1083

SEQ ID NO: 27210 - protein, 59 aa, Neisseria meningitidis
MFCIVVYRFRTFVRLKAGKHRNESTQRKCRLNMCSGGVLLGGIGVERLKKGFRRSLGVW

SEQ ID NO: 27211 - protein, 215 aa, Neisseria meningitidis; identical to SEQ ID NO: 4487

SEQ ID NO: 27212 - protein, 231 aa, Neisseria meningitidis; identical to SEQ ID NO: 1993

SEQ ID NO: 27213 - protein, 93 aa, Neisseria meningitidis
MKKSLFAAALLSLVLAACGGEKAAEAPATEAPAAEAPAAEAPAAEAPAAEAAATEAPAAEAAATEAPAAEAPAAEAAATEAPAAEAPAAEAAK

SEQ ID NO: 27214 - protein, 54 aa, Neisseria meningitidis; identical to SEQ ID NO: 25649

SEQ ID NO: 27215 - protein, 215 aa, Neisseria meningitidis; identical to SEQ ID NO: 709

SEQ ID NO: 27216 - protein, 190 aa, Neisseria meningitidis; identical to SEQ ID NO: 5382

SEQ ID NO: 27217 - protein, 119 aa, Neisseria meningitidis
MNIKHLITAALIASAAFAAQAAPQKPLSAAQTAQHPAVWIDVRSEQEFSEGHLHNAVNIPVDQIVRRIHEAAPDKDTPVNLYCRSGRRAEAALQELKKAGYTNVANHGGYEDLLTKGMK

SEQ ID NO: 27218 - protein, 197 aa, Neisseria meningitidis
MRKQNTLTGIPTSDGQRGFALFIVLMVMIVVAFLVVTAAQSYNTEQRISANESDRKLALSLAEAALREGELQVLDLEYDTDSKVTFSENCGKGLCTAVNVRTNNDNEEAFDNIVVQGKPTVEAVKRSCTANSTNLCIDNKGTEYKKGTQSVSKMPRYIIEYLGVKNGENVYRVTAKAWGKNANTVVVLQSYVSNNDE

SEQ ID NO: 27219 - protein, 463 aa, Neisseria meningitidis; identical to SEQ ID NO: 24124

SEQ ID NO: 27220 - protein, 456 aa, Neisseria meningitidis
MINPIASLSPLDGRYAQSVEALRPIFSEYGLMKARVKVELNWLKALAAEPKIAEVPPFSAETLAEIDTVIENFSLEDAAAVKAIEATTNHDVKAIEYWLKKRFAEVPEVAAVSEFIHFACTSEDINNLSHALMLQEAREAVLLPKLAEIIGKLTAMAHDLAAVPMMSRTHGQPATPTTLGKETANVVYRLQRQFKNLQAQEFLGKINGAVGNYNAHMVAYPDVDWETHCRNFVEISLGLTFNPYTIQIEPHDYMAEFFQTLSRINTILIDFNRDVWGYISLGYFKQKVKAGEVGSSTMPHKVNPIDFENSEGNLGMSNAVLGFLSEKLPISRWQRDLTDSTVLRNMGVGVGYAVLGFAAHLRGLNKLEPNPAALAADLDATWELLAEPIQTVMRRYGVADPYEKLKDLTRGKGGITPEVLKVFIGSLEIPTEAKAKLLELTPALYVGKAEALAKRI

SEQ ID NO: 27221 - protein, 246 aa, Neisseria meningitidis
MNPLISDFQTPQQRTPVIVALDFSNEKDTLGFVRNLDPTLCQIKIGKELFTATGRNLAESLINQGFKLFLDLKYHDIPHTVAQACKVAADMGVWMVDMHASGGRRMMEAAAEAVAGYGTKPLLIGVTVLTSMEQSDLAEIGLNIAPEEQVIRLAKLAQSSGLDGVVCSAQEAAPLRRELGQDFVLVTPGIRLDVAGNNDDQRRIMTPAEALAAGSTYLVMGRPVTQAADPLAVLREVNRVANLEAN

SEQ ID NO: 27222 - protein, 295 aa, Neisseria meningitidis
MPYQQITVNVNDAVAERLADALMEHGALSAAIEDAYAGTQNEQAIFGEPGMPAEQIWQQSKVIALFGEHDEAAAIIQIAAQECGLKDLAYTGETIEDQDWVRLTQSQFDPIRISDRLWITPSWHEAPEGTAVNLRLDPGLAFGTGSHPTTRLCLKWLDTQLKNGESVLDYGCGSGILTIAALKLGAGSAVGVDIDEQAVRAGKDNAEQNNVDAQFFLPDGLPQGQFDVVVANILANPLRMLGEMLAARTKQGGRIVLSGLLDEQAEELGGIYSQWFDLDPAETEEGWARLSGTKR

SEQ ID NO: 27223 - protein, 249 aa, Neisseria meningitidis; identical to SEQ ID NO: 131

SEQ ID NO: 27224 - protein, 71 aa, Neisseria meningitidis
MDQSVLRVNQVAERLGVSRSTVWNWGNTKSRHYRADFPRPFKVSANVVGWFSSEIDDYIGKLAAKREEQAG

SEQ ID NO: 27225 - protein, 225 aa, Neisseria meningitidis; identical to SEQ ID NO: 25428

SEQ ID NO: 27226 - protein, 268 aa, Neisseria meningitidis; identical to SEQ ID NO: 8872

SEQ ID NO: 27227 - protein, 158 aa, Neisseria meningitidis; identical to SEQ ID NO: 5652

SEQ ID NO: 27228 - protein, 389 aa, Neisseria meningitidis
MSKKLHPQTLAIRGGKEQTEYREHNQALFLTSSFMWDNAQHAADLFSKKIKGFTYTRTANPTTAAFEKRIAALEGAERAVATSTGMSAIQAAFFTFLQAGDHVVSSRSLFGTTVGFINNIVTKFGIEVSHVSPTDINEWKAAVKANTKLLFLETPSNPLGEVADLEALAELAHGIGAILVVDNSLLSPIGSQPLKHGADISVSSATKAIDGHGRVMGGVLAGSEELMAQAAVYCNSCGLAMSPFNAWQLLSGVETLSLRMEKQFDNALKIAQWLQAQPQVQAVYYTGLPDHPQAELIRKQQNGGGIVIGFEVADQEAAWKVVDGVELFSRTANLGDVRSTITHPWTTTHGRMQPEEKLAANIRPGLVRLSVGLEYVGDLIDDLKQALAR

SEQ ID NO: 27229 - protein, 112 aa, Neisseria meningitidis; identical to SEQ ID NO: 14355

SEQ ID NO: 27230 - protein, 513 aa, Neisseria meningitidis; identical to SEQ ID NO: 14647

SEQ ID NO: 27231 - protein, 199 aa, Neisseria meningitidis; identical to SEQ ID NO: 360

SEQ ID NO: 27232 - protein, 205 aa, Neisseria meningitidis; identical to SEQ ID NO: 2641

SEQ ID NO: 27233 - protein, 38 aa, Neisseria meningitidis; identical to SEQ ID NO: 15032

SEQ ID NO: 27234 - protein, 256 aa, Neisseria meningitidis
VSETQNEQPVQPLVEHLIELRRRLMWTVVGILVCFFGMMPFAQQLYTFIADPLMANLPKDTSMIATDVIAPFFVPVKVTLMAAFLISLPHTLYQIWAFVAPALYQNEKRLITPLVLSSVSLFFIGMAFAYFLVFPVIFKFLASVTPVGVNMATDIDKYLSFILGMFVAFGTTFEVPIVVILLTKIGVVTTEQLKRARPYVIVGAFVIAAIITPPDVISQTLLAIPLILLYEAGIWFGRFFTPRSEQDGDIQPPATT

SEQ ID NO: 27235 - protein, 177 aa, Neisseria meningitidis
LTEGQKSAVTEYYLNHGEWPANNSSAGVASVSTDIKGKYVQSVTVANGVITAQMASSGVNKEIQGKKLSLWAKRQNGSVKWFCGQPVTRTDNAKDDAKDDAVTAAATGTDKIDTKHLPSTCRDASSASRTKTPGFAFKYFQKISRYRVLPESRQMTKKLRHSRAGGNLGLSAQKLIG

SEQ ID NO: 27236 - protein, 247 aa, Neisseria meningitidis
VVLVGGDPASAVYVRNKKTACQKCGIKSLSYELPESTSQEELLALVDRLNADSEVDGILVQLPLPKHLDSQAVLERISPDKDVDGFHPYNVGRLAVKMPLMRPCTPKGVMTLLEAYGIDPKGKKAIVVGASNIVGRPQALELLLARATVTVCHSATENLADEVAGADILVVGVGIPNFVKGEWIKPGAVVIDVGINRLDDGSLCGDVEFETAKERAAMITPVPGGVGPMTIATLMENTLHAASLHDA

SEQ ID NO: 27237 - protein, 377 aa, Neisseria meningitidis; identical to SEQ ID NO: 2530

SEQ ID NO: 27238 - protein, 444 aa, Neisseria meningitidis; identical to SEQ ID NO: 2522

SEQ ID NO: 27239 - protein, 159 aa, Neisseria meningitidis; identical to SEQ ID NO: 929

SEQ ID NO: 27240 - protein, 158 aa, Neisseria meningitidis
MEHLFGKWLPDLPADVSDGISLPMVRLLHTRSLTAALRALPHTFSVELLKLGELETECGGRLVREVLLKLDGIPVVAARSECRIGSAFWQNILDCGTRPLGERLFQADLEGARSAFEFAVSGEGCGRYFAARRSRFSRHGEEMLLTEYFLPELKRFIG

SEQ ID NO: 27241 - protein, 208 aa, Neisseria meningitidis
MKNIVILISGRGSNMQAIVNAAILNVRIAAVLSNSETAAGLQWAAGQGIPTDSLNHKNFESRLAFDTAMMEKIDAYQPDLVVLAGFMRILTPEFCAHYEGRLMNIHPSVLPSFTGLHTHERALEAGCRVAGCTIHFVTAELDCGPIVSQGIVPILDGDTADDVAARVLAVEHKLYPKAVADFAAGRLIIEGNRVRNSENADAARFLTA

SEQ ID NO: 27242 - protein, 154 aa, Neisseria meningitidis
MKELDKIDFRILKILQQNARIPMMELAEKVGLSTTPVTERVRRLEREHYISGYHAHLNPHLLGKPLLVFVELKLQSKSGNIFEDFKKEVLKIPQIMECHLVSGEYDYLIKVRLPDMSAYRDMLGNILLQLPAASESRSYVVMEEVKENPVLDLD

SEQ ID NO: 27243 - protein, 436 aa, Neisseria meningitidis; identical to SEQ ID NO: 21183

SEQ ID NO: 27244 - protein, 531 aa, Neisseria meningitidis; identical to SEQ ID NO: 3351

SEQ ID NO: 27245 - protein, 423 aa, Neisseria meningitidis; identical to SEQ ID NO: 3498

SEQ ID NO: 27246 - protein, 729 aa, Neisseria meningitidis
MIYHRIAVNVPLSDGLLTYSHSDPLPPGTRVLVPFRNKTVVGMVWETDIAPDMDTARILSVRTAFSDEPLLPESWRDLLSFTSRYYHYPTGQAVFAALPQGLKETRAVEMPQPPLFYALNEAGRAQTPPPARFNKKAALWDALLSGEMTMAALKQVNAQAAKLIEDWAEQGWIETTEAAKPVLRSCNGQASHSEFVLNADQQKASDAIQTALGRFQPFLLYGITGSGKTEVYFDAMAKVLAQGRQVLFLLPEINLTPQLLKRVGNRFADVPTAVLHSQMAAGRRTQDYLRAMSGQAKLVIGTRLAVFTPMDDVGLIVVDEEHDGSFKQDNELRYHARDLAVWRAKQGGCPIILGSATPSLESWHKAQSGAYRLLQLTERAHTAAQLPQVDILNVGRLKLDNGFSPQALQLLKQNFEAGGMSLVYLNRRGFAPALFCGDCGHTFGCPNCSAKMVLHQRARQLRCHHCDHREPIPYKCPDCGNQDLTAVGHGTQRVEETLRTFLPKAAVVRVDRDSTAHKNDWADLYRRIADNKIDILVGTQMLAKGHDFARLNLVIVLNADGSLYSADFRAPERLFAELMQVSGRAGRADKPGKVLIQTQLPEHPVFAAVKAQDYAVFAENELNERQMFAMPPFGFQTAVRADAPRVADAMEFLNAAKETLAPLLPESVSQFGAAPMLMVRLAERERAQIFLESVSRQDLHRAVSLWVQVLQQNRDSKIRWSVDVDPQEA

SEQ ID NO: 27247 - protein, 238 aa, Neisseria meningitidis
MTDTAENQTQNNWQAEHPRSIRSFVLRQSHMTAAQQRAIDTLWDSFGIDYQATPADLDANFGSNRPKILEIGFGMGTATAEIALRLPETDFLAIDVHGPGVGNLLKLIDENHLENIRVMRHDAVEVVENMLQDGSLDGIHIFFPDPWHKKRHHKRRLIQAPFIAKLLPKLKTGGYIHLATDWEEYAQQMLEVLSSFDSLQNTAADYAPTPDYRPETKFEARGKRLGHGVWDLVFKRIG

SEQ ID NO: 27248 - protein, 134 aa, Neisseria meningitidis; identical to SEQ ID NO: 4298

SEQ ID NO: 27249 - protein, 591 aa, Neisseria meningitidis; identical to SEQ ID NO: 22531

SEQ ID NO: 27250 - protein, 153 aa, Neisseria meningitidis; identical to SEQ ID NO: 750

SEQ ID NO: 27251 - protein, 183 aa, Neisseria meningitidis
LSGININLKNGDSLLIRGPSGCGKTSLLRAPAGLWPFGSSGKVSRPPHQDILFLPQRPYTAQGSLRDAVCYPDIDKQHPELAEAMNTCRLGYLIDKLDKTDDWQHKLSPGELQRVAFVRALLSQPKVILLDEATAALDEPAEAALYRALKQKLPDSIIISIGHRSTLNAFHNMRLDVGNVACG

SEQ ID NO: 27252 - protein, 71 aa, Neisseria meningitidis; identical to SEQ ID NO: 2650

SEQ ID NO: 27253 - protein, 196 aa, Neisseria meningitidis; identical to SEQ ID NO: 5310

SEQ ID NO: 27254 - protein, 351 aa, Neisseria meningitidis; identical to SEQ ID NO: 1414

SEQ ID NO: 27255 - protein, 473 aa, Neisseria meningitidis; identical to SEQ ID NO: 719

SEQ ID NO: 27256 - protein, 229 aa, Neisseria meningitidis
MLFEGLPCLAVWCKNRLSAVLPVGGLNVSENLLEIETHPFDPVLPPKAAVMMMGTFPPKEDKRAMQFHYPNFQNDMWRVYGLVFFNDAAHFQRLSEKAFDAEKIKTFLHERGIASCPTVLKAAREHGNASDKFLKVVETVDLAAVLAKIPECRHICTTGGKATEILLDIQGGGIKMPKTGETVPFPFAGRDLTLTRLPSTSRAYPLSLAKKAAAYRAFFEMAGLCEKQL

SEQ ID NO: 27257 - protein, 78 aa, Neisseria meningitidis; identical to SEQ ID NO: 1246

SEQ ID NO: 27258 - protein, 146 aa, Neisseria meningitidis
MYETADFGAVKHLLPDSVQALITVIGFNETLELVRLMGGTTYPLRQGYTKNSQSRVAYLEEIIGSEAAGRLVEAMAPCNLFIPRCETALYELRNRKIRSQFDRQTAGGTPAYEAVNDLALAHRLSDRHVWRILKQADKEAEQENLF

SEQ ID NO: 27259 - protein, 154 aa, Neisseria meningitidis; identical to SEQ ID NO: 1733

SEQ ID NO: 27260 - protein, 169 aa, Neisseria meningitidis; identical to SEQ ID NO: 19393

SEQ ID NO: 27261 - protein, 134 aa, Neisseria meningitidis
MTAQPCPICTAQDEDILLQTPNLRVIAIHNDSGSPAFCRVIWRKHIAEMTDLSAAERGELMEMVYKVEAAMRQVFRPAKINLASLGNVVPHLHWHIIARFENDASFPAPIWANPVRKHGMTLPQDWTEQLKKLL

SEQ ID NO: 27262 - protein, 630 aa, Neisseria meningitidis
MRIETENALELFFPKPALSLVYFEAIANSLDANATKINIEINIQDKTAFHTLKIKITDNGDGFIDENFNRFKTLLTPKDEAHKGIGRLVFLKYFKKVKIQSEWLEGSKSFTFDKDDIKNITEGNKQNKTKKTELLFCEFTGKKIHKYDYIRPIELKFAIIEHFLPKLNTLTQQSIPFEITIDLKIDTDGGNLYSDKVSITKEDLPNLIIDTANPISIQSNLGQEYKIKTSYLIQEVDKISQLKVAFNIDNRTVLADNFLKRNVLPNTGYYCIFLFESELFNNCADMSRQRFNLPDEISENQLNRLLRNKIGEILSDRIPVISEKNKETKQNFERDYPHLLGYFDKNIVGLIDKDEALDSAQSHLFQEQKRILEAENLSDEQYQKSLEFSSRVLTEYVLYREKIISKMEDLVNSKSKEAEIHNLIIPRYHQFEQESLVSNIYQNNAWLLDDKFMSFRTILSEQEMRKIIQEIQLDDEKKTSDERGRPDIALIFSADPTNNEKVDVVVIEIKDSNDDLKNSMYAINQLLDRSNKLVNYCKNIQRMWYYAVVDIDHTMNRQLMQSGYSPLFSKGKIFYKENKTFIYKDETESETIGEVPTPTFVISFDAIVNDAKSRNHTFLEVLRENMKRFA

SEQ ID NO: 27263 - protein, 207 aa, Neisseria meningitidis; identical to SEQ ID NO: 1132

SEQ ID NO: 27264 - protein, 451 aa, Neisseria meningitidis
MSIQSGEILETVKMVADQNFDVRTITIGIDLHDCISTDIDVLNQNIYNKITTVGKDLVATAKYLSAKYGVPIVNQRISVTPIAQIAAATHADSYVSVAQTLDKAAKAIGVSFIGGFSALVQKGMSPSDEVLIRSIPEAMKTTDIVCSSINIGSTRAGINMDAVKLAGETIKRTAEITPEGFGCAKIVVFCNAVEDNPFMAGAFHGSGEADAVINVGVSGPGVVKAALENSDATTLTEVAEVVKKTAFKITRVGELIGCEASKMLNIPFGILDLSLAPTPAVGDSVARILEEMGLSVCGTHGTTAALALLNDAVKKGGMMASSAVGGLSGAFIPVSEDEGMIAAAEAGVLTLDKLEAMTAVCSVGLDMIAVPGDTPAHTISGIIADEAAIGMINSKTTAVRIIPVTGKTVGDSVEFGGLLGYAPVMPVKEGSCEVFVNRGGRIPAPVQSMKN

SEQ ID NO: 27265 - protein, 553 aa, Neisseria meningitidis
MLTYTPPDARPPAKTHEKPWLLLLMAFAWLWPGVFSHDLWNPAEPAVYTAVEALAGSPTPLVAHLFGQTDFGIPPVYLWVAAAFKHLLSPWAADPYDAARFAGVFFAVVGLTSCGFAGFNFLGRHHGRSVVLILIGCIGLIPVAHFLNPTAAAFAAAGLVLHGYSLARRRVIAASFLLGTGWTLMSLAAAYPAAFALMLPLPVLMFFRPWQSRRLMLTAVASLAFALPLMTVYPLLLAKTQPALFAQWLDDHVFGTFGGVRHVQTAFSLFYYLKNLLWFALPALPLAVWTVCRTRLFSTDWGILGIVWMLAVLVLLAVNPQRFQDNLVWLLPPLALFGAAQLDSLRRGAAAFVNWFGIMAFGLFAVFLWTGFFAMNYGWPAKLAERAAYFSPYYVPDIDPIPMAVAVLFTPLWLWAITRKNIRGRQAVTNWAAGVTLTWALLMTLFLPWLDAAKSHAPVVRSMEASLSPELKRELSDGIECIGIGGGDLHTRIVWTQYGTLPHRVGDVQCRYRIVLLPQNADAPQGWQTVWQGARPRNKDSKFALIRKIGENI

SEQ ID NO: 27266 - protein, 206 aa, Neisseria meningitidis; identical to SEQ ID NO: 18030

SEQ ID NO: 27267 - protein, 126 aa, Neisseria meningitidis; identical to SEQ ID NO: 25453

SEQ ID NO: 27268 - protein, 348 aa, Neisseria meningitidis
MPSEAFRRHRAYRENKLQPLVSVLICAYNVEKYFAQSLAAVVNQTWCNLDILIVDDGSTDGTLAIAQRFQEQDGRIKILAQAQNSGLIPSLNIGLDELAKSGMGEYIARTDADDIAAPDWIEKIVGEMEKDRSIIAMGAWLEVLSEEKDGNRLARHHEHGKIWKKPIRHEDIAAFFPFGNPIHNNTMIMRRSVIEGGLRYDTECDWAEDYQFWYEVSKQGRLAYYPEALVKYRLHANQVSSKYSIRQHEIAQGIQKTARNDFLQSMGFKTRFDSLEYRQIKAVAYELLEKDLSEEDFERVRRFLYQCFKRTDTPPAGAWLDFAADGRMRRLFTMRQYFGILHRLLKNR

SEQ ID NO: 27269 - protein, 179 aa, Neisseria meningitidis; identical to SEQ ID NO: 403

SEQ ID NO: 27270 - protein, 165 aa, Neisseria meningitidis; identical to SEQ ID NO: 3132

SEQ ID NO: 27271 - protein, 119 aa, Neisseria meningitidis; identical to SEQ ID NO: 420

SEQ ID NO: 27272 - protein, 321 aa, Neisseria meningitidis; identical to SEQ ID NO: 4435

SEQ ID NO: 27273 - protein, 358 aa, Neisseria meningitidis
MKPSILEKLQQLGDRLEEVTHLLGQPEATSDMDNYRKLTREHAELTPVVEVFQNYQLAQSDLADAEEMLSDPEMKDFAAEEIEAAKAKINTLDTELQKLLLPKDADDDKNIFIEIRAGTGGDEAALFAGDLLRMYSRYAERNRWQVEIVSANESELGGYKEVIARIVGLGAYSRLKFESGGHRVQRVPATESQGRIHTSACTVAVMPEADELEDIELNPVDLRIDTFRASGAGGQHINKTDSAVRITHLPTGMVVECQDGRSQHANKAQAMKVLAARLNDAQKREAQAKEAAERKSLIGSGDRSERIRTYNYPQGRVTDHRINLTLHKLDFVMDGDLAEITNALIAEHQAELLAAMGD

SEQ ID NO: 27274 - protein, 238 aa, Neisseria meningitidis
LYEFKRPSEKQLRQRRGCQRDRPTKGSNAGVRQNAAQVAAVVADKLGNTRSYGRYQTAKTLPEAELQNKSDIKNRPKNPDGGSNRLPRLAGAAGGFDRIAVGIGKAEKGFAAFLMPLGSVSEQTVFGGIAFAGCGNVGREDGTPAVQPQRDSAAVQTADVHRQTVLAGKCPKICRAGLVLNGRHMPSSAVIIRLRHGTGRQRQNRYGQREKPDIHKSSPIKIRYETTALIPSCGNAIL

SEQ ID NO: 27275 - protein, 183 aa, Neisseria meningitidis
MPSERRPFQTAFLSNRKTVGKLAERVQSRYDGLHKFKHICSAAMALIKEPLDKVKQRNEELEAAEEAAAQEALGREQEAARVSEWEERYKLSRSEFEQFWKGLPQTVQNKLQASQKTWKSGMDKICANNAKAEGKTPNGIKFSELACKTAKTEVRLEELHNRKKALIDEMAREADKKELSKRL

SEQ ID NO: 27276 - protein, 74 aa, Neisseria meningitidis; identical to SEQ ID NO: 2281

SEQ ID NO: 27277 - protein, 329 aa, Neisseria meningitidis
MKQPVFAVTSGEPAGIGPDICLDLAFARLPCRCAVLGDKHLLRARAEALGKSVVLRDFDPESGGAAYGELEVLHIPAVEAVEAGKLNPANAAYVLQLLDTALAGISDGIFDGIVTAPLHKGIINDARASTGFFSGHTEYLAEKSGTGQVVMMLAGQGLRVALVTTHLPLKDVAAAITQPLIESVARILHHDLKHKFGIKNPKILVAGLNPHAGEGGHLGHEETDTIIPALENLRREGINLAGPYPADTLFQPFMLEGADAVLAMYHDQGLPVLKYHSFGQGVNITLGLPFIRTSVDHGTALDLAATGRADSGSLITAVETAVEMARGSL

SEQ ID NO: 27278 - protein, 531 aa, Neisseria meningitidis
MSIVEIKVPDIGGHENVDIIAVEVKAGDTIAVDDTLITLETDKATMDVPADAAGVVKEVKVKVGDKISEGGVILTVETGAAAAEAAPAAAEAQPAPAAAPVAAGGATVQVAVPDIGGHTDVDVIAVEIKVGDTVAEDDTLITLETDKATMDVPCTAAGVVKAVFLKVGDKVSEGTAIIEVETAGSAAAAPAQAAQAAAPAAAPAPTAVAAPAPSAPAAAKIDEAAFAKAHAGPSARKLARELGVDLGQVKGTGLKGRIVGDDIKAFVKSVMQGGAAKPAAAGASLGSSLDLLPWPKVDFSKFGNVEVKELSRIKKISGQNLSRNWVVIPHVTVHEEADMTELEEFRKQLNKEWEREGVKLSPLAFIIKASVSALKAFPEFNASLDGDNLVLKNYFNIGFAADTPNGLVVPVIKDVDQKGLKQISQELTELSKKAREGKLKPQEMQGACFTISSLGGIGGTGFTPIVNAPEVAILGVCKSQIKPIWNGKEFAPRLMCPLSLSFDHRVIDGAAGMRFTVFLAKLLKDFRRITL

SEQ ID NO: 27279 - protein, 468 aa, Neisseria meningitidis
VEFSTKTEILQEQQAGAQLFVCTEEAQLNHPTALALLSSLEEGQNFADTKIPTGNGLQAVAVCCLKSTGRAALNKAAAEAAKWAQNQETVNTDVHAFEEAQAAAVAEAFAIAFGNAAYRFDRYKKEAKPAKFETAVFHSAHEAVVKEALRVAEAQVYGQSLCRDLGNAAPNECTPEFLARTAKAEAEKLGAHAKIIEKDYIKENMGSFWSVAKGSAEAPYLVELSYFGAADKEAAPVVLVGKGITFDTGGISLKPGLNMDEMKFDMCGAATVISTFCAAVKLQLPINLIAIVATCENMPSGAANKPGDVVKSMKGLTIEVLNTDAEGRLILCDALTYAEQFKPKAVIDVATLTGACIVALGHDVSGVMGNNQDLVDSLLAASYNVDDKAWQLPLFETYKDQLKSNFADIPNIGTPGAGTITAATFLSYFTEDYPWAHLDIAGTAWKSGAEKGATGRPVPLLLNYLRNL

SEQ ID NO: 27280 - protein, 109 aa, Neisseria meningitidis
MTTYRDLVQRTVACRHADLELGLSRAREQEPFVIHVSELLDKAGIEYAVRMDKDFQTTFCVEFSATAPADVIGILQKYYSVFFDGQKVEAASRNPEGYAVRIVFGDVPV

SEQ ID NO: 27281 - protein, 95 aa, Neisseria meningitidis; identical to SEQ ID NO: 738

SEQ ID NO: 27282 - protein, 1071 aa, Neisseria meningitidis
MPKRTDLKSILIIGAGPIVIGQACEFDYSGTQACKALREEGYKVILVNSNPATIMTDPEMADVTYIEPIMWQTVEKIIAKERPDAILPTMGGQTALNCALDLARNGVLAKYNVELIGATEDAIDKAEDRGRFKEAMEKIGLSCPKSFVCHTMNEALAAQEQVGFPTLIRPSFTMGGSGGGIAYNKDEFLAICERGFDASPTHELLIEQSVLGWKEYEMEVVRDKNDNCIIICSIENFDPMGVHTGDSITVAPAQTLTDKEYQIMRNASLAVLREIGVNTGGSNVQFAVNPENGEMIVIEMNPRVSRSSALASKATGFPIAKVAAKLAVGFTLDELRNDITGGKTPASFEPSIDYVVTKIPRFAFEKFPAADDRLTTQMKSVGEVMAMGRTIQESFQKALRGLETGLCGFNPRSSDKAEIRRELANPGPERMLFVADAFRAGFTLEEIHEICAIDPWFLAQIEDLMKEEKAVSDGILSDLDFAALRRLKRKGFSDKRLAQLLNVSEKEVREHRYALKLHPVYKRVDTCAAEFATETAYLYSTYEEECESRPSDRKKVMILGGGPNRIGQGIEFDYCCVHAALALRESGFETIMVNCNPETVSTDFDTSDRLYFEPLTLEDVLEIVRTENPWGVIVHYGGQTPLKLANALVENGVNIIGTSADSIDAAEDRERFQKVLNDLGLRQPPNRIAHNEEEALVKAEEIGYPLVVRPSYVLGGRAMQIVHSAEALQKYMREAVQVSEDSPVLLDFFLNNAIEVDVDCVSDGKDVVIGGIMQHVEQAGIHSGDSGCSLPPYSLSEEIQDEIRRQTKAMAYALGVVGLMNVQFAVQDGVVFVLEVNPRASRTVPFVSKATGVPLAKVGARCMAGISLKEQGVEKEVVPDFYAVKEAVFPFIKFPGVDTILGPEMRSTGEVMGVGASFGEAYYKAQLGAGERLNPTGKIFLSVREEDKERVIKTAKNFQVLGYGICATRGTAQYLTEQGLIVQTINKVPEGRPHIGDALKNGEIALVVNTVSSDPQSVSDSHIIRQSALQQRVPQYTTTAGGEAMSEGAKSRDHLGVYSVQELHGRLKNRN

SEQ ID NO: 27283 - protein, 140 aa, Neisseria meningitidis
MSEQTALAVCADGVETALAEAASLLEEGCGSVLVLAADDPLPEGYVVSATRAPFAYALAMVLTKGTRYSLTLSASDDMPSEAGMLPEAYWSGLEWVRFLLNGSRECRRVYRNREWLWQPASCRLKISAMSAPSTTWYRRY

SEQ ID NO: 27284 - protein, 208 aa, Neisseria meningitidis; identical to SEQ ID NO: 3160

SEQ ID NO: 27285 - protein, 206 aa, Neisseria meningitidis
MKPQFITLDGIDGAGKSTNLAVIKAWFERRGLPVLFTREPGGTPVGETLREILLNPETKAGLRAETLMMFAARMQHIEDVILPALSDGIHVVSDRFTDATFAYQGGGRGMPSEDIEILEHWVQGGLRPDLTLLLDVPLEVSMARIGQTREKDRFEQEQADFFMRVRGVYLDRAAACPERYAVIDSNRNLDEVRNSIEKVLDGHFGC

SEQ ID NO: 27286 - protein, 203 aa, Neisseria meningitidis
MITTYKTITSSTQAEFKDKGSRFIAFAYPIRTLADVKKYLDPLKEEHHKARHWCYAYRLGVDGVQFRANDDGEPSGSAGRPILGQIDSVGITDVLVVVVRYFGGTLLGVPGLIHAYKEATAQALAVAEVVEKNIEKTVWLKCEYPFLNEAIRIAKQYQADVLERDLQLDCRLTVSLSLVNYEACVAAWKSTRQIEVNTEKPFE

SEQ ID NO: 27287 - protein, 504 aa, Neisseria meningitidis
MTTSKCPVTHLTMNNGAPVADNQNSLTAGPRGPLLAQDLWLNEKLADFVREVIPERRMHAKGSGAFGTFTVTHDITKYTRAKIFSEVGKKTEMFARFTTVAGERGAADAERDIRGFALKFYTEEGNWDMVGNNTPVFFLRDPRKFPDLNKAVKRDPRTNMRSATNNWDFWTLLPEALHQVTIVMSDRGIPAGYRHMHGFGSHTYSFWNEAGERFWVKFHFRTQQGIKNLTNEEAAKIIADDRESHQRDLYEAIERGEFPKWTMYIQVMPEADAEKVPYHPFDLTKVWPKKDYPLIEVGEFELNRNPENFFADVEQSAFAPSNLVPGVGASPDKMLQARLFNYADAQRYRLGVNFRQIPVNRPRCPVHSNQRDGQGRADGNYGSLPHYEPNSFGQWQQQPDFAEPPLKINGDAAHWDYRQDDDDYFSQPRALFNLMNDAQKQALFGNTAAAMGDAPDFIKYRHIRNCYRCDPAYGEGVAKALGLTVEDAQAARATDPALGQPGLL

SEQ ID NO: 27288 - protein, 143 aa, Neisseria meningitidis
MKNNIFLNLNKKSINNNHFVISIFFETIYQFETKDTLLECFKNITITGHFGVIGAQYEKIDATRWIGDYEEVNGFEYIDKAPSIYFSVGDDFNPEELIIPINLAYYYFNIAISDFLIAHPEYQKKCKEIQKTYSQTNCSLHET

SEQ ID NO: 27289 - protein, 321 aa, Neisseria meningitidis; identical to SEQ ID NO: 6649

SEQ ID NO: 27290 - protein, 65 aa, Neisseria meningitidis; identical to SEQ ID NO: 127

SEQ ID NO: 27291 - protein, 351 aa, Neisseria meningitidis
MPSETRLPNFIRVLIFALGFIFLNACSEQTAQTVTLQGETMGTTYTVKYLSNNRDKLPSPAEIQKRIDDALKEVNRQMSTYQPDSEISRFNQHTAGKPLRISSDFAYVTAEAVRLNRLTHGALDVTVGPLVNLWGFGPDKSVTREPSPEQIKQAASYTGIDKIILKQGKDYASLSKTHPKAYLDLSSIAKGFGVDKVAGELEKYGIQNYLVEIGGELHGKGKNARGEPWRIGIEQPNIVQGGNTQIIVPLNNRSLATSGDYRIFHVDKNGKRLSHIINPNNKRPISHNLASISVVADSAMTADGLSTGLFVLGETEALKLAEREKLAVFLIVRDKGGYRTAMSSEFEKLLR

SEQ ID NO: 27292 - protein, 182 aa, Neisseria meningitidis; identical to SEQ ID NO: 977

SEQ ID NO: 27293 - protein, 59 aa, Neisseria meningitidis; identical to SEQ ID NO: 5877

SEQ ID NO: 27294 - protein, 103 aa, Neisseria meningitidis
MKYKSEALAAIHEMMEGSYNIGAIDKKTMRGFDKSCLTEIKPLSGGDIKAIREKEALSQAAFAIYLNVGKNHVSAWERGVKKPSGAALKLLTIVKNKGIEAIA

SEQ ID NO: 27295 - protein, 82 aa, Neisseria meningitidis; identical to SEQ ID NO: 13473

SEQ ID NO: 27296 - protein, 758 aa, Neisseria meningitidis
MTTLHFSGFPRVGAFRELKFAQEKYWRKEISEQELLAVAKDLREKNWKHQAAANADYVAAGDFTFYDHILDLQVATGAIPARFGFDSQNLSLEQFFQLARGNKDQFAIEMTKWFDTNYHYLVPEFHADTEFKANAKHYVQQLQEAQALGLKAKPTVVGPLTFLWVGKEKGAVEFDRLSLLPKLLPVYVEILTALVEAGAEWIQIDEPALTVDLPKEWVEAYKDVYATLSKVSAKILLSTYFGSVAEHAALLKSLPVDGLHIDLVRAPEQLDAFADYDKVLSAGIIDGRNIWRANLNKVLETVEPLQAKLGDRLWISSSCSLLHTPFDLSVEEKLKANKPDLYSWLAFTLQKTQELRVLKAALNEGRDSVAEELAASQAAADSRANSSEIHRADVAKRLADLPANADQRKSPFADRIKAQQAWLNLPLLPTTNIGSFPQTTEIRQARAAFKKGELSAADYEAAMKKEIALVVEEQEKLDLDVLVHGEAERNDMVEYFGELLSGFAFTQYGWVQSYGSRCVKPPIIFGDVSRPEAMTVAWSTYAQSLTKRPMKGMLTGPVTILQWSFVRNDIPRSTVCKQIALALNDEVLDLEKAGIKVIQIDEPAIREGLPLKRADWDAYLNWAGESFRLSSAGCEDSTQIHTHMCYSEFNDILPAIAAMDADVITIETSRSDMELLTAFGEFKYPNDIGPGVYDIHSPRVPTEAEVEHLLRKAIEVVPVERLWVNPDCGLKTRGWKETLEQLQVMMNVTHKLRAELAK

SEQ ID NO: 27297 - protein, 112 aa, Neisseria meningitidis
MTYRELVERQLAVRHADLELGLSRAREQEPFVIHVSDLLDKAGIEYAVRMDKDFQTTFHLEYPITNYNTFKRAVWQTLGAYYCVCNDGDGLEIASNRPDGYAVRIVFGDVPV

SEQ ID NO: 27298 - protein, 284 aa, Neisseria meningitidis; identical to SEQ ID NO: 6849

SEQ ID NO: 27299 - protein, 447 aa, Neisseria meningitidis
MFHSVNVFTGETLYRRPAQDYAEFERRLADLKMRGGAFAQLGVTERAARLQKFADRLEAEKERFAEMVCEEVGRCLHECRAEIGKSIELIRYYARLAPELLAHKTIATQASLSQVRFEPLGVVFAVMPWNYPVWQVLRFAVPAMCAGNACAVKPAPSVARVSQALFDLASDGIPLAGVWLDEAGTLKAVEDTDAMAFTGSTHTGRILAAHAGANLKKTVLELGGSNAFIVMPDADLERAAAEACYSRFRDAGQSCNAAKRIIVTEAAADRFITLFLAECAKLKMGDPKHPDTTLAPLHREDLRDRVHGQVEDAVSNGAVCLTGGKIPQGRGWFYPATVLDRVNPACRVWREEVFGPAALILRAENEEHAIALANDSPFGLGACIYTADTDRAWRFAEKIQAGSVFINRHTSSDLRLPFGGVKDSGYGRELSEFGLYEFVNVKTYWQK

SEQ ID NO: 27300 - protein, 245 aa, Neisseria meningitidis; identical to SEQ ID NO: 882

SEQ ID NO: 27301 - protein, 455 aa, Neisseria meningitidis
MPDLHTEFSRLLPADEIAELSPTLLKDQRNRFTSAPDIILQPRSVESVQTIMRFCYKHRIPVTPQGGNTGLCGAAVSENGVLLNLSKLNRIRSINLSDNCITVEAGSVLQTVQQAAEASNRLFPLSLASEGSCQIGGNIACNAGGLNVLRYGTMRDLIIGLEVVLPNGERVSHLHPLHKNTTGYDLRHLFIGSEGTLGIITAATLKLFARPSDKATAWVGIPDIESAVRLLTETQAHFAERLCSFELIGRFAAELSSEFSKFPLPTHSEWHILLELTDSLPDSNLDDRLVEFLYKKGFTDSVLAQSEQERIHMWALRENISASQRKLGTSIKHDIAIPIGRVADFVRRCAKDLEQNFKGIQIVCFGHLGDGSLHYNTFLPEILSNEVYRYENDINDAVYRNVLACNGTVAAEHGIGIIKKQWLDKVRTPAEIALMKSIKQHLDPYNIMNPGKLLP

SEQ ID NO: 27302 - protein, 113 aa, Neisseria meningitidis; identical to SEQ ID NO: 995

SEQ ID NO: 27303 - protein, 198 aa, Neisseria meningitidis; identical to SEQ ID NO: 6940

SEQ ID NO: 27304 - protein, 3100 aa, Neisseria meningitidis
MNRTLYKVVFNKHRNCMIAVAENAKREGKNTADTQAVGILPNDIAGFAGFIHSISVISFSLSLLLGSALILTSSSANAQGIVADKSAPAQQQPTILQTGNGIPQVNIQTPTSAGVSVNQYTQFDVGNRGAILNNSRSNTQTQLGGWIQGNLWLARGEARVVVNQINSSHSSQMNGYIEVGGRRAEVVIANPAGIAVNGGGFINASRATLTTGQPQYQAGALTGFQVRSGHVAITGQGLDARDTDFTQILSHAVKIDGPVWGKDVRVSAGKNNVSADGSIRSSHSPATNINSDNSLYAIDTGALGGMYAGKITLISTDRDASVRNQGQWFASAGNVAVNAEGKLVNTGMIAATGENHAVSLHARNVHNSGTVASQDDANIHSQTLDNSGTVLSSGQLTVRNLGRLKNHNNGTIQAARLDISTGGLDNTGNITQTGSQALDLVSAGKFDNSGKIGVSDVPQTGLNPNPSVIPQIPSTATGSGSSTISASKPGSNNPVSPTAPAKNYAGGRIQTTGAFDNAGSINAGGQIDIAAQNGLENSGSLNAAKLRVSGDSFNNTVKGKLQAHDLAVNTQTAKNSGHLLTLTGKIDNRELHNAGEIAANNLTLIHSGRLSNDKKGNIRAAYLQLDTAGLHNAGNILADSGTVTTKNNLHNTGKVSVARLNTEGQTLDNTHGHIEAETVNIQSQQLTNQSGHITATEQLTINSRNVDNQNGKLLSANQAQLAVSDGLYNQHGEIATNRQLSIHDKNQNTLALNNADGTIQSAGNVSLQAKSLANNGTLTAGNKLDIALTDDFVVERDLTAGKQLNLSIKGRLKNTHTLQAGHTLKLNAGNIDNQVTGKIIGGEQTDITSEQHVDNRGLINSDGLTHIGAGQTLTNTGTGKIYGNHIALDAQILLNREETTEGSTKAGAIAARKRLDIGAKEIHNQEGALLSSEGIFAVGNRLDEQHHAAGMADTFVNGSAGLEVQGDALMSVRNMQNINNHFKTETYLAKAEKQVRDYTVLGQNTYYQAGKDGLFDNSQGQKDQTTATFHLKNGSRIEANQWHVRDYHIETYKERIIENRPAHITVGGNLTASGQNWLNKDSRIVVGGRIITDDLNQKEITNQSTTGKGRTDAVGTQWDSVTKKGWYSGRKRQRRTERNHTPYHDTQLFTHDFDTPVSVIQQNAASPSFQPAASAIKLIDGVSTAAVNGQRIHTGNVVSLNNATVTLPNSSLYTTHPDNKGWLVETDPQFADYRRWLGSDYMLQQLKLDTNHLHKRLGDGYYEQKLVNEQIHQLTGYRRLDGYRSDEEQFKALMDNGLTAAKTFGLTPGIALSAEQVARLTSDIVWMENQTVTLSDGSTQTVLVPKVYALARKGDLNTSGGLISAEQVLLKLQNGNLTNSGTIAGRQAVLIQARNINSNGNIQADQIGLKAEKSINIDGGQVQAGRLLTAQAQNINLNGTTQTSGNERNGNTAIDRMAGINVVGSHTEQVDNRASDGILSLHADNDINLNAATVSNQVKGGTTQITAGNNLNLDTIRTEHREAYGALDDKNHRHVRQSAEVGSSIRTQNGAMLRAGNDLKIRQGELEADEGKTVLAAGRDVNISEGRQITELDASVSGKSKGILSSTKTHDRYRFSHDEAVGSNIGGGKMIVAAGQDINVRGSNLISDKGIVLKAGRDIQLEAASNRHFDAETHEYKKSGLSGGFRDGVLSVGYTKASTKSNQDQTVTTLTNSQVGSKQGNTVVVAERTLNTKAAILASGSDMHLQGRDVALNAGYTETNNNNDIEQKQSGLSMGITLNPIDAAKANYKRNMQGSGYSNSIVGKTLQRADAGAKASTAAFTPIVINGGRQKTTENRHQEDTQAVVTAVSAQGNLNIVADGGSIRSEGTKLTAEGDILLSATESITLDVARNTADQHGSRKRSGFSIDNRELIPAGTFNDRGNAQGNLDKAIGTQLSAGGMAVLQAQKADINIFGSSVAAQDDTTLSAGRNINIRSSQNNQTKSERQITSGIGTAVISDTEHFAGWMKNRKDSNSNQVEQIKSQVGSLGGNVNMQAGGNYTQQIANVVAAKDINITAKSVEILADHNRNNSHQSERDVKIGTFAKVSSPLIDLVNAAEGAVKSKADDRTQALQTLAAGAQAYSTYNTATSGGALAKAEVGFGFKTANSSQDQSQNHSQANVLNAGGNLNIRSTEGNIHLQNTQAQAAETLRLDSAKDLILESGQSSQSADGKNSSLGASVGVGVSVGAQTGVYAYGEVGGSKGKNHYLAQTHDHTTLQAKKIELASKGDTTLKGATATASRIDADVKGRLNIESVQDHTEQDNKQTGAGVRVQVSLGTAWEASGNFNQSKASGSSDSAAIQSGLFAGEGGYHIEADSIHLKGGAITSTAPKEQNELTAKRLTFENIQNQSSYSASNVSLSGSYGSDSPSETPDNADFRQTNLGKAFARSAGKNGTDFNPGLPQYEKGGDNSTTYATLSEGRLNIGGKETTTQELGINSDSSNAHRAVAALPDLAKITEKQQIIAKATSDIVSAAHTFSRNRQKTAAENKAKAEAEFEGRLKAQNDGSYEAYAKLDETERQKILINYSETYRKANAEAQNWGVGGKHSRALNAGITLTTGLLGGQSGLQSAVNAAAPYASEAIGRTFGHGENKNETAQAVGHFLLGAAIARVNGGNFAAGGSAAVAAEKAAEHLAQQYNDGKTAIDPQTGEFNANLLPEHIKEEIKSKSGVIASLTGAAVGGTPVDAQTGGAVGQNAVENNLYLTSEALKKDKQTARKIYSVIKEQVKHECSSTGRITECRQNIGRIIEFTQDKRFDSRFKDLKKESLYYLNQHPDLVASYLKAEYEKLDREDKSILHRYISPGAEIVSGSLGVVLSGVAGGGSCAETFGLGCAAALVGVTSSYDHVITGTKNFGKKASEQRPTITVQTLKQLGLSEQAAEYVQFSIDLFSVGKSGASMPKAKPVSDAKPRWEVDRKLNKLTTREQVEKNVQEIRNGNKNSNFSQHAQLEREINKLKSADEINFADGMGKFTDSMNDKAFSRLVKSVKENGFTNPVVEYVEINGKAYIVRGNNRVFAAEYLGRIHELKFKKVDFPVPNTSWKNPTDVLNESGNVKRPRYRSK

SEQ ID NO: 27305 - protein, 601 aa, Neisseria meningitidis; identical to SEQ ID NO: 10945

SEQ ID NO: 27306 - protein, 581 aa, Neisseria meningitidis
MERQTDEFAQAAARAAIWFLARYAGSGSEVLANCTERLFQALQNGHSFIRLSGGEADALSALAPVVGTSAAPLILEGRRLFLGRMWQLEYDLAAEIKRLAAADTSAPDAAGARQNLAKWFQGTGSEGQRDAAALALLQSFMVITGGPGTGKTTTVAKLLALICGEDENLPNIALAAPTGKAAAHMARALHRAINGFDAPEAVRRHLLKLEGQTVHRLLKLRPPKMQAAFNPVYPLPFDVLVIDEASMLDTALMLQLLKAVKTGARVILLGDENQLPSVGIGAVLSVLSQKTVLDGETHQRLAGFLPEHGFSVSANPPVLAQNTAHLSFSHRFGDNSGIGCLARAAVSGDEGAWALFDRFPDELEHSECSPNARVERLYRAHKAYWQAVKDGNIEAAYVGISDIVVLAAWRQDAEDFNEAYCSHVRRKMNIPEHQAYFAGEPIMIRQNDYALELFNGDIGLIMEDVGRQGSLAAYFADADGFKKVAVSCLPEFEPAFAMTVHKSQGSEYREVWLLPPSAAPSDEGDDALSGLSKELLYTAITRAREKFVFFGGEEAFRQAAATVKARQTALGSMLGRIFSQG

SEQ ID NO: 27307 - protein, 252 aa, Neisseria meningitidis
MKKVSVLIVARNEANHIRECIESCRFDKEVIVIDDHSTDNTAEIAESLGAKVFRRHLNGDFGAQKTFAIEQAGGEWVFLIDADERCTPELSDEISKIVQTGDYAAYFVERRNLFPNHPATHGAMRPDSVCRLMPKKDSSVQGKVHETVQTPYPKRRLKHFMYHYTYDNWEQYFNKFNKYTSISAEKYREQGKPVRFVRDIILRPIWGFFKIYILNKGFLDGKMGWIMSVNHSYYTMIKYVKLYYLYKSGGKF

SEQ ID NO: 27308 - protein, 287 aa, Neisseria meningitidis; identical to SEQ ID NO: 2812

SEQ ID NO: 27309 - protein, 367 aa, Neisseria meningitidis; identical to SEQ ID NO: 7962

SEQ ID NO: 27310 - protein, 181 aa, Neisseria meningitidis
MGKTVTLTAGHSNTDPGAVNGSDREADLAQDMRNIVAAILRDDYGLTVKTDGTGKGNMPLREAVKLIRGSDVAIEFHTNAAVSKAATGIEALSTVKNKRWCQVLSKAVAKKTGWKLRGEDGFKPDNAGQHSRLAYAQAGGIVFEPFFISNDTDLALFKTTKWGICRAIADAIAMELGAARV

SEQ ID NO: 27311 - protein, 339 aa, Neisseria meningitidis
MDAGIYLEETAPRALIEHNNILDNSVGVYLHGSAEAMVRENKIVGDATLRVNERGNGVTVWNAPGAQVVGNDISKGRDGIFSNTSTHNTYKNNRFSDLRFAVHYMYTNDSEVSGNISVGNNMGYVLMFSERLKVFDNIAVGSRDQGIMLNYVNYSDIHDNIINKAGKCVFAYNANYDKLSANHFENCQIGIHFTAAIEGTSLHDNSFINNESQVKYVSTRFLDWSEGGHGNYWSDNSAFDLNGDGFGDSAYRPNGIIDQIIWRAPVSRLLMNSPAISIVKWAQAQFPAVLPGGVVDSKPLMKPYAPKIQTRYQAMKDGLLKEVETRQSEWGRAENGSLN

SEQ ID NO: 27312 - protein, 197 aa, Neisseria meningitidis
MADGMGNLIGWEKTGLVVGKQWITAKDDKVSDVCNANGEMGVIGLYEPFSHGALTIPGHPNCRCEVVSVSGGELGEFAEKKELRKAAMQYARDNFIGKSYVNENSGHELKVTWQGVKHATSKANQAELSIMTKLDDLLRYAKYEGSYSDRKGHPNIIAAHKYRAVAKVGNESLNIGVIVREFPDGHKHYDHFILKDE

SEQ ID NO: 27313 - protein, 258 aa, Neisseria meningitidis; identical to SEQ ID NO: 5438

SEQ ID NO: 27314 - protein, 518 aa, Neisseria meningitidis; identical to SEQ ID NO: 16369

SEQ ID NO: 27315 - protein, 89 aa, Neisseria meningitidis; identical to SEQ ID NO: 494

SEQ ID NO: 27316 - protein, 395 aa, Neisseria meningitidis
MTEHYKTLPEHELLIQKSLISNLNLWDWVFAVLVFAATVFVQTRSGMHMDIYETVMLWASAGIAVFLGWFFKPMRWFVPLSVLLAYAAVGLYGGDIKSAEIFLLRYFLSSQSAIMWQCAFVFFALFAYISGAVLASVKNVPTNTLLGMGTVFAWVSAVAGFTGLLVRWHESYLLRPDAGHIPVSNLYEVFILFLVITALMYLYYEGKFAIQKLGGFVFGFMAVVVGFVLWYSVSREAHTIQPLIPALQSWWMKIHVPANFIGYGAFCISAMLGIAELVSLRAEGKGGKSWLPQSVLIEEVMYKAIAVGFLFFTIATILGALWAADAWGRYWSWDPKETWAFIVWLNYAVWLHLRLVAGWRGKVLAWWAIIGLFVTAFAFIGVNMFLSGLHSYGTL

SEQ ID NO: 27317 - protein, 181 aa, Neisseria meningitidis; identical to SEQ ID NO: 1552

SEQ ID NO: 27318 - protein, 144 aa, Neisseria meningitidis; identical to SEQ ID NO: 16314

SEQ ID NO: 27319 - protein, 160 aa, Neisseria meningitidis; identical to SEQ ID NO: 182

SEQ ID NO: 27320 - protein, 249 aa, Neisseria meningitidis
MPSVELLLVIVGLPRGTFYYQLAVQSAEDKYADLKRHIHDIYRRHKGRYGYRRIAAAIRHAGTPVNQKKVSRLMAKTGLKAVIRRRKYRSFKGEVGKIAPNILRRCFHAEKPNEKWVTDVTEFNVGGEKIYLSPIMDLFNGEIVSYRIQIRPTFDLAGEILKGAPEKPGSSEKPILHSDQGWQYQMFFYSGLNLNQDKAMKPQTVQIVRQGEATPYWFKFNPLYNNDRIKLKLKGLSLVQYRIQSLKAA

SEQ ID NO: 27321 - protein, 127 aa, Neisseria meningitidis
MNFALSVITFTLASFLPVPPAGAAVFTWKDGGGNSYSDVPKQLHPDQSQILNLRTRQTKPAVKPAQADAGKRTDGAAQENNPDTAEKNRQLEEEKNCRNRTAEQRRKLPDFKNEPEGGGKFKCKKQG

SEQ ID NO: 27322 - protein, 196 aa, Neisseria meningitidis; identical to SEQ ID NO: 22351

SEQ ID NO: 27323 - protein, 545 aa, Neisseria meningitidis
MDFKRLTAFFAIALVIMIGWEKMFPTPKPVPAPQQTAQQQAVTASAEAALAPATPITVTTDTVQAVIDEKSGDLRRLTLLKYKATGDENKPFILFGDGKEYTYVAQSELLDAQGNNILKGIGFSAPKKQYSLEGDKVEVRLSAPETRGLKIDKVYTFTKGSYLVNVRFDIANGSGQTANLSADYRIVRDHSEPEGQGYFTHSYVGPVVYTPEGNFQKVSFSDLDDDAKSGKSEAEYIRKTPTGWLGMIEHHFMSTWILQPKGGQSVCSAGDCRIDIKRRNDKLYSASVSVPLAAIPAGAKAETAVNLYAGPQTTSVIANIADNLQLAKDYGKVHWFASPLFWLLNQLHNIIGNWGWAIIVLTIIVKAVLYPLTNASYRSMAKMRAAAPKLQAIKEKYGDDRMAQQQAMMQLYTDEKINPLGGCLPMLLQIPVFIGLYWALFASVELRQAPWLGWITDLSRADPYYILPIIMAATMVAQTYLNPPPTDPMQAKMMKIMPLIFSVMFFFFPAGLVLYWVVNNLLTIAQQWHINRSIEKQRAQGEVVS

SEQ ID NO: 27324 - protein, 421 aa, Neisseria meningitidis
MSDAVAKETFNPFEIARKQVKTACDRLKTDPAVYEILKSPTRVLEVNFPVKLDDGTVKTFTGYRSQHNNAVGPYKGGVRFHPGVNLDEVKALSIWMTIKCCVAGIPYGGGKGGVTLDPRDYSEAELERIARAYAEAISPLIGEKIDIPAPDVNTNGKIMSWMVDAYENVVKHSAPGVFTGKPVEFGGSLARTEATGYGVNLAAVQALEKLGKDVKGATYAIQGFGNVGYHTGYYAHQSGAKVVAVSTVDVAIYNENGLDMEAIIKEFQTKGFITNEAGYGKEISNAELLALEVDVLAPCALENQLTSENAGKVRATIVVEGANGPTTPEADVILRQNGVLVVPDILANCGGVVVSYFEWVQNLQGYYWEFDEVQEKETVVLRRAFRDIWNLAQEYDVDLRTASYMMSIRRVEKAMKLRGWY

SEQ ID NO: 27325 - protein, 626 aa, Neisseria meningitidis
MNIFYEESGQFKVAAIVQKNDATYQVDTQHGKRTKVKANNVFAEFDGDMAAFLENAQAQAADIDTDLLWEVCGEEEFSAEAIAEEYYGHAPTKTELAATLIALYAAPMYFYKKAKGVFKAAPEETLKQALAAIERKKQQDAQIDAWAEALKRGEMPSEIAADLKTILHAPDKQSLTYKAFTKAADALKTSAYELAKKTGGITSIPQYLQDGFEIKYFPKGTGFPDLPLPEMPDLPKADVTAFSIDDESTTEVDDALSLTDLGNGMKRVGIHIAAPSLAIKQGDKMEKNIMERLSTVYFPGGKITMLPENWIAAFSLDAGAYRPSISIYFDVDGEFNVGAPTCKIEAVNIAENLRIQTIEPHFNAEAGLDEAGEMMFAHHQDLIWFYQFAITLQKARGKYEPDRAPQYDYSIELDEEGKVSVVRRERGSPIDTLVSEMMILANSTWAQMLHDNDLPGLFRVQPTGKVRMSTKSEPHIGMGVRHYGWFTSPLRRAADYINQKQLISLIDDTAEPLYQNSDAELFAALRDFDAAYTAYADFQRQMEAYWSLVYLQQQGTSELTATILKEDLVRIEGLPLVTRATGIPFDALPKSQALFKITELDAEKQFVSLNYIKAVAPAGTTAGNAV

SEQ ID NO: 27326 - protein, 158 aa, Neisseria meningitidis; identical to SEQ ID NO: 2471

SEQ ID NO: 27327 - protein, 357 aa, Neisseria meningitidis; identical to SEQ ID NO: 13480

SEQ ID NO: 27328 - protein, 164 aa, Neisseria meningitidis; identical to SEQ ID NO: 3532

SEQ ID NO: 27329 - protein, 595 aa, Neisseria meningitidis
MKLPLSYLPNIRFLSWCCLLAGIIAPATLLASPNPAEIRMQQDIQQRQREEQLRQTMQPESDVRLHQKNTGETVNQLMGDDSSQPCFAINEVVLEGEHHARFQFALKRALRETGFQAGKCLHAGNINQIMSLAQNALIGRGYTTTRILAAPQDLNSGKLQLTLIPSYLRSIRIDRSNDDQTHAGRIAAFQNKFPTRSNDLLNLRDLEQGLENLKRLPTAEADLQIVPVEGEPNQSDVVVQWRQRLLPYRVSVGMDNSGSEATGKYQGNITFSADNPLGLSDMFYVNYGRSIGGTPDEESFDGHRKEGGSNNYAVHYSAPFGKWTWAFNHNGYRYHQAVSGLSEVYDYNGKSYNTDFGFNRLLYRDAKRKTYLGVKLWTRETKSYIDDAELTVQRRKTAGWLAELSHKEYIGRSTADFKLKYKRGTGMKDALRAPEEAFGEGTSRMKIWTASADVNTPFQIGKQLFAYDTSVHAQWNKTPLTSQDKLAIGGHHTVRGFDGEMSLSAERGWYWRNDLSWQFKPGHQLYLGADVGHVSGQSAKWLLGQTLAGTAIGIRGQIKLGGNLHYDIFTGRALKKPEFFQSRKWASGFQVGYTF

SEQ ID NO: 27330 - protein, 373 aa, Neisseria meningitidis
MSNQDFYATLGVARTATDDEIKKAYRKLAMKYHPDRNPDNKEAEEKFKEVQKAYETLSDKEKRAMYDQYGHAAFEGGGQGGFGGFGGFGGAQGFDFGDIFSQMFGGGSGRAQPDYQGEDVQVGIEITLEEAAKGVKKRINIPTYEVCDVCNGSGAKPGTSPETCPTCKGSGTVHIQQAIFRMQQTCPTCHGAGKHIKEPCVKCRGAGRNKAVKTVEVNIPAGIDDGQRIRLSGEGGPGMHGAPAGDLYVTVRIRAHKIFQRDGLDLHCELPISFATAALGGELEVPTLDGKVKLTVPKETQTGRRMRVKGKGVKSLRSSATGDLYCHIVVETPVNLTDRQKELLEEFERISTGLENQTPRKKSFLDKLRDLFD

SEQ ID NO: 27331 - protein, 617 aa, Neisseria meningitidis
MNRYPLWKYLLIVFTIAVAAVYSLPNLFGETPAVQVSTNRQAIIINEQTQSKVDAALKNAGIQTDGMFVVDNSLKVRFKDTETQLKARDVIENTLGEGYITALNLLADSPEWMAKIKANPMFLGLDLRGGVHFTMQVDMKAAMQKTFERYSGDIRRELRREKIRSGTVRQAGNSLTVPLQDAGDVQKALPQLRKLFPEATLNSDGSNIVLMLSEEAVNKVRSDAVKQNITTLHNRVNELGVAEPVIQQSGADRIVVQLPGVQDTAKAKDIIGRTATLELRMVEDDPAKLREALEGNVPSGYELLSSGGDRPETLLISKQVELTGDNINDAQPSFDQMGAPAVSLSLDSAGGSIFGELTAANVGKRMAMVLIDQGKSEVVTAPVIRTAITGGRVEISGSMTTAEANDTSLLLRAGSLAAPMQIVEERTIGPSLGKENIEKGFHSTLWGFAIVAAFMVVYYRLMGFFSTIALSANILFLIGILSAMQATLTLPGMAALALTLGMAIDSNVLINERIREELRAGVPPQQAINLGFQHAWATIVDSNLTSLIAGIALLVFGSGPVRGFAVVHCLGILTSMYSSVVVFRALVNLWYGRRRKLQNISIGSVWKPKAEMAGGKE

SEQ ID NO: 27332 - protein, 108 aa, Neisseria meningitidis; identical to SEQ ID NO: 9545

SEQ ID NO: 27333 - protein, 482 aa, Neisseria meningitidis
MNLPIQKFMMLFAAAISLLQIPISHANGLDARLRDDMQAKHYEPGGKYHLFGDGRGSVKNRVYAVQTFDATAVGPILPITHERTGFEGVIGYETHFSGHGHEVHSPFDNHDSRSTSDFSGGVDGGFTVYQLHRTGSEIHPEDGYDGPQGSDYPPPGGARDIYSYYVKGTSTKTKTNIVPQAPFSDRWLKENAGAASGFFSRADEAGKLIWENDPNQNWWGNRMDDVRGIVQGAVNPFLMGFQGVGIGAITDSAVSPVTDTAAQQTLQGINHLGNLSPEAQLAAATALQDSAFAVKDGINSAKQWADAHPNITATAQTALSAAEAATTVWGGKKVELNPTKWDWVKNTGYKKPAARHMQTVDGEMAGGNRPPKSITSNSKADASTQPSLQAQLIGEQISSGHAYNKHVIRQQEFTDLNINSPADFARHIENIVSHPTNMKELPRGRTAYWDDKTGTIVIRDKNSDDGGTAFRPTSGKKYYDDL

SEQ ID NO: 27334 - protein, 94 aa, Neisseria meningitidis; identical to SEQ ID NO: 1124

SEQ ID NO: 27335 - protein, 952 aa, Neisseria meningitidis
MCKHRPQHSHDNDTIRIRGARTHNLKNIDLDIPRHKLVVITGLSGSGKSSLAFDTLYAEGQRRYVESLSAYARQFLQMMDKPDVDLIEGLSPAISIEQKSTSHNPRSTVGTVTEIHDYLRLLYARVGTPYCPEHNLPLSSQTVSQMVDAVLKLPEDTRVMILAPAVRERKGEFVDFFADLQAQGFARVRVDGEVYQLDEVPKLEKNIKHNIDVVIDRVKVKADIKQRLAESFETALRHGNERALAMEMDSGEEHWFSARFACPVCSYSLPELEPRLFSFNNPMGSCPTCDGLGNTNFFDPEKVVAHPELSLASGAIDGWDKRNQFYFQMIQSLARHYGFDVQAAWETLPAKIKKVVLHGSGKEVIDFTYLSERGTTFNRSHAFEGIIPNLERRYRETDSETVREKLREYQNHRACPSCGGARLRKEARYVYVSGEPLHEVSAWPLTKTHQFFETLDLDGNKKQIAEKILKEITERLGFLINVGLDYLNLSRSAETLSGGEAQRIRLASQIGSGLTGVMYVLDEPSIGLHQRDNDRLLATLKRLRDLGNSVIVVEHDEDAIREADFVVDMGPGAGEHGGNVLIADTPENVAKCENSVTGQYLSGKKSIAVPSERTPVNPDRMLILKGARGNNLKNVTLELPLGLITCITGVSGSGKSTLINDTLAKITARELNRAQEEPAPYDDIRGLEHLDKVINVDQSPIGRTPRSNPATYTGLFTPIRELFAGVPLSRERGYNVGRFSFNVKGGRCESCQGDGVIKVEMHFLPDVYVPCEVCHGKRYNRETLEIQYKGKNISQVLDMTVEEAREFFDAVPTVSRKLQTLMDVGLGYIRLGQSATTLSGGEAQRVKLALELSKRDTGRTLYILDEPTTGLHFADIALLLEVIGRLKGKGNSIVIIEHNLDVIKTADWIVDLGPEGGDSGGRIIAEGSPEEVASMAKNSYTARYLKDILNKN

SEQ ID NO: 27336 - protein, 472 aa, Neisseria meningitidis; identical to SEQ ID NO: 5226

SEQ ID NO: 27337 - protein, 332 aa, Neisseria meningitidis; identical to SEQ ID NO: 3650

SEQ ID NO: 27338 - protein, 104 aa, Neisseria meningitidis; identical to SEQ ID NO: 18463

SEQ ID NO: 27339 - protein, 322 aa, Neisseria meningitidis
MKLTLAIPSLNLDEDETRIPLCLPAFNKILQYGSLHRQSCTASAFYARYLWCGRLAERAAQSLNMPSEAVALATPVWQKMGMHQANVLTAEYLNVGTDEAERLCRDLSAFYGDIPWRFVPVLPELWLVSLPCAYRWGAKPVLDLGGLLGADDQPDGEDALEWLRVQTEIQMWLAAHPVNHNRKKRGLPELNGLWLWDSLHGSSQGGTLFADTVWSRFHPDRRALPDNFRAYEETAAYLPDTHHILFMDDLRLTALTGDRERYAAILQQWEERWFAPLYEAVRIGKIKRLDIATDGQHGGTLTFKPADRWKFWRGAKTFDGIW

SEQ ID NO: 27340 - protein, 166 aa, Neisseria meningitidis
MSQYFTLFRIEPAFDIDTENLEQTYRALAARFHPDKFASASAFEQKQAVMMSSTINDAYRTLKNPIDRAAYLLKTSGIDADAPEHTSFAPEFLMQQMEWRETLMEARAGKDLESLKNLDNEIRDEQEKLFCGLKQSFARQDYDTAAQQVRQGRFLDKLRNEISSAL

SEQ ID NO: 27341 - protein, 203 aa, Neisseria meningitidis; identical to SEQ ID NO: 3861

SEQ ID NO: 27342 - protein, 266 aa, Neisseria meningitidis
MSPSPFIEMKDVAFAYGDRPILKNINFSIPQGNFAAVMGGSGSGKTTLMRLITGQIRPQSGKVLIEGRDLAGFSADELYEHRRRMGVLFQHGALFTDLSVFDNIAFPMRELTRLPEAVIRDLVLLKLNAVGLRGVENLMPSELSGGMSRRVALARTIALDPEIMLYDEPFTGLDSISLGVIAHLISRVNKALRSTSIMVTHDIEKSLEIVDQVIFLAHGEIMFSGSPQEMRELDSPWVRQFVGGLADGPVAYRYPAQTSLQQDLLG

SEQ ID NO: 27343 - protein, 616 aa, Neisseria meningitidis
MYLPSMKHSLPLLAALVLAACSSTNTLPADKTPADNIETADLSASVPTRPAEPEGKTLADYGGYPSALDAVKQKNDAAVAAYLENASDSAMAENVRNEWLKSLGARKQWTLFAQEYAKLEPEGRAQEVECYADSSRNDYTRAAELVKNTGKLPSGCTKLLEQAAASGLLDGNNAWRRVRGLLAGRQTTDARNLATALGSPFDGSTQGSREYALLNVIGKEARKSPNAAALLSEMESGLSPEQSSFAWGVLGHYQSQSLNVPAALDYYGKVSDRRQLTDDQIEWYARAALRARRWDELASVISHMPEKLQKNPTWLYWLARSRAATGNTQEAEKLYKQAAATGRNFYAVLAGEELGRKIDTRNNVPDAGKNSVLRMAEDGAIKRALVLFRNSRTAGDAKMRRQAQAEWRFATRGFDEDKLLTAAQTAFDHGFYDMAVNSAERTDRKLNYTLRYISPFKDTVIRHAQNVNVDPAWVYGLIRQESRFVIGAQSRVGAQGLMQVMPATAREIAGKIGMDAAQLYTADGNIRMGTWYMADTKRRLQNNEVLATAGYNAGPGRARRWQADTPLEGAVYAETIPFSETRDYVKKVMANAAYYASLFGAPHIPLKQRMGIVPAR

SEQ ID NO: 27344 - protein, 400 aa, Neisseria meningitidis
MKNYHAPDEKGFFGEHGGLYVSETLIPALQELADAYKAAKNDPEFWEAFRHDLKHYVGRPSPVYHAARLSEHLGGAQIWLKREDLNHTGAHKVNNTIGQALLAKRMGKKRVIAETGAGQHGVASATVAARFGMTCDVYMGADDIQRQMPNVFRMKLLGANVVGVDSGSRTLKDAMNEAMREWVARVDDTFYIIGTAAGPAPYPEMVRDFQCVIGNEAKEQMLEAIGRQPDVAVACVGGGSNAIGLFHPYIGEENVRLVGVEAGGLGVNTPDHAAPITSGAPIGVLHGFRSYLMQDENGQVLGTHSVSAGLDYPGIGPEHSHLHDIKRVEYTVAKDDEALEAFDLLCRFEGIIPALESSHAVAWAVKNAPKMGKDQVILVNLSGRGDKDINTVAKLKGIKL

SEQ ID NO: 27345 - protein, 81 aa, Neisseria meningitidis; identical to SEQ ID NO: 7948

SEQ ID NO: 27346 - protein, 1389 aa, Neisseria meningitidis
MTDTAPTDTDPTENGTRKMPSEYRPTPPAKKRRPLLKLSAALLSVLILAVCFLGWLAGTEAGLRFGLYQIPSWFGVNISSQNLKGTLLDGFDGDNWSIETEGADLKISRFRFAWKPSELMRRSLHITEISAGDIAIVTKPTPPKEERPPLSLPDSIDLPAAVYLDRFETGKISMGKAFDKQTVYLERLDASYRYDRKGHRLDLKAADTPWSSSSGSASVGLKKPFALDTAIYTKGGLEGKTIHSTARLSGSLKDVRAELAIDGGNIRLSGKSVIHPFAESLDKTLEEVLVKGFNINPSAFVPSLPDAGLNFDLTAIPSFSDGIALEGSLDLENTKAGFADRNGIPVRQVLGSFVIRQDGTVHIGNTSVALLGRGGIRLSGKIDTGKDILDLNIGINSVGAEDVLQTAFKGRLDGSIGIGGTTASPKISWQLGIGTARTDGSLAIASDPANGQRKLVLDTVNIAAGQGSLTAQGYLELFKDRLLKLDIRSRAFDPSRIDPQLPAGNINGSINLAGELAKEKFTGKMRFLPGTFNGVPIAGSADIVYESRHLPRAAVDLRLGRNIIKTDGGFGKKGDRLNLNITAPDLSRFGFGLAGSLNVRGHLSGDLDGGIRTFETDLSGAARNLHIGKAADIRSLDFTLKGSPDTSRPIRADIKGSRLSLSGGAAVVDTADLMLDGTGVQHRIRTHAAMTLDGKPFKFDLDASGGINRELTRWKGSIGILDIGGAFNLKLQNRMTLEAGAERVAASAANWQAMGGSLNLQHFSWDKKTGISAKGSAHGLHIAELHNFFKPPFEHNLVLNGDWDVAYGRNARGYLNISRQSGDAVLPGGQALGLNAFSLKTRFQNDRIGILLDGGARFGRINADLDIGNAFGGNMANAPLGGRITASLPDLGTLKPFLPAAAQNITGSLNAAAQIGGRVGSPSVNAAVNGSSNYGKINGNITVGQSNSFSTSPLGGKLNLTVADAEVFRNFLPVGQTVKGSLNAAVTLGGSIADPHLGGSINGDKLYYRNQTQGIILDNGSLRSHIAGRKWVIDSLKFRHEGTAELSGTVGMENSGPDVDIGAVFDKYRILSRPNRRLTVSGNTRLRYSPQKGISVTGMIKTDQGLFGSQKSSMPSVGDDVVVLGEVKKEAAAPLPVNMNLTLDLNDGIRFAGYGADVTIGGKLTLTAQSGGSVRGVGTVRVIKGRYKAYGQDLDITKGTVSFVGPLNDPNLNIRAERRLSPVGAGVEILGSLNSPRITLTANEPMSEKDKLSWLILNRAGSGSSGDNAALSAAAGALLAGQINDRIGLVDDLGFTSKRSRNAQTGELNPAEQVLTVGKQLTGKLYIGYEYSISSAEQSVKLIYRLTRAIQAVARIGSRSSGGELTYTIRFDRFSGSDKKDSAGNSKGK

SEQ ID NO: 27347 - protein, 876 aa, Neisseria meningitidis
MQEQYRPAAIEPAAQKKWDDARIFNVSEDASKPKYYCLSMFPYPSGKLHMGHVRNYTIGDVLSRFKRLNGFNVMQPMGWDAFGMPAENAAMKHNVAPAAWTYDNIEYMKTQLKSLGFAIDWERETATCKPEYYRWEQWLFTKLFEKGIVYRKNGTVNWDPVDQTVLANEQVIDGRGWRSGALIEKREIPMYYFKITDYAEELLNDLDKLEHWPEQVKTMQRNWIGKSRGMTVRFAVSDDSKQGLEGDYAKFLQVYTTRPDTLMGATYVAVAAEHPLATAAAADKPELQAFIAECKAGSVAEADMATMEKKGVPTGRYVVNPLNGDKLEVWIANYVLWGYGDGAVMAVPAHDERDFEFATKYNLPKKQVIAVGDNAFDENQWQEWYGDKENGVLVNSGDLDGLDFQTAFDAVAAKLQSQGAGEPKTQYRLRDWGISRQRYWGCPIPIVHCEQCGDVPVPADQLPVVLPENVVPDGMGSPLAKMPEFYETACPCCGGAAKRETDTMDTFMESSWYFFRYMSPKFSDGMVSAEAAKYWGAVDQYIGGIEHAILHLLYARFFTKLMRDEGLVNVGEPFERLLTQGMVVCETYYRENDKGGKDWINPADVELTFDDKGRPISAVLKADGLPVVISGTEKMSKSKNNGVDPQELINAYGADTARLFMMFAAPPEQSLEWSDSGVEGAHRFLRRLWRTVYEYLKQGEAVKAFAGSQDGLSKELKDLRHKLHATTAKVSDDYGRRQQFNTAIAAVMELLNQYDKTDTGGEQGRAVAQEVLETAVRLLWPIVPHICETLWSELNGAKLWEAGWPTVDEAALVKSEIEVMVQVNGKLRGKITVAADASKADLEAAALATEGAVKFMEGKPAKKIIVVPGRLVNIVV

SEQ ID NO: 27348 - protein, 97 aa, Neisseria meningitidis; identical to SEQ ID NO: 1217

SEQ ID NO: 27349 - protein, 619 aa, Neisseria meningitidis
MPEYRSKTSTHGRNMAGARALWRATGVMETDFGKPIIAVANSFTQFVPGHVHLHNMGQLVAREIEKAGAIAKEFNTIAIDDGIAMGHSGMLYSLPSRDLIADSIEYMVNAHCADALVCISNCDKITPGMLIAAMRLNIPTIFVSGGPMEAGKVIGVANIQPERRLDLIDAMIESADDNVSNRQVEEVEQNACPTCGSCSGMFTANSMNCLTEALGLSLPGNGSYLATHAGRKELFLEAGRMIVEITKRYYEQNDETVLPRSIATKKAFENAMTMDIAMGGSTNTILHLLAVANEAGVDFKMADIDRLSRVVPCICKTAPNNHDYYMEDVHRAGGIFAILKELDKAGKLHTDVHTIHAPTLKDAIEKWDITNPENTRAIERFKAAPGGVRTTQAFSQNRMWKTLDLDREKGCIRDVAHAYSQDGGLAVLFGNIAERGCVVKTAGVDESILKFTGRARVFESQEDAVEGILGNQIVAGDIVIIRYEGPKGGPGMQEMLYPTSYLKSKGLGKACALLTDGRFSGGTSGLSIGHASPEAAEGGAIGLVHEGDTVEIDIPNRSIHLAISDEELAARRAEMEARGSKAWKPENRDRYVSAALRAYGAMATSADKGAVRDVAQIER

SEQ ID NO: 27350 - protein, 594 aa, Neisseria meningitidis
MSLVELKVPDIGGHENVDIIAVEVNVGDTIAVDDTLITLETDKATMDVPAEVAGVVKEVKVKVGDKISEGGLIVVVEAEGTAAAPKAEAAAAPAQEAPKAAAPAPQAAQFGGSADAEYDVVVLGGGPGGYSAAFAAADEGLKVAIVERYKTLGGVCLNVGCIPSKALLHNAAVIDEVRHLAANGIKYPEPELDIDMLRAYKDGVVSRLTGGLAGMAKSRKVDVIQGDGQFLDPHHLEVSLTAGDAYEQAATTGEKKIVAFKNCIIAAGSRVTKLPFIPEDPRIIDSSGALALKEVPGKLLIIGGGIIGLEMGTVYSTLGSRLDVVEMMDGLMQGADRDLVKVWQKQNEYRFDNIMVNTKTVAVEPKEDGVYVTFEGANAPKEPQRYDAVLVAAGRAPNGKLISAEKAGVAVTDRGFIEVDKQMRTNVPHIYAIGDIVGQPMLAHKAVHEGHVAAENCAGHKAYFDARVIPGVAYTSPEVAWVGETELSAKASGRKITKANFPWAASGRAIANGCDNGFTKLIFDAETGRIIGGGIVGPNGGDMIGEVCLAIEMGCDAADIGKTIHPHPTLGESIGMAAEVALGTCTDLPPQKKK

SEQ ID NO: 27351 - protein, 155 aa, Neisseria meningitidis
MTELQHPVLVVDNETDILDLMEMTLMKMGLRVHTASGVAEAKNKLDSQRYSLVLTDMRMPDGSGLEVVQHINSRLLDTPVAVITAFGNADQAQEALRCGAFDPDTMQIQDYLDQIERDIIEQTLKQTEGNRTQAAKRLGISFRSMRYRMERLNIG

SEQ ID NO: 27352 - protein, 452 aa, Neisseria meningitidis
MDLNVEIKNLGKVAHARVSIRPLTVITGCNSSGKSFITRGLYSILHTLNQDVVSAYILNVLSLTNSALLRLSDGIPRRSADDDALLADIGLLLEGVRQSVADRLSPSPLYQPPASQLVLNDLKTAVAELARRLKVGKGTKMQAVKQHYTDIEDYLSDLEFCLSGDVGFYTEAVSRALHSAFSGNFQVADIKRLLSSDSANFSLGDGTEVSIGDKGLGFKLSAAMPGSLQSLKNVVYLESPVYYKMRNALKDARLFRLNMLRRGAVNPVPQYFYDLDEMLEAELPPVNEVFGQIADKVEALINGRLAVTPSGEIVYSERGRQSVPLNMASSGISNIGMIALLLRRNVLDEGSFLFIDEPEMNLHTSWQHAMLDVLLDLSRAGVNVVVATHSLDMLHRLEAKVEADASLLGSVGVCRLSSDGISLEDGSVLGGLRAAKEALGAPYLEVIEERLP

SEQ ID NO: 27353 - protein, 444 aa, Neisseria meningitidis
MAKKYFGTDGVRGEVGQFPITPDFVLKLGYAAGQVLVQHDTDQKPTVLIGKDTRISGYMLEAALVAGFTAAGVNVVQTGPLPTPGVAYLTRALRLSAGVMISASHNAYSDNGIKFFAEGGVKLSDEVELEIEAKIDGEMKTQPSARLGRARRINGADDRYIEFCKSTFPTHSDLRGLKLVVDAANGAAYSVAPKVFHELGAQVVSIGDEPNGYNINEKCGATYTKTLQAAVLQHEADYGIALDGDGDRLMMVDKNGKVYDGDSLIYVIAKARAREGINIGGVVGTVMTNMAMEIALKEQGVDFCRAKVGDRYVLEQLNQRSWLIGGEASGHILCMDKHNTGDGIISALQVLAALQTLNQDLATVCADWQPYPQTMINVRIGKGQNWQEASKDVLAEVEKELEGKGRVVLRASGTEPVVRVMVEARQADWARDGAERIASAIGSL

SEQ ID NO: 27354 - protein, 259 aa, Neisseria meningitidis; identical to SEQ ID NO: 5591

SEQ ID NO: 27355 - protein, 41 aa, Neisseria meningitidis; identical to SEQ ID NO: 15747

SEQ ID NO: 27356 - protein, 261 aa, Neisseria meningitidis; identical to SEQ ID NO: 8388

SEQ ID NO: 27357 - protein, 612 aa, Neisseria meningitidis
MCGIVGAIRAHHNVVDFLTDGLKRLEYRGYDSSGIAVNTDGKIKRVRRVGRVQLMEDAAREKGISGGIGIGHTRWATHGGVTEPNAHPHISGGMIAVVHNGIIENFESERKRLEGLGYRFESQTDTEVIAHSINHEYAQNGGRLFEAVQEAVKRFHGAYAIAVIAQDKPDELVVARMGCPLLVALGDDETFIASDVSAVIAFTRRVAYLEDGDIALLASDGIKRLTDKNGLPAERKVKVSELSLASLELGPYSHFMQKEIHEQPRAIADTAEVFLDGGFIPENFGKNAKSVFESIRSVKILACGTSYYAALTAKYWLESIAKIPADVEIASEYRYRSVIADPDQLVITISQSGETLDTMEALKYAKSLGHRHSLSICNVMESALPRESSLVLYTRAGAEIGVASTKAFTTQLVALFGLAVTLAKVRGLVSEEDEARYTEELRQLPGSVQHALNLEPQIAAWAQQFAKKTSALFLGRGIHYPIALEGALKLKEITYIHAEAYPAGELKHGPLALVDENMPVVVIAPNDSLLDKVKANMQEVGARGGELFVFADLDSNFNATEGVHVIRAPRHVGELSPVVHTVPVQLLAYHTALARGTDVDKPRNLAKSVTVE

SEQ ID NO: 27358 - protein, 701 aa, Neisseria meningitidis; identical to SEQ ID NO: 6719

SEQ ID NO: 27359 - protein, 149 aa, Neisseria meningitidis; identical to SEQ ID NO: 3543

SEQ ID NO: 27360 - protein, 498 aa, Neisseria meningitidis
MKLSIQKFMMLFAAAISLLQIPISHANGLDARLRDDMQAKHYEPGGKYHLFGDGRGSVKNRVYAVQTFDATAVGPILPITHERTGFEGVIGYETHFSGHGHEVHSPFDNHDSRSTSDFSGGVDGGFTVYQLHRTGSEIHPEDGYDGPQGSDYPPPGGARDIYSYYVKGTSTKTKTNIVPQAPFSDRWLKENAGAASGFFSRADEAGKLIWENDPNQNWWGNRMDDVRGIIQGAANPFLTGFQGLGVGAITDSAVNPVTYAAARKTLQGIHNLGNLSPEAQLAAASLLQDSAFAVKDSINSAKQWADAHPNITATAQTALSVAEAAGTVWGGKKVELNPTKWDWVKNTDYKTPAARPMQTLDGEMAGGNKPPKSITSGGKANAATYPQLVNQLTGQNLKNIAAQDPRLSLALHKSEKNFPIGTATYEEADRLGKIWVGEGARQTSGGGWLSIDGTRQYRPPTEKNSQFATTGIQANFETYTIDSNGKRNKIKNGHLNIR

SEQ ID NO: 27361 - protein, 517 aa, Neisseria meningitidis
MNRTYANFYGMLAAACRKNGNGTAVFDGKEKTAYRALKQEAEAVAAYLQNIGVKFGDTVALAVSNSTEFITAYFAVSAIGAVAVPMNTFLKNSEYAYILNDCKARFLFASAGLSKELAGLKAQTPVEKIIWTDKSRPTGEMAEGDAFFEDVRRFPEKPDLGRQPRINDLAHIIYTSGTTGHPKGALISYANLFANLNGIERIFKISKRDRFIVFLPMFHSFTLTAMVLLPIYMACSIILVKSVFPFSNVLKQALLKRATVFLGIPAIYTAMSKAKIPWYFRWFNRIRLFISGGAPLAEQTILDFKAKFPRAKLLEGYGLSEASPVVAVNTPERQKARSVGIPLPGLEAKAVDEELVEVPRGEVGELIVRGGSVMRGYLNMPAATDETIVNGWLKTGDFVTIDEDGFIFIVDRKKDLIISKGQNVYPREIEEEIYKLDAVEAAAVIGVKDRYADEEIVAFVQLKEGMDLGENEIRRHLRTVLANFKIPKQIHFKDGLPRNATGKVLKRVLKEQFDGNK

SEQ ID NO: 27362 - protein, 471 aa, Neisseria meningitidis; identical to SEQ ID NO: 26386

SEQ ID NO: 27363 - protein, 397 aa, Neisseria meningitidis
MAEVGITPVAGVNNVARDDDMVRGPDAPGRFVRDAVNVDIHADGAFSMRGAARKISGLKLRDVWQSPLHRDVFCVHEGHLCKLDTGDFSVSVLVRDAGAGRVWYAVVNHAVFAATDRGIFVYDGLSAQRLGIDTPPAPLVMPSEGSLAAGHYGFALAWLRGGKEGGLSAMASVAVADGGGVEVALPFCTDRTVDGVRLYATAADGGELACIGDYPVSGTIVLPLLPKQGKTAQMRFLSPMPTGKFMCVWRGRLLTARANVLRFSEPLAFHLHDGRFGYMQMPQRITFVEPVEGGIFVGQVDGVVFLRGVDVEALEMVRLAVKPPVAMSSVRLDADEAGQFSNGAAVCLWLADNGAAVGLPDGGVVEVHAGVLRGLAAGTAAQTVSADRRFVSLMLDS

SEQ ID NO: 27364 - protein, 260 aa, Neisseria meningitidis; identical to SEQ ID NO: 16467

SEQ ID NO: 27365 - protein, 269 aa, Neisseria meningitidis; identical to SEQ ID NO: 1709

SEQ ID NO: 27366 - protein, 381 aa, Neisseria meningitidis
MTETQSLELAKELISRPSVTPDDRDCQKLLAERLHKIGFAAEELHFGDTKNIWLRRGTKAPVVCFAGHTDVVPTGPVEKWDSPPFEPAERDGRLYGRGAADMKTSIACFVTACERFVAEHPDHQGSIALLITSDEEGDALDGTTKVVDVLKARDELIDYCIVGEPTAVDKLGDMIKNGRRGSLSGNLTVKGKQGHIAYPHLAINPVHTFAPALLELTQEVWDEGNEYFPPTSFQISNINGGTGATNVIPGELSVKFNFRFSTESTEAGLKQRVHAILDKHGVQYDLQWSCSGQPFLTQAGKLTDVARAAIAEICGIEAELSTTGGTSDGRFIKAIAKELIELGPSNATIHQINENVRLDDIPKLSAVYEGILACLLAGNAV

SEQ ID NO: 27367 - protein, 137 aa, Neisseria meningitidis; identical to SEQ ID NO: 5394

SEQ ID NO: 27368 - protein, 58 aa, Neisseria meningitidis; identical to SEQ ID NO: 2174

SEQ ID NO: 27369 - protein, 142 aa, Neisseria meningitidis; identical to SEQ ID NO: 18752

SEQ ID NO: 27370 - protein, 406 aa, Neisseria meningitidis
MAVNLTEKTAEQLPDIDGIALYTAQAGVKKPGHTDLTLIAVAAGSTVGAVFTTNRFCAAPVHIAKSHLFDEDGVRALIINTGNANAGTGAQGRIDALAVCAAAARQIGCKPNQVLPFSTGVILEPLPADKIIAALPKMQPAFWNEAARAIMTTDTVPKAASREGKVGDKHTVRATGIAKGSGMIHPNMATMLSFIATDAKVSQPVLQLMTQEIADETFNTITVDGDTSTNDSFVIIATGKNSQSEIDNIADPRYAQLKELLCSLALELAQAIVRDGEGATKFITVRVENAKTRDEARQAAYAVARSPLVKTAFFASDPNLGRLLAAIGYAGVVDLDTDLVEMYLDDILVAEHGGRAASYTEAQGQAVMSKAEITVRIKLHRGQAAATVYTCDLSHGYVSINADYRS

SEQ ID NO: 27371 - protein, 426 aa, Neisseria meningitidis
LKDCFPQGLNGKKTAVALSGGLDSVVLLHLLVRAGKKGGFIPDALHIHHGLSPRADDWADFCQNYCDMLGVGLETVKICVEKNGLGIEAAARQKRYAAFAEKGFDVLALAHHRDDQIETFMLAVARGGGLRALAAMPAVRPFGEKGIIWRPLLPFSRQDIWDYAQKHGLPNIEDESNSDTAYLRNRFRHRILPELSAQIPHFGRHLLNNVRALQEDLALLDEVVVQDCRWVCGAGYFDTARWLTFSPRRKTHILRHFLKENGIPVPNQNALADIARVLTEAKTGRWNVQGFELHHYAGRLFVFRPEKTDKLRFLKDRQISGNLREILTGQGFVLKRHPFGLPEHLLEQDGILRTVAASDTLAVGGIHKNVKKILQEKRVLPTLRPIWPLVADSGNSPLALANCCADFQYSVSDGILPVHPDFPILF

SEQ ID NO: 27372 - protein, 280 aa, Neisseria meningitidis
MQNHVISLASAAERRAHIAATFGARGIPFQFFDALMPSEELNRMMAELVPGLAKQHLLSEVEKACFMSHAVLWKQALDEGLPYVAVFEDDVLLGKDAEKFLAEDTWLEERFDKDSAFIVRLETMFAKVIVRPDKVLNYENRSFPLLESEHWGTAGYIISREAMRFFLERFAVLPAEWIKAVDWMMFTYFFDKEGMPVYQVNPALCTQELHYAKFLSKNSMLGSDLEKDREQERRHRRSLKVMFDLKRALGKFGREKKKRMERQRQAELEKAYGRRVISFK

SEQ ID NO: 27373 - protein, 254 aa, Neisseria meningitidis
MCSCLVVKNTVIGSGRTKIAVPLVARDAAELSAVLDQIKNLPFDIVEFRADFLECAGSIGEVLRHTQTVRDALPDKPLLFTFRRHGEGGSFPCSDDYYFKLLDALIESRLPDIIDIELFSGETSVRRAVANAQKNGIAALLCNHEFHRTPPQEEIVCRLKQMEDCGADICKIAVMPQSAEDVLTLLSATLEAKRLAAKPVVTMSMGQTGAVSRLAGQVFGSSITFGSGTQNSAPGQIGVSALRAALDCLESGAD

SEQ ID NO: 27374 - protein, 713 aa, Neisseria meningitidis; identical to SEQ ID NO: 21710

SEQ ID NO: 27375 - protein, 269 aa, Neisseria meningitidis
MHALPRYAVFGNPVAHSKSPQIHQQFALQEGVDIEYERICADIGGFAQAVSTFFETGGCGANVTVPFKQEAFHLADEHSERALAAGAVNTLIFLKNGKLRGDNTDGIGLANDITQVKNIAIEGKTILLLGAGGAVRGVIPVLKEHRPARIVIANRTHAKAEELARLFGIEAVPMADVNGGFDIIINGTSGGLSGQLPAVSPEIFLGCRLAYDMVYGDAAQEFLNFAQSNGAAEVSDGLGMLVGQAAASYALWRGFTPDIRPVIEYMKAM

SEQ ID NO: 27376 - protein, 241 aa, Neisseria meningitidis
MPRFYLPENLSVGQTVALPDNIVRHLNVLRVRPNENITLFDGKGKAHAAQLTVLEKRRAEAEILHEDTTDNESPLNITLIQSISSGDRMDFTLQKSVELGVTAIQPVISERCIVRLDGERAAKRLARWQEIVISACEQSGRNTVPPVLPIIGYREALDKMPSESTKLIMSINRARKLADIRHPSGAIVFMVGPEGGWTEQEEQQAFEAGFQAVTLGKRILRTETAPLAALAAMQTLWGDFA

SEQ ID NO: 27377 - protein, 320 aa, Neisseria meningitidis; identical to SEQ ID NO: 913

SEQ ID NO: 27378 - protein, 1374 aa, Neisseria meningitidis
MTYPIPKPREKSRWSNLSQGSLPLALARYLPHKRLKVVLTQDAEQALRLQTAWRFFRPHDTAVFLPDWETLPYERFSPHQDLVSERLSALWQIKSGAADVLFVPVATAMQKLPPVPFLAGRTFWLKTGQTLDIGRLKTDLVDAGYNHVSHVVAAGEFAVRGGIVDLFPMGSEMPYRIDLFDDEIDSIKTFDTDTQRTISPVSEIRLLPAHEFPTDSEAQKIFRSRFREEVDGNPNDAAVYKAVSNGHFGAGVEYYLPLFFENELETLFDYIGEDALFVSLGDVHAEANRFWSDVKSRYAMAQGDETYPPLLPQHLYLSADVFAGRLKNYGQVLPDVSGKEHTLPDLAVNRQSDEPLQALKDFQTTFDGRILLCAESLGRRETMLGFLQQNGLKAKPVSDWQGFLSAHEPLMITVAPLAYGFKLGGLQSPNQQQTTSASEGEGDAVTDQTEFSASATNPLPSPLPQEREQSAAAVSDSLKAAAVSTESSLPLGTSNLHGQIRQQPAPSPVGEGWGEGWGEGKAVAAQTEFPASATNPLPSPLPQEREQSAAAVSDDLKTKSSLHPVANNLHGQIRQQPTPSPVGEGWGEGKAVAAQTEFSAAATNPLPSPLPQEREQSAAVVSDNLKTESSLPPGKSNLHGQIQQQPAPSPVGEGWGESKAVADQSAIAVITESELYQYVARSRAHNRRKKHAAVSDGLLRDLAEINIGDPVVHEEHGIGRYMGLVTMDLGGETNEMMLLEYSGEAQLYVPVSQLHLISRYSGQAHENVALHKLGSGAWNKAKRKAAEKARDTAAELLNLYAQRAAQSGHKFEINELDYQAFADGFGYEETEDQAAAIAAVIKDLTQAKPMDRLVCGDVGFGKTEVALRAAFVAVMGGKQVAVLAPTTLLVEQHAQNFADRFADFPVKVASLSRFNNSKATKAALEGMADGTVDIVIGTHKLVQDDIKFKNLGLVIIDEEHRFGVRQKEQLKRLRANVDILTMTATPIPRTLSMALEGLRDFSLITTAPSRRLAVKTFVKPFSEGSVREAVLRELKRGGQVFFLHNEVDTIENMRGRLETLLPEARIGVAHGQLRERELEQVMRDFLQQRFNVLLCSTIIETGIDIPNANTIIINRADKFGLAQLHQLRGRVGRSHHQAYAYLLTPEYITKDAEKRLDAIAAADELGAGFTLAMQDLEIRGAGEILGEGQSGEMMQVGFTLYTEMLKQAVRDLKKGRQPDLDAPLGITTEIKLHSPALLPESYCPDIHERLVLYKRLAVCETVQQINAIHEELVDRFGLPEQPVKTLIESHHLRLMAKELGIDAIDAAGEAVTVTFGKNNNVDPTEIILLIQNDKKYRLAGADKLRFTAEMENIEVRINTVKNVLKTLQNRCLPK

SEQ ID NO: 27379 - protein, 122 aa, Neisseria meningitidis
VWRDGIYHTGLVFEDGQVREVSAEAAAKLLRHGDVFVAAPGKRVIKADDTEALEKAGALEVEREEAAFDAVQDVILQINRMGKDELELYAKANYGQSLDKRKSAENLREAVVQMVHQFGIVQ

SEQ ID NO: 27380 - protein, 65 aa, Neisseria meningitidis; identical to SEQ ID NO: 981

SEQ ID NO: 27381 - protein, 89 aa, Neisseria meningitidis; identical to SEQ ID NO: 1473

SEQ ID NO: 27382 - protein, 263 aa, Neisseria meningitidis
MSEHRVNHEPVFLLASSPWRESSLRVEAFSRRYGRVALLARSARKRQSELRGVLVSFVPVSASWYGSQELKTLHRAEWVGGWRQPQGRALFSGLYVNELVLKLTAREDPMPELYDALAKVMEAVCREANHIADLRRFEWKLLNALGVAPDLHADGTGGDILADKTYRLMPEEAVMPVCEDADALSHEAGAIVEGQSLIDLREGSFRTAESLQQALKITRLFIRHLLPEGLKSRQVLEQIRQFDRKETARETVPTSDGTASNAV

SEQ ID NO: 27383 - protein, 145 aa, Neisseria meningitidis; identical to SEQ ID NO: 7320

SEQ ID NO: 27384 - protein, 1204 aa, Neisseria meningitidis
MSAPIQAFDPLTVPISGTNLIEASAGTGKTYGIAALFTRLIVLEQKSVERVLVVTFTKAATAELKTRLRARLDDVLQVLESKGIAKLGDDTLSDGIAAYCAEHHEGDTFLPELLKQALQKEGRTRLIVRLKAAIGQFDNAAIYTIHGFCQRILRDYAFLCQAPFDVELTEEDGDRLLIPAQDFWRERVSNDPVLAALAFKRKAVPQTVLAQISRYLSRPYLNFRRPQADLKQAQRNAETSWQTICRLLPELEAGFWRIHPDLNGNSYRKNSFGNLFKELAQKSAAGQLPFLDKDTHDRLLKLASDKLEAGLKKGKTPDAAVFAELQKLADFGRDLNALEEAEEATMIRLQLDLIEYLNRSLAEMKKSRRERGFDDLLLDVHTALTDNPHAETLARAVAENWETALIDEFQDTDPLQYEIFQKIFIAQNRPLFLVGDPKQAIYSFRGADIYAYLQAAEDARHRYTLATNYRSHAALIGSIGALFRLKERPFVLENIGYSEVGAARAESRLSPKRPAVQVRWLHENDNEKANKDVLRRRAADYCADEIAHALNEAAGGRLNFKGCPLQSGDIAVLVRTHNEAVMVSAALKKRQVQSVLLSRESVFASPEAAALSALIGFWLEPRRAGTLRFVLTSSIFGYNAQQLHDFNQNESEILHWAESARTALDNWNQYGIFAAMQQFSQTHGIETRLLSRNNGRSLTNYFQLLELLAAEDAQNRNPAALHKWLRDQISLAGNNGGDNRAIRLESDEDLVKIVTMHASKGLQYPLVYCPFAWDAQDTGPSDWQILHQSANRTELLAKAQLSEDEQKQHADEEMAERLRLLYVALTRAEEQLNIYAAYSTNTADNPLAYLIEGLPQDSRETVRCAYACEKDGIAMLKRNWQRLTDNAPSGTDFAFTEDVPPPAVYCGNAGQTAEFAANSIPERGFRFVRHTSFTALSRHTQTPDGGEEDACPSLDAAETSVPAMPSETPTASDGISIHNFPKGTQAGLCLHEILEDFKFGQAAARQETLIADKLKKYGFEEIWLPAVAEMAEACQKTPLTGAYGLSDIPPECRCPEMGFTLHTEDFGLKRLRDWFARDDVRLPEVCRAAAETLDFHTVNGFLNGFIDMVCQDPDGNICVIDYKSNHLGADASAYTQQAMDEAVTHHHYYLQALIYAVAAARYFKLRGQPPAAVSVRYLFLRGLDGKGGGVWRWDIDAAALEQIK

SEQ ID NO: 27385 - protein, 144 aa, Neisseria meningitidis; identical to SEQ ID NO: 8878

SEQ ID NO: 27386 - protein, 233 aa, Neisseria meningitidis; identical to SEQ ID NO: 5283

SEQ ID NO: 27387 - protein, 257 aa, Neisseria meningitidis; identical to SEQ ID NO: 780

SEQ ID NO: 27388 - protein, 896 aa, Neisseria meningitidis
MSDNRLDTARRHSLFLARQLDNGKLKPEIFLPMLDKVWTEADFQAFADWDKIRAEENEEELARQLRGLRRYVVSQIIVRDINRISDLNEVTRTITLFADFAVNTALDFAYAYYRDMYGTPIGRYTKSPQHLSVVAMGKAGGYELNVSSDIDLIFTYPESGDTDGRRERGNQEFFTKVGQKLIALLNDITADGQVFRVDMRLRPDGDSGALVLSETALEQYLITQGREWERYAWCKGRVVTPYPNGIKSLVRPFVFRKYLDYSAYEAMRKLHRQISSEVSKKGMADNIKLGAGGIREVEFIAQIFQMIRGGQMRALQLKGTQETLKKLAELGIMLSEHVETLLAAYRFLRDVEHRLQYWDDQQTQTLPTSPEQRQLLAESMGFDSYAAFSDDLNAHRTKVNQLFNEILSEPEEQTLDTSEWQWAWQEKPDEEERQGRLKEHGFDAETIAARLDQIRNGHKYRHLSAHAQPRFDAVVPLFVQAAAEQSNPTDTLMRLLDFLENISRRSAYLAFLNEHPQTLAQLAQIMGQSSWVAAYLNKYPILLDELISAQLLDTAFDWQALAAALSDDLKACGGDTEAQMDTLRRFQHAQVFRLAVQDLAGLWTVESLSDQLSALADTILAAALLCAWADMPKKHRDTPQFAVVGYGKLGGKELGYASDLDLVYLYDDPHPDAGDVYSRLARRLTNWLSAATGAGSLYETDLRLRPNGDAGFLAHSIAAFEKYQRENAWTWEHQSLTRARFICGTPEIQTAFDRIRTEILTAERDQTALSGEIIEMREKMFPTHPPADSNVKYARGGVVDVEFIVQYLILAHARQYPQLLDNYGNIALLNISADCGLIDKTLAGQSRTAYRFYRRQQHNTKLRDAAKTEVSDELLSHYGNVRKLWREVFGEEAATA

SEQ ID NO: 27389 - protein, 1102 aa, Neisseria meningitidis
MNEGEVVLTPEQIQTLRGYAFRGDTYGGWRYLANLGDRYADDAAAIVGKDTNLNGLNLWMKKGVENLWDDTVGKKTRLEKFDRVALQHFRQYARLINENNGRLPNTSEIERSYYKAVTDNGVSSSAAIDLVINRSLPDMADGYWALGLGIEAERIHNEQAVNNPNGSEWDNRKQLISALDKGFDGSFKEKPFTFLQSVIMDVTKLSVEYTIDGWQKIGGWGNGIINDLYKSVAKREWTGIFEIVNNNIKQFRDLFPNPEGWIDDGHQCFAPWVKETKKRNGKYHVYDPLALDLDGDGIETVATKGFAGALFDHRNQGIRTATGWVSADDGLLVRDLNGNGIIDNGAELFGDNTKLADGSFAKHGYAALAELDSNGDNIINAADAAFQSLRVWQDLNQDGISQANELRTLEELGIQSLDLAYKDVNKNLGNGNTLAQQGSYTKTNGTTAKMGDLLLAADNLHSRFKDKVELTAEQAKAANLAGIGRLRDLREAAALSGDLANMLKAYSAAETKEAQLALLDNLIHKWAETDSNWGKKSPMRLSTDWTQTANEGIALTPSQVAQLKKNALVSLSDKAKAAIDAARDRIAVLDAYTGQDSSTLYYMSEEDALNIVKVTNDTYDHLAKNIYQNLLFQTRLQPYLNQISFKMENDTFTLDFSGLVQAFNHVKETNPQKAFVDLAEMLAYGELRSWYEGRRLMADYVEEAKKAGKFEDYQKVLGQETVALLAKTSGTQADDILQNVGFGHNKNVSLYGNDGNDTLIGGAGNDYLEGSSGSDTYVFGEGFGQDTVYNYDYATGRKDIIRFTDGITADMLTFTREGNHLLIKAKDGSGQVTVQSYFQNDGSGAYRIDEIHFDNGKVLDVATVKKLVQQSTDGSDRLYAYQSGSTLNGGLGDDYLYGADGDDLLNGDAGNDSIYSGNGNDTLDGGEGNDALYGYNGNDVLNGGEGNDHLNGEDGNDTLIGGAGNDYLEGGSGSDTYVFGKGFGQDTVYNYHVDKNSDTMHFKGFKAADVHFIRSGSDLVLSASEQDNVRISGFFYGENHRVDTFVFDDAAISNPDFAKYINAGNNLVQSMSVFGSNTAATGGNVDANTQSVQQPLLVTPSA

SEQ ID NO: 27390 - protein, 188 aa, Neisseria meningitidis; identical to SEQ ID NO: 477

SEQ ID NO: 27391 - protein, 97 aa, Neisseria meningitidis; identical to SEQ ID NO: 1875

SEQ ID NO: 27392 - protein, 331 aa, Neisseria meningitidis; identical to SEQ ID NO: 11206

SEQ ID NO: 27393 - protein, 384 aa, Neisseria meningitidis
MSIHLDFGISPKTFRQTYLYQKPKLFKGAVRNLESASWKDINEIYQRADPTAPLFHLRKKGAIVPKEEYVESFDDLGKTRYRFIKSVIYEHMKNGASLVYNHINNEPFSDHIARQVARFAGAHTIVSGYLAFGSDESYKNHWDTRDVYAIQLFGKKRWQLTAPDFPMPLYMQQTKDTDISIPEHIDMDIILEAGDVLYIPRGWWHRPIPLGCETFHFAVGTFPPNGYNYLEWLMKKFPTIESLRHSFSDWEQDRTRINDTAAQIAAMIADPVNYEAFSEDFLGKERTDTAFHLEQFANPNATPLSDDVRLRLNANNLDTLEKGYLIGNGMKISVDELGKKVLEHIGKNEPLLLKNLLVNFNQGKHEEVRKLIYQLIELDFLELL

SEQ ID NO: 27394 - protein, 124 aa, Neisseria meningitidis; identical to SEQ ID NO: 5947

SEQ ID NO: 27395 - protein, 275 aa, Neisseria meningitidis
MPELPEVETTLRGIAPHIEGKTVEAVVLRQLKLRWQINPDLGEILSGRQVLSCGRRAKYLLIRFQTGVLLIHLGMSGSLRIFTPSDGRIGRPDRHDHVDIVFSDGTVMRYRDPRKFGAILWYEGIEEHHPLLEKLGPEPLSEAFCTDYLYVRLKAQKRAVKLALMDNAVVVGVGNIYANESLFRAGISPHRPANRLKKKECALLVETVKAVLRRAIETGGSTLRDFVDSDGKSGYFQQEYTVYGRHNQPCPQCGGLVVKETLGQRGTFYCPNCQK

SEQ ID NO: 27396 - protein, 462 aa, Neisseria meningitidis; identical to SEQ ID NO: 9246

SEQ ID NO: 27397 - protein, 503 aa, Neisseria meningitidis
LIFMDDDSPKVLKQASSTRDETMSTQTNFDLVLFGATGDLAMRKLLPCLYQAHVAGLLHPEGRILGVSRSELDTEGFLAKVETSSKIHVKENFSDEAWASFVERFAYLKVDVTQPDDFAALGDLVKARKETDNVVIYLSTAPKFFAQTCENLAKIGLNADNVRVVLEKPLGTDLASSQQINTDVARYFKEGQIYRIDHYLGKESLQNLLALRFANVMFEPLWNNKYIESVQLTIAEQLGVEERGEFYDITGALRDMVQNHLMQMLCMTAMEAPASLDADAVRDEKVKVIKSLKPLTVESVNENVVRGQYTAAKGMNGYLEEINVPQDSFTETYVAIKAEIENERWKGVPFYLRTGKRMTGKVAEIVLNFKDLNSHIFESSRTAPNRLVIELQPYESVRLYTQMKTPGAGNKVEIVPLATDLGKALEGRRAEAYERLLLDVINGKLALFNRRDELEAAWEYVMPILENWTNNTTPPHGYGAHSWGPEAARELLARDGHKWHEEQ

SEQ ID NO: 27398 - protein, 181 aa, Neisseria meningitidis
LILAVALGSLSAWLGRISEVEIEEVRLNPDEPQYTMDGLDGRRFDEQGYLKEHLSSKGAKQFPESSDIHFDSPHLVFFQEGRLLYEVGSDEAVYHTENKQVLFKNNVVLTKTADGKRQAGKVEAEKLHVDTESQYAQTDTPVSFQYGASHGQAGGMTYDHKTGMLNFSSKVKATIYDTKDM

SEQ ID NO: 27399 - protein, 187 aa, Neisseria meningitidis; identical to SEQ ID NO: 2230

SEQ ID NO: 27400 - protein, 544 aa, Neisseria meningitidis; identical to SEQ ID NO: 3460

SEQ ID NO: 27401 - protein, 384 aa, Neisseria meningitidis; identical to SEQ ID NO: 4520

SEQ ID NO: 27402 - protein, 210 aa, Neisseria meningitidis
MTVWVGLTGGIGSGKSAAAQCFADLGVPRIDADAAAHSLTASDGIALPEIRRLFGDTVFDTQGLLRRDILRKEVFASPSRKALLESVMLPLIFSEIKKQQETFTDAVYGIVEIPLLTEKRQFISLIRRVLTISAPVEKRIGRVMARSGLTRGEVAAIISHQASESERLLLADDVLLNDGSLKSLCEKTMRLHAFYSGIFASKPTQGKHND

SEQ ID NO: 27403 - protein, 382 aa, Neisseria meningitidis
MPLPLPSPEARQFSLKLQTLIAEKIGKHGNWIPFSRFMELVLYAPQYGYYTGGSHKIGNTGDFITAPTLTSLFAQTLARQLQELLSQTAGNIYEFGAGTGQLAADLLGSISDGISRYYIIEISPELAARQKNLIQARAPEASQKVVHLTALPEAFDGIIIGNEVLDAMPVEIVRKNEGGSFEHVGVCLDNDRFTYSARPLHDLQLSALASLYFPQTDYPYTSELHPQQYAFIRTLASRLERGGMIFIDYGFDAAQYYHPQRNQGTLIGHYRHHVIHNPFDFIGLADLTVHVNFTDIAQAGTDAGLDLIGYLPQSHFLLNLGITELLAQTGKTDSAAYIREAAAVQKLIDQHEMGELFKVIAFGKNIGVDWAGFRFGDICHKL

SEQ ID NO: 27404 - protein, 95 aa, Neisseria meningitidis; identical to SEQ ID NO: 3028

SEQ ID NO: 27405 - protein, 144 aa, Neisseria meningitidis; identical to SEQ ID NO: 5717

SEQ ID NO: 27406 - protein, 380 aa, Neisseria meningitidis
MNTLYTLFATCPRGLETVLSQELESLGCTDVQVFDGGVSCRGGLEQVYAANLHSRTASRILLRLTKGTYRNERNIYKLAKNINWFNWFTLQQTFKVKVEAKRANVKSIQFVGLTVKDAVCDAFRDIYDARPSVDKAAPDVRIHAFLDERNVEIFIDTSGEALFKRGYRLDTGEAPLRENLAAGLLLSAGYDGTQPFQDPFCGSGTIAIEAAWIATGRAPGMMRRFGFEKLQNFDKTLWADLRRRAEAQTRPVRAPIAGSDSDRRIVQTALDNARSAGVDDIVSFSVADAQSVRPNGENGIMVSNPPYGVRLEEVRALQALYPQLGTWLKKHYAGWQVGMFTGDREMPKFMRLSPKRKIPLYNGNLDCRLFLIDMVQGSNR

SEQ ID NO: 27407 - protein, 528 aa, Neisseria meningitidis; identical to SEQ ID NO: 2150

SEQ ID NO: 27408 - protein, 301 aa, Neisseria meningitidis
MGLDGLAAYLDAYLENIVREGKSEHTVAAYRRDLQELLALLEEMPSANPSNCTRGDFVQALRRLSGRGLGERTLARKLSSWRQYCVWLVKRGLMHADPTADIKPPKQPERIPKALPQECLNQMLDLPVDDSDALALRDHALFELMYGSGLRLSEIHGLDTGDVWLDEGWVRVTGKGRKQRQVPLTGKSVEALKNYLPLRQTASDGKALFTGRNGTRLSQRQIQKRLESWAAQNGDGRHISPHMMRHSYASHLLQSSRDIRAVQELLGHSSLSTTQIYTKLDFDHIARLYDEAHPRAKRQEK

SEQ ID NO: 27409 - protein, 449 aa, Neisseria meningitidis
MKLPVMSPEHSAQLQAFEAKILSNHAKIEAWFRTQWSVHRPPFYGSVDIRNAGYKISSIDMNLFPGGFNNLNPNFIPLAAVAAQDAVQRACETAKSVLIIPENHTRNTFYLQNIYALGEILRSAGYEVRLGSLNPEVTEPTEFETALGDKILLEPFLRTRDRVHLADGFSPCVVLLNNDLSAGIPDILKGISQTVLPPLHGGWTTRRKTNHFGAYNQVTAEFAKLIGIDEWQINPYFEKIGGLDFQGREGEDALAEAVERVLAKIQAKYDESGITDKPFVIVKADAGTYGMGVMSVKSADEVRGLNRKNRNKMAKVKEGLEVSEVIVQEGIYTYETLNGAVCEPVVYMMDRFVIGGFFRVHEGRGADENLNAGGMVFVPLSNSIPTGNGDNSQEAPEACKRVFEQWDALGMPRSEKDCDVDNVHNRLYVYGVMARLSLLAASIELEETA

SEQ ID NO: 27410 - protein, 240 aa, Neisseria meningitidis
MKPAYFISDLHLSEKQPELTALLLRFLRSSAAGQARAIYILGDLFDFWVGDDEVSELNTSVAREIRKLSDKGVAVFFVRGNRDFLIGQDFCRQAGMTLLPDYSVLDLFGCKTLICHGDTLCTDDKAYQRFRKIVHRKRLQKLFLMLPLKWRTRLAAKIRRVSKMEKQVKPADIMDVNAAFTERQVRAFNAERLIHGHTHREHIHHENGFTRIVLGDWHNDYASILRVDGDGAVFVPLEKC

SEQ ID NO: 27411 - protein, 39 aa, Neisseria meningitidis; identical to SEQ ID NO: 2231

SEQ ID NO: 27412 - protein, 534 aa, Neisseria meningitidis
VPSDKQNMPNKKKKAAFARAATENGVPDVSNIKNSYDDLMYESKAFSQTAINALEARARMMGLKPAAAAKAKVLELGCSMGGNIITQALYYPDAEFVGIDLSGRQVAQGNAIIEKMGLKNVRLEEKDILTIDESFGKFDYIIVHGIWSWVPDAVKDKIFSICRNNLTEHGIAYISYNVYPGWKRQEQLREIMYFAGRDVLEEPLEARTRKGLDALKALAEILENDKGLDGGGKLPAIQKILNHNFYYIAHEYMEIFNDPIYVNGFIEWANRHRLAYIGDTDLHVSFVSWMAEHTRERILALAGDDYIAKEFYSDILSDRQFRRSLLCREEVGDTVRRDESVAVEVIESLNFRPARGETINFDENDTLLSGIRDVMKTGEPFKTEDVAENLARRFPGLEFDRMKINSQLLLQTILGRFSVSSDNAGKQFFEDHKTYVPARFTDYVAAFVEHGAEAFVQPANRYNESTPSFGYGHLYIMRQLSRPTSKQALIETVAENLNIVSTTPDGLTFHPPAEVYVEEILADLADRHFLVSAD

SEQ ID NO: 27413 - protein, 261 aa, Neisseria meningitidis
VKHISSTNNEHIRHLHRLLSQGKFRRQYAQTVLEGVHLLQVFLQSGGKPLGVYIPEGKMPSEEIRRLRAVVPEGRIFSVSDGILKKISSLSCADDILALIDIPLGGTLPDKGDCVVLDGVQDPGNVGTVLRSAAAAGVGTVVLDRGCADAWSPKVLRAGMGAHFLSGIYPQADLEIWLARYKGRVFATALREEKQAVLYGEDLCEPTAWVFGNEGAGVGKAVLDRADKCVRIPMHDATESLNVAMAATICLFEQMRQRAAY

SEQ ID NO: 27414 - protein, 447 aa, Neisseria meningitidis; identical to SEQ ID NO: 18079

SEQ ID NO: 27415 - protein, 216 aa, Neisseria meningitidis; identical to SEQ ID NO: 10044

SEQ ID NO: 27416 - protein, 1010 aa, Neisseria meningitidis
LDGDGIETVATKGFAGALFDHRNQGIRTATGWVSADDGLLVRDLNGNGIIDNGAELFGDNTKLADGSFAKHGYAALAELDSNGDNIINAADAAFQSLRVWQDLNQDGISQANELRTLEELGIQSLDLAYKDVNKNLGNGNTLAQQGSYTKTDGTTAKMGDLLLAADNLHSRFKDKVELTAEQAKAANLAGIGRLRDLREAAALSGDLANMLKAYSAAETKEAQLALLDNLIHKWAETDSNWGKKSPMRLSTDWTQTANEGIALTPSQVAQLKKNALVSLSDKAKAAIDAARDRIAVLDAYTGQDSNTLYYMSEEDALNIVKVTNDTYDHLAKNIYQNLLFQTRLQPYLNQISFKMENDTFTLDFSGLVQAFNHVKETNPQKAFVDLAEMLAYGELRSWYEGRRLMADYVEEAKKAGKFEDYQKVLGQETVALLAKTSGTQADDILQNVGFGHNKNVSLYGNDGNDTLIGGAGNDYLEGGSGSDTYVFGKGFGQDTVYNYDYATGRKDIIRFTDGITADMLTFTREGNHLLIKAKDGSGQVTVQSYFQNDGSGAYRIDEIHFDNGKVLDVATVKKLVQQSTDGSDRLYAYQSGSTLNGGLGDDYLYGADGNDLLNGDAGNDSIYSGNGNDTLDGGEGNDALYGYNGNDALNGGEGNDHLNGEDGNDTLIGGAGNDYLEGGSGSDTYVFGKGFGQDTVYNYDYATGRKDIIRFTDGITADMLTFTREGNHLLIKAKDDSGQVTVQSYFQNDGSGAYRIDEIHFDNGKVLDVATVKELVQQSTDGSDRLYAYQSGSTLNGGLGDDYLYGADGNDLLNGDAGNDSIYSGNGNDTLDGGEGNDALYGYNGNDVLNGGEGNDHLNGEDGNDTLIGGAGNDYLEGGSGSDTYVFGKGFGQDTVYNYHVDKNSDTMHFKGFKAADVHFIRSGSDLVLSASEQDNVRISGFFYGENHRVDTFVFDDAAISNPDFAKYINAGNNLVQSMSVFGSNTAATGGNVDANIQSVQQPLLVTPSA

SEQ ID NO: 27417 - protein, 294 aa, Neisseria meningitidis
MSSGNIHIHSMTGFANAAEECGSKRINLDIRAVNHRFLDIQIRMPDDLRHLENGIREQISSHLARGKVECKIQIQDAENGNQSLELNRDLVGQLAEINKDLRKHYDLAKLGVADILRFPGVLASQRENTEELAKSITELTEKALKDFTAARKREGKKLGEHLLQRLEAMEEIIDALSELFPTLLETHKEKIRARLVEAVGSIDNDRLQQEFALFIQKSDIDEEFSRLRTHIAEVRRIVTEHKGSSGKRLDFLMQELNREANTLGSKSIAAECTRASVELKVLIEQMREQVQNIE

SEQ ID NO: 27418 - protein, 491 aa, Neisseria meningitidis; identical to SEQ ID NO: 6221

SEQ ID NO: 27419 - protein, 122 aa, Neisseria meningitidis; identical to SEQ ID NO: 12772

SEQ ID NO: 27420 - protein, 363 aa, Neisseria meningitidis
MSHISPIPEILADIKAGKMVIITDAEDRENEGDLLMAAQFVTPEAINFMIKHARGLVCLPMDGEMVEKLGLPMMTQKNGAQYGTNFTVSIEAAHGITTGISAADRALTIQTAVSPTAKPEDIVQPGHIFPLRAQKGGVLVRAGHTEAGVDLAQMNGLIPAAVICEIINDDGTMARMPELMKFAEEHKLKIGTITDLIEYRSRTESLLEDMGNAPVQTPWGEFQQHVYVDKLSGETHLALVKGTPSADTETLVRVHEPFSVMDFIQANPRHSWSLPKALERVQQAESGVVILLHRTEDGASLLDRTLPKGANQAYKWDSKSYGIGAQILAGLNVKKLRVLGQPSSFTGLTGFGLEVVGFEEAEK

SEQ ID NO: 27421 - protein, 122 aa, Neisseria meningitidis; identical to SEQ ID NO: 3130

SEQ ID NO: 27422 - protein, 244 aa, Neisseria meningitidis; identical to SEQ ID NO: 8785

SEQ ID NO: 27423 - protein, 69 aa, Neisseria meningitidis
MKSKFVYKLLVLAKYLYILICISIPIVFIYESYQGDDVNFMIYIRAFIIFSILGVLTQYSMSNFFEKEK

SEQ ID NO: 27424 - protein, 273 aa, Neisseria meningitidis
MAVLITGASAGFGEAMCRAFVGAGYLVIGAARRADRLQALADELGALFYPLEMDVSRRESVENALNGIPDEFSDIDCLINNAGLALGLDTADKADFEDWETMIQTNVLGLTFLTRKILPQMVERGGGYVMNLGSIAGNYAYAGSNVYGATKAFVRQFSLNLRAELADKNIRVTNIEPGLCGNTEFSNVRFKGDDERAAGVYEGVEFIRPEDIAETALWLYRRPAHMNVNTIEIMPVAQTFAGMKVIKTAVPEVREDFEKQSMSLFSRIRSWFK

SEQ ID NO: 27425 - protein, 90 aa, Neisseria meningitidis; identical to SEQ ID NO: 311

SEQ ID NO: 27426 - protein, 107 aa, Neisseria meningitidis; identical to SEQ ID NO: 2467

SEQ ID NO: 27427 - protein, 121 aa, Neisseria meningitidis; identical to SEQ ID NO: 1865

SEQ ID NO: 27428 - protein, 126 aa, Neisseria meningitidis
MPSVELLLVIVGLPRGTFYYQLVVQSAEDKYVDLKRHIHDIYQKQLKDNGLVQSMSRKGNCLDNAAMESFFGTLKSECFHTCKYDSVTELEAVLHEYIRYYNNDRIKLKLKGLSPVQYRIQSLKAA

SEQ ID NO: 27429 - protein, 157 aa, Neisseria meningitidis
MKKLLAVVMMAGLAGAVSAAGVHVEDGWARTTVEGMKIGGAFMKIHNDEAKQDFLLGGSSPVADRVEVHTHINDNGVMRMREVKGGVPLEAKSVTELKPGSYHVMFMGLKKQLKEGDKIPVTLKFKNAKAQTVQLEVKIAPMSAMDHGHHHGEAHQH

SEQ ID NO: 27430 - protein, 92 aa, Neisseria meningitidis; identical to SEQ ID NO: 2038

SEQ ID NO: 27431 - protein, 240 aa, Neisseria meningitidis
VFPDKYKLSLKENIFLAKKVLVAQIHNLSRFENCQTTLLQTEQIIHGKNVASASLEDIQTILNLKRAYQYVISHISNGEPVDISLLKKINNIVAKDDSLAPGDFRTGSVGVTLLDGSRHAPNPVKEIEVARVLQNIGLQSGSTTEAAVRFMLYCMRQQVFWDGNKRTATLFANGLMMAGGCGILEISEMQMPQFNEKLSAFYRSGDDTDISKFVYQNCISGIDYFGTDEDIDFPDSPNID

SEQ ID NO: 27432 - protein, 148 aa, Neisseria meningitidis
MNFSFVPLFLVTLILLGVVSNNNSITISATILLLMQQTALVQFVPLVEKHGLNLGIILLTIGVLSPLVSGKARVPPVAEFLNFKMISAVFIGIFVAWLAGRGVPLMGQQPVLITGLLIGTVIGVAFMGGIPVGPLIAAGILSFVVGKG

SEQ ID NO: 27433 - protein, 916 aa, Neisseria meningitidis
MTDATIRHDHKFALETLPVSLEDEMRKSYLDYAMSVIVGRALPDVRDGLKPVHRRVLYAMHELKNNWNAAYKKSARIVGDVIGKYHPHGDTAVYDTIVRMAQNFAMRYVLIDGQGNFGSVDGLAAAAMRYTEIRMAKISHEMLADIEEETVNFGPNYDGSEHEPLVLPTRFPTLLVNGSSGIAVGMATNIPPHNLSDTVNACLRLLDAPDTEIDELIDIIQAPDFPTGATIYGLSGVREGYKTGRGRVIMRGKTHIEPIGKNGEREAIVIDEIPYQVNKAKLVEKIGDLVREKTLEGISELRDESDKSGMRVVIELKRNENAEVVLNQLYKLTPLQDSFGINMVVLVDGQPRLLNLKQILSEFLRHRREVVTRRTLFRLKKARHEGHIAEGKAVALSNIDEIIKLIKESPNAAEAKDKLLAYPWRSSLVEEMLTRSGLDLEMMRPEGLAANIGLKEQGYYLSEIQADAILRMSLRNLTGLDQEEIVESYKNLMGKIIDFVDILSKPERITQIIRDELEEIKTNYGDERRSEINPFGGDIADEDLIPQREMVVTLTHGGYIKTQPTTDYQAQRRGGRGKQAAATKDEDFIETLFVANTHDYLMCFTNLGKCHWIKVYKLPEGGRNSRGRPINNVIQLEEGEKVSAILAVREFPEDQYVFFATAQGMVKKVQLSAFKNVRAQGIKAIALKEGDYLVGAAQTGGADDIMLFSNLGKAIRFNEYWEKSGNDEAEDADIETEISDGIEDETADSENALPSGKHGVRPSGRGSGGLRGMRLPADGKIVSLITFAPETEESGLQVLTATANGYGKRTPIADYSRKNKGGQGNIAINTGERNGDLVAATLVGETDDLMLITSGGVLIRTKVEQIRETGRAAAGVKLINLDEGETLVSLERVAEDESELSDASVISNVTEPEVEN

SEQ ID NO: 27434 - protein, 159 aa, Neisseria meningitidis; identical to SEQ ID NO: 3392

SEQ ID NO: 27435 - protein, 472 aa, Neisseria meningitidis
VKPLRRLTNLLAACAVAAAAFGQPALAADLAQDPFITDNAQRQHYEPGGKYHLFGDPRGSVSDRTGQINVIQDYTHQMGNLLIQQANINGTIGYHTRFSGHGHEEHAPFDNHAADSASKEQGNVDEGFTVYRLNWEGHEHHPADGYDGPKGGNYPKPTGARDEYTYHVNGTARSIKLNPTDTRSIRQRISDNYNNLGSNFSDRADEANRKMFEHNAKLDRWGNSMEFINGVAAGALNPFISAGEALGIGDILYGTRYAIDKAAMRNIAPLPAEGKFAVIGGLGSVAGFEKNTREAVDRWIQENPNAAETVEAVFNVAAAAKVAKLAKAAKPGKAAVSGDFSDSYKHNTASRLSQSVDGEMFQTRNVDFKAKSIGTKIHDGAQGKHISGHRNYIEGKSTLNQNINPQELLNGIHSGAYPVISKGARGNPVVDFGYPIGSDGKSGLSTNFGTIHSGKNGVHIVPANPKTIKKVQ

SEQ ID NO: 27436 - protein, 348 aa, Neisseria meningitidis; identical to SEQ ID NO: 19483

SEQ ID NO: 27437 - protein, 274 aa, Neisseria meningitidis; identical to SEQ ID NO: 5218

SEQ ID NO: 27438 - protein, 327 aa, Neisseria meningitidis
VLLTLHGTDKFCIVNNFHTNRNTAYKALKDACNNLFERQFSFIEKTPKGEKVVRTRWVSQVAYIEQQATVELVFAPNVAPLITMLEKNFTSYELDQVSSLSSKYAVRLYEIIISWRAAGKTPMFSTMELRERLGVMPDEYQKMELFKRKVLDFAVKQINDKTDISITYEQHKEGRKIVGFTFSILHKIGSKDIPLENQSELFAGMTDLEAGTIRVREEAYIASLIAKGQNVTKAHRLNILKKAVDERWGFEDAAKDNGTKNPENKNAKVVLNEWEKIPNGTRFKDKDGTIWVKDSGLLRTEETNRWIADSQIARLFPMLTVMVEEGI

SEQ ID NO: 27439 - protein, 226 aa, Neisseria meningitidis
MIFQTVWFSDMVLSVSWIVLILILAASAPSAFRSLARYRSALPLCTVIFSAAWCLNASASGGQLAQMNYHLLAVNLVALMVGTSAAFWLAALLMLPYCLLFAGSAGAYPPNALVLILPALAVNRLSRMLVNRLPPNIFIFIFVNGFLASAAGILLTGLVLTGILDAANAFPSEILWTTALPVFILLAWAEAFLSGISTAIFVALKPHWINTFDDNRYLKSDRGIWR

SEQ ID NO: 27440 - protein, 633 aa, Neisseria meningitidis
MTTPKKTAKTSGNEARELADLSEDIGIRFKYPNSERVYLQGSRDDIRVPLREIRQDDTYTAQGTEANPPIPVYDTSGVYGDPAAHIDLKQGLPHIRTAWLNERGDTEILPKLSSEYGIERAHDPKTAHLRFNQITRPRRAKAGGNVTQLHYARQGIITPEMEFVAIRERLKLDELSQKPEYAKLLKQHAGQSFGANIPTHPDQITPEFVRQEIAAGRAIIPANINHPELEPMIIGRNFRVKINGNLGNSAVTSSLTEEVEKMVWSLRWGADTIMDLSTGAHIHETREWIIRNAPVPIGTVPIYQALEKTGGIAEDLTWDLFRDTLIEQAEQGVDYFTIHAGVLLRYVPMTANRLTGIVSRGGSIMAKWCLAHHRENFLYTHFDEICEIMKAYDVSFSLGDGLRPGCIADANDESQFAELHTLGELTDKAWKHDVQVMIEGPGHVPLQRVKENMTEELQHCFEAPFYTLGPLVTDIAPGYDHITSGIGAANIGWYGTAMLCYVTPKEHLGLPDKEDVRTGIITYKLAAHAADLAKGWPGAQLRDNALSKARFEFRWRDQFRLSLDPERAESFHDETLPAEGAKIAHFCSMCGPKFCSMKITQEVRDYADKQKAQRQGMEEKAVEFVKKGAKIYS

SEQ ID NO: 27441 - protein, 160 aa, Neisseria meningitidis; identical to SEQ ID NO: 236

SEQ ID NO: 27442 - protein, 427 aa, Neisseria meningitidis; identical to SEQ ID NO: 146

SEQ ID NO: 27443 - protein, 557 aa, Neisseria meningitidis
MLLTLSLRDFVIVENLNLDFQSGFTVLTGETGAGKSITLDAIGLLLGDKADYSQVRSGAKEAQLSALFDISHLPVLKAELYEQGLLNDGEEELSIRRIIDAKGKSRSFINNQAATLAQLKAVGSQLIDIHGQNAHHSLNQEAAQRELLDAFAGSRAQAETVRQLYQNWANSKKALQEAQEQAENIALEQERLEWQFNELNQLDIKQGEWEALSQSHDSLAHSAELLQAAEEVGSKIDGDNGIQRHIYQCQKLLANLQNIEPRFAESLNMLASIEAELGEISANMRDVAGRSDINPNELAAQEQRMGELMGMARKYRIEPEELPAKLAEIEERLQSLQAAADLDALEHNVAYNFAEYQEAAHILSAMRHQAAERLSGETTEHMQHLAMKGARFDIVLLPSSPTAHGLEQVQFQVAANKGNPPRPLNKVASGGELARISLALQVVASQYTQVPTLIFDEVDTGIGGGVAEMVGKALRALGRKHQVLAVTHLPQVASCGENHWRVRKHSEGEQTVSEISILDEIQRIEEVARMLGGEVITDTTRQHAAELLQLASKNSLF

SEQ ID NO: 27444 - protein, 81 aa, Neisseria meningitidis
MLKSIELNSHIRNRLAAYLKGRGMDFQTAMQEEKGNKEIAAIVHSGLPTLVRKLYSEQKMQKFFWEKRDLIADYISRRMQG

SEQ ID NO: 27445 - protein, 469 aa, Neisseria meningitidis
MNFPKTAASLLLLLASLAAHALDTGRIPQNEIAVYVQELDSGKVIIDHRSDVPVNPASTMKLVTAFAAFKTFGSNYRWATEFKSNGTVNDGTLDGNLYWAGSGDPVFNQENLLAVQRQLREQGIRNITGHLMLDHSLWGEVGSPDDFEADSGSPFMTPPNPTMLSAGMVMVRAERNAAGSTDILTDPPLPHIFAQNNLKITASQAACPSIKKLMRASFSDNTLKLRGNIPESCLGKPVGVRMFALDELIRQSFTNHWLLGGGRISDGIGIADTPEGAQTLAVAHAKPMKEILTDMNKRSDNLIARSVFLKLGGDGKLPAVSEQAASAVRRELAVSGIDIADLVLENGSGLSRKERVTARMMAQMLETAYFSPFAQDFIDTLPIAGTDGTLRNRFKQSGGLLRLKTGTLNNVRALAGYWLGDKPMAVVVIINSGRAVSLLPDLDNFVANNIISGGDGWLDAKLMCKERRA

SEQ ID NO: 27446 - protein, 54 aa, Neisseria meningitidis
MRKACRNRPLTENQTKRNRYLSKTRYVVEQSFGTLHRKFRYARAAYFGLIKVSA

SEQ ID NO: 27447 - protein, 43 aa, Neisseria meningitidis; identical to SEQ ID NO: 12582

SEQ ID NO: 27448 - protein, 214 aa, Neisseria meningitidis; identical to SEQ ID NO: 3176

SEQ ID NO: 27449 - protein, 92 aa, Neisseria meningitidis; identical to SEQ ID NO: 600

SEQ ID NO: 27450 - protein, 190 aa, Neisseria meningitidis; identical to SEQ ID NO: 917

SEQ ID NO: 27451 - protein, 247 aa, Neisseria meningitidis
MLIIRNLIYWLILCSSLIFLFPFMLLASPFRDGAHKMARVWVKILNLSLKHIVGLKYRIIGAENIPDRPAVICAKHQSGWETLALQDIFPPQVYVAKRELFKIPFFGWGLKLVKTIGIDRNNRREANEQLIKQGLARKNEGYWITIFPEGTRLAPGKRGKYKLGGARMAKMFEMDIVPVALNSGEFWPKNSFLKYPGEITVVICPTIPHASGSEAELMEKCEHLIETQQPLISGAGPFAAKMPSETA

SEQ ID NO: 27452 - protein, 214 aa, Neisseria meningitidis; identical to SEQ ID NO: 18686

SEQ ID NO: 27453 - protein, 1075 aa, Neisseria meningitidis
MNKTLKRRVFRHTALYAAILMFSHTGGGGAMAQTYKYAIIMNEGNQLEVKGNGQYSTIKDKDREREYTYHQGRGGGGSVSFNNSDELVSRQSGTAVFGTATYLPPYGKVSGFDERKLKERTNALNWIHTTHPGLIGYSYAGVVCRDSTGCPKLVYKTQFTFGNSGLAKKANGGGLDIYVDKSRDNSPIYKLKDHPWLGVSFNLGSENTVKNSKSSNKLISSFSEDNNNQTIVSTTEGSPISLGDQQREHTAVVYYLNAKLHLLDKKQIQNITDKTVQLGVLKPSIDVRQQKGANWLSFWASWDIKDTGQIPVKLGLQQVKAGRCINKPNPNPNKKDLSPALTAPALWFGPVKDGKAEMYSASVSTYPDSSSSRIFLQNLERKTDPGRPGRHSLKPLSDTQIKSREPNFTGRQTVIRLDKGVHQIKLKGNEVEGFKGNNGNDTFGIVREGSFTPDASEWKKVLLPWTVRDSNDDGRFNAVNKEENNGKPKYSQRYRIRDNNGNRNLGDIVNSPIVAVGEYLATSANDGMVHIFKKNGGGDDRNYSLKLSYIPGTMPRKDIENKESTLAKELRAFAEKSYVGDRYGVDGGFVLRRITDDQDKQKHFFMFGAMGLGGRGAYALDLSKIDSNNPTAVSLFDVKHDNSGNNSNNSNNSNNSNNSNNSNNSNNSNNSNNSNNSNNSNNSNNSNNSNNSVQLGYTVGTPQIGKTHNGKYAAFLASGYATKTIDSTDNKTALYVYDLESNNGTPIAKIEVTGGKGGLSSPTLVDKDLDGTIDIAYAGDRGGSMYRFDLSSQDPKQWSARAIFKGDKPITSAPAISQLKDKRVVIFGTGSDLSEDDVLSTDEQHIYGIFDNDTNTGTAQDGQGNGLLEQVLKKDGNTLFLSDYKRSNGSGDKGWVVKLEAGQRVTVKPTVVLRTAFVTIHKYTGNDKCGAETAILGINTADGGKLTKKSARPIVPAANSKVAQYSGDKKTSSGKSIPIGCMEKDNGIVCPNGYVYDKPVNVRYLDEKKTDDFPVTADGDAGGSGTFKEGKKPARNNRCFSGKGVRTLLMNDLDSLDITGPMCGMKRISWREVFY

SEQ ID NO: 27454 - protein, 216 aa, Neisseria meningitidis
MIRFEQVSKTYPGGFEALKNVSFQINKGEMIFIAGHSGSGKSTVLKLISGITKPSRGKILFNGQDLGTLSDNQIGFMRQHIGIVFQDHKILYDRNVLQNVILPLRIIGYPPRKAEERARIAIEKVGLKGRELDDPVTLSGGEQQRLCIARAVVHQPSLLIADEPSANLDRAYALDIMELFKTFHESGTTVIVAAHDETLMADYGHRILRLSKGRLA

SEQ ID NO: 27455 - protein, 257 aa, Neisseria meningitidis; identical to SEQ ID NO: 18044

SEQ ID NO: 27456 - protein, 365 aa, Neisseria meningitidis; identical to SEQ ID NO: 3268

SEQ ID NO: 27457 - protein, 513 aa, Neisseria meningitidis
MKFLDREASIAKPGFNRWLVPPAALAVHLAIGQIYAYSVFNAPLTKLIGITESAAGDWKLTTVGWIFSIALAMLGASAALFGTWMERVGPRKAIFAAACCFSLGFFVSAFGVRTHNLFLLYLGNGVIGGVGLGLGYIGPVSTLMKWFPDKPGMATGLAIMGFGGGAMLASPLSVSLMNAFSNAASVGVVETFAVLGLLYLALMMFGAFTIRVPADGWKPEGYTAPKTQNKLVSSNHVNVSQAMKTPQFWLLFWVLCLNVTAGIGVLGQASVMIQELFSETSVGRQASVGAGAAAGFVSLLSLFNMGGRFLWSSVSDKIGRKNTYTIFFVLGSLLYFAVPSIGEGGSKALFIIGFCVIISMYGGGFAAIPAYLKDLFGTYQVGAIHGRILLAWSTAAVIGPVLVNYIRQSQIDSGIPAAQAYSVTMYIMACLLIIGLLCNLAVKSVHEKHHEKDIKTAAHSGNPDDETAISDAYLVGEKVSGGGISVWWRWALAVIPLAYGVVMVFVKALDLFS

SEQ ID NO: 27458 - protein, 524 aa, Neisseria meningitidis; identical to SEQ ID NO: 2756

SEQ ID NO: 27459 - protein, 539 aa, Neisseria meningitidis
MDNLVWDGIPDIRTLDQAIRKHAPPLNLIICLPDNQIPDFQTAQDASDAECRLKHRLDQATQCLQFDSINLIEHILHDIRFWLVPPSRTCRLHEHFHHISWQTEAISQTESKSDKPWFALPQTSERQKPEHILVIGAGISGAATAHALASHGISVTVLEARKAAQAASGNRQGLLYAKISPHDTEQTELLLAGYGYTKRLLRHILPESETWGGNGIIHLNYSRIEQQRNHELGLQKHHNHLYRSITSAEAEKIAGIPLSVPYDHPSCGLYWQHGVWLNPPAFVRTLLRHPLIGLHEDTPLTDISYDGEKWIASTPNGIFSATHIIYCTGANSPCLPETNLAALPLRQIRGQTGLTPSTPFSEQLRCAVSGESYISPSWHGLHCYGASFIPNSSHTGWNDAEETSNRQALAHLNPALAESLFAANPIPQKYQGHAAIRCDSPDHLPLVGALGDIAAMRQTYAKLALDKNYRIDAPCPYLPNAYANTAHGTRGLATAPICAAAVAAEILGLPHPFSQRLRHALHPNRTIIRAIVRRKDLTP

SEQ ID NO: 27460 - protein, 72 aa, Neisseria meningitidis
MGNSQGVILPKSLLGQIGAVDSLAVTVEKGNIILSCPTVRRGWAEAAAMLVETEQEHFFSEIENEADKEWIW

SEQ ID NO: 27461 - protein, 242 aa, Neisseria meningitidis; identical to SEQ ID NO: 7658

SEQ ID NO: 27462 - protein, 381 aa, Neisseria meningitidis
MQNNSYGYAVSVRVGGKEHRHWERYDIDSDFLIPADSFDFVIGRLGPEAAIPDLSGESCEVVIDGQIVMTGIIGSQRHGKSKGGRELSLSGRDLAGFLVDCSAPQLNVKGMTVLDAAKKLAAPWPQIKAVVLKVENNPALDKIDIEPGETVWQALTHIANSVGLHPWLEPDGTLVVGGADYSSPPVATLCWSRTDSRCNIERMDIEWDTDNRFSEVTFLAQSHGRSGDSAKHDLKWVYKDPTMTLHRPKTVVVSDADNLAALQKQAKKQLADWRLEGFTLTITVGGHKTRDGVLWQPGQRVHVIDDEHGIDAVFFLMGRRFMLSRMDGTQTELRLKEDGIWTPDAYPKKAEAARKRKGKRKGVSHKGKKGGKKQAETAVFE

SEQ ID NO: 27463 - protein, 227 aa, Neisseria meningitidis
MQHDVYDYTAHTVSKNTVLQKTYRLLGFSFIPAAAGAALAANAGFNFYAAFGSRWIGFAVVLAFFYGMIHFIEKNRYSNTGVTLLMIFTFGMGVLIGPVLQYALHIADGTKIVGIAAAMTAAVFLTMSALARRTRLDMNALGRFLTVGAVILMVAVVANLFLGIPALALTISAGFVLFSSLMIMWQVRTVIDGGEDSHISAALTLFISLYNIFSSLLNILLSLNGED

SEQ ID NO: 27464 - protein, 45 aa, Neisseria meningitidis
MLPRKFKNLKFRPNQHTRCPMPIEIPHTNKKVPKIGTKTDNFQHC

SEQ ID NO: 27465 - protein, 518 aa, Neisseria meningitidis; identical to SEQ ID NO: 4590

SEQ ID NO: 27466 - protein, 173 aa, Neisseria meningitidis
MSCFSIKRMSAFRARITAFFAAFVFLTAALPAYAERLPDFLAKIQPSEIFPGADRYGKPEGKPMVARVYKGDEQLGLVYITTDAVNTRGYSSKPIDTLMALANDGTIAGAKLVDHHEPIMLIGIPHLPAPGRAIRLNWLPAYIKPNFISTNRLRLKGLPTVLQPSKGTGAGVP

SEQ ID NO: 27467 - protein, 101 aa, Neisseria meningitidis; identical to SEQ ID NO: 24266

SEQ ID NO: 27468 - protein, 761 aa, Neisseria meningitidis
MNTKLTKIISGLFVATAAFQTASAGNITDIKVSSLPNKQKIVKVSFDKEIVNPTGFVTSSPARIALDFEQTGISMDQQVLEYADPLLSKISAAQNSSRARLVLNLNKPGQYNTEVRGNKVWIFINESDDTVSAPARPAVKAAPAAPAKQQAAAPSTKSAVSVSKPFTPAKQQAAAPFTESVVSVSAPFSPAKQQAAASAKQQTAAPAKQQAAAPAKQTNIDFRKDGKNAGIIELAALGFAGQPDISQQHDHIIVTLKNHTLPTTLQRSLDVADFKTPVQKVTLKRLNNDTQLIITTAGNWELVNKSAAPGYFTFQVLPKKQNLESGGVNNAPKTFTGRKISLDFQDVEIRTILQILAKESGMNIVASDSVNGKMTLSLKDVPWDQALDLVMQARNLDMRQQGNIVNIAPRDELLAKDKAFLQAEKDIADLGALYSQNFQLKYKNVEEFRSILRLDNADTTGNRNTLVSGRGSVLIDPATNTLIVTDTRSVIEKFRKLIDELDVPAQQVMIEARIVEAADGFSRDLGVKFGATGKKKLKNDTSAFGWGVNSGFGGGDKWGAETKINLPITAAANSISLVRAISSGALNLELSASESLSKTKTLANPRVLTQNRKEAKIESGYEIPFTVTSIANGGSSTNTELKKAVLGLTVTPNITPDGQIIMTVKINKDSPAQCASGNQTILCISTKNLNTQAMVENGGTLIVGGIYEEDNGNTLTKVPLLGDIPVIGNLFKTRGKKTDRRELLIFITPRIMGTAGNSLRY

SEQ ID NO: 27469 - protein, 275 aa, Neisseria meningitidis; identical to SEQ ID NO: 2739

SEQ ID NO: 27470 - protein, 67 aa, Neisseria meningitidis; identical to SEQ ID NO: 86

SEQ ID NO: 27471 - protein, 603 aa, Neisseria meningitidis; identical to SEQ ID NO: 3231

SEQ ID NO: 27472 - protein, 593 aa, Neisseria meningitidis
MPYFALFDDAVSGRAKRYQNHVESRFFRPEELDALDGALQSGWQKGLHAVLFADYGFGLPLTGVESERGGNLALHWFADCADTDAASWLARHSDGLPAGISTPQSSVSEADYLDHIRQIHEAIRRGDTYQINYTTRLHLQAYGNPVKLYQRLRQPVPYAVLSHLPDAQGQSAWTLCFSPELFLKIGSDGTISTEPMKGTAPILGDGQDERRAAELQADPKNRAENVMIVDLLRNDLGKIAQIGKVCVPEPFKVSRFGSVWQMTSTIQAQALPNTSFADILRAAFPCGSITGAPKKMSMQIIESLETEARGLYTGSIGYLKPCAGGLGFEGAFNVVIRTLSLTPLSDGIYQGVYGVGSGIVIDSDPAAEYRECGWKARFLNELRPDFGIFETLRVENRQCTLLNRHLCRLKAAAQALNLPLPDGCENQIKQYIARLPDGVFRVKALLASDGISLSRAVLNRLTDKQRVIISPAVLPAQNYLRRFKTTHRALFDQAWQTAETQGAFDSLFFNSDGILLEGGRSNVFVKYQGQWLTPSLDLDILNGIMRQAVLDEPQKYLQTNQVIETHITQKTLQEAEEIRLSNALRGVFAAALA

SEQ ID NO: 27473 - protein, 388 aa, Neisseria meningitidis
MRKFNLTALSVMLALGLTACQPPEAEKAAPAASGETQSANEGGSVSIAVNDNACEPMELTVPSGQVVFNIKNNSGRKLEWEILKGVMVVDERENIAPGLSDKMTVTLLPGEYEMTCGLLTNPRGKLVVTDSGFKDTANEADLEKLSQPLADYKAYVQGEVKELVAKTKTFTEAVKAGDIEKAKSLFADTRVHYERIEPIAELFSELDPVIDAREDDFKDGAKDAGFTGFHRIEYALWVEKDVSGVKEIAAKLMTDVEALQKEIDALAFPPGKVVGGASELIEEVAGSKISGEEDRYSHTDLSDFQANVDGSKKIVDLFRPLIEAKNKALLEKTDTNFKQVNEILAKYRTKDGFETYDKLGEADRKALQASINALAEDLAQLRGILGLK

SEQ ID NO: 27474 - protein, 128 aa, Neisseria meningitidis; identical to SEQ ID NO: 8714

SEQ ID NO: 27475 - protein, 304 aa, Neisseria meningitidis; identical to SEQ ID NO: 8772

SEQ ID NO: 27476 - protein, 273 aa, Neisseria meningitidis
MSSPRHVFYISDRTGLTAENIGEALLNQFGNLSFKRHTHPFVDTPEKACAVVEKVNRSRQENGQRPIAFVSVVDDEIRRIIKGADAFQINFFETFLGLLEKELNTEATASGQGHHSIGNTKRYDARMEAVNFSLNHDDGVSDKNLQEADVILMGVSRSGKTPTCLYLALQYGIRAANYPLIPDDLESADLPRMVKPYRDKLFGLTIQPERLQAIRQERRPNSTYAKIDTCRSEVADAQSMFRRHGIPFANTTDKSVEELAVHILQACKLKRRF

SEQ ID NO: 27477 - protein, 637 aa, Neisseria meningitidis
MLNITLPDGSVRQYESPVTVAQIAASIGVGLARAAVAGRVNGKLVDACDPIVEDSAVQIITPKDQEGIEIIRHSCAHLVGHAVKQLYPNAKMVIGPVIEEGFYYDIATEKPFTPEDVAAIEARMKELIAQDYDVVKIMTPRAEAIKIFQERGEEYKLRLIDDMPEVEAMGMYHHQEYVDMCRGPHVPNTRFLKNFKLTKLAGAYWRGDSNNEMLQRIYGTAWATKDELKAYIQRIEEAEKRDHRKLGKQLDLFHLQDEAPGMVFWHPKGWALWQVIEQHMRKELNAAGYKEVKTPQIMDKTFWEKSGHWENYKDNMFVTSSEKREYAVKPMNCPGHVQIFNNGLRSYRDLPMRLAEFGSCHRNEPSGALHGLMRVRGFVQDDAHIFCTEDQIVSEARAFNELLVRIYKQFGFHDVSVKLSLRPEQRAGSDDVWDKAEQGLREALTACGVEWGELPGEGAFYGPKIEYHVRDALGRSWQCGTLQLDFVLPERLDAEYVTENNDRARPVMLHRAILGSLERFIGILIENYAGSFPLWLAPVQLVIMNITENQADYCREVAAKLQAAGFRVELDLRNEKIGYKIRDNSQYRFPYQIVVGDKEKQENKVAVRRKAEDLGSLDLDDFIAQLQQEITDALVNH

SEQ ID NO: 27478 - protein, 525 aa, Neisseria meningitidis
MSKAVKRLFDIIASASGLIVLSPVFLILAYLIRKNLGSPVFFIQERPGKDGKPFKMVKFRSMRDALDSDGIPLPDSERLTPFGKKLRAASLDELPELWNVLKGDMSLVGPRPLLMQYLPLYDNFQNRRHEMKPGITGWAQVNGRNALSWDEKFACDVWYTDNFSFWLDMKILFLTVKKVLIKEGISAEGEATMPYFTGNQTNEKNNILILSAGRRVELVQDFQTEAARFSDGISVFATDLNPRMSSACHVSDGSFEVPPISADSYIDSIFNLAVRENIGLIIPTIDTELQKLADERERFEAASVHIVVSDSDFIAQCRDKRKTATLFARYGIRSPEIYDRKKLVFPCFAKPYDGSRAIGAKRIDTPADLTPEVLADTKLMFCQFIDIENKFSEFTVDMYYDRQCRLKCAIPRKRLEVRSGEISKGVTCKNSLYQTLLEKMSVLQGARGCITAQFFYNEETGEFYGVEINPRFGGGFPLTYAAGGNYPSRLMREYLGDEEIPFSDDWENNLIMLRYDAKVLVHEND

SEQ ID NO: 27479 - protein, 141 aa, Neisseria meningitidis; identical to SEQ ID NO: 3635

SEQ ID NO: 27480 - protein, 144 aa, Neisseria meningitidis; identical to SEQ ID NO: 4528

SEQ ID NO: 27481 - protein, 214 aa, Neisseria meningitidis
MKLKHLLPLLLSAVLSAQAYALTEGEDYLVLDKPIPQEQSGKIEVLEFFGYFCVHCHHFDPLLLKLGKALPSDAYLRTEHVVWQPEMLGLARMAAAVNLSGLKYQANPAVFKAVYEQKVHLEDRAVAGKWALSQKGFDGKKLMRVYDSPEAAAAASKMQKLTEQYGIDNTPTVIVGGKYRVIFNNGFDGGVHTIKELVAKVREERKRQPPAVQK

SEQ ID NO: 27482 - protein, 351 aa, Neisseria meningitidis
MTILSDVKALGQQIWLDNLSRSLVQSGELAQMLKQGVCGVTSNPAIFQKAFAGDALYADEVAALKQQDLTPKQRYETMAVADVRAACGVCLAEHESTGGKTGFVSLEVSPELSKDAQGTVEEARRLYAAIGCKNAMIKVPATDAGIDALETLVSDGISVNLTLLFSRAQTLKAYAAYARGIAKRLAAGQSIAHIQVVASFFISRVDGALDTTLPDHLKGKIAIALAKAAYQDWAQYFGSPEFAALETKGANRVQLLWASTGVKNPAYPDTLYVDSLIGAHTVNTVPDATLKAFIDHGTAKATLTEGVEEAQAQLAETAALGIDVETLATRLQEDGLKQFEEAFEKLLAPLV

SEQ ID NO: 27483 - protein, 594 aa, Neisseria meningitidis; identical to SEQ ID NO: 9182

SEQ ID NO: 27484 - protein, 107 aa, Neisseria meningitidis; identical to SEQ ID NO: 178

SEQ ID NO: 27485 - protein, 109 aa, Neisseria meningitidis; identical to SEQ ID NO: 899

SEQ ID NO: 27486 - protein, 170 aa, Neisseria meningitidis
MLPNTPRRAVYAGSFDPPTLGHLWMIRQAQSMFDELIVAIGINPDKRSTYTVAERQDMLCDITKMFPNVRTDVFENRFLVHYAREVDAGFIVRGIRSASDYEYERSMRHINSDLAPEISTVFLMPPREIAEVSSTMVKGLVGPEGWMETIHRYVPQAVYEKILAEHQHEN

SEQ ID NO: 27487 - protein, 786 aa, Neisseria meningitidis
MLPIAALVGSIFGNPVFAADEAATETTPVKAEVKAVRVKGQRNAPAAVERVNLNRIKQEMIRDNKDLVRYSTDVGLSDSGRHQKGFAVRGVEGNRVGVSIDGVNLPDSEENSLYARYGNFNSSRLSIDPELVRNIDIVKGADSFNTGSGALGGGVNYQTLQGRDLLLPERQFGVMMKNGYSTRNREWTNTLGFGVSNDRVDAALLYSQRRGHETESAGNRGYAVEGEGSGANIRGSARGIPDSSKHKYHSFLGKIAYQINDNHRIGASLNGQQGHNYTVEESYNLTASSWREADDVNRRRNANLFYEWMPDSNWLSSLKADFDYQKTKVAAVNNKGSFPMDYSTWTRNYNQKDLDEIYNRSMDTRFKRFTLRLDSHPLQLGGGRHRLSFKTFVSRRDFENLNRDDYYFSGRVVRTTSSIQHPVKTTNYGFSLSDQIQWNDVFSSRAGIRYDHTKMTPQELNAECHACDKTPPAANTYKGWSGFVGLAAQLNQAWHVGYDITSGYRVPNASEVYFTYNHGSGNWLPNPNLKAERSTTHTLSLQGRSEKGMLDANLYQSNYRNFLSEEQKLTTSGTPGCTEENAYYGICSDPYKEKLDWQMKNIDKARIRGIELTGRLNVDKVASFVPEGWKLFGSLGYAKSKLSGDNSLLSTQPLKVIAGIDYESPSEKWGVFSRLTYLGAKKAKDAQYTVYENKGWGTPLQKKVKDYPWLNKSAYVFDMYGFYKPAKNLTLRAGVYNVFNRKYTTWDSLRGLYSYSTTNSVDRDGKGLDRYRAPSRNYAVSLEWKF

SEQ ID NO: 27488 - protein, 94 aa, Neisseria meningitidis
MKKLLLAAVVSLSAATAFAGDSAERQIYGDPHFEQNRTKAVKMLEQRGYQVHDVDADDHWGKPVLEVEAYKDGREYDIVLSYPDLKIIKEQLDR

SEQ ID NO: 27489 - protein, 344 aa, Neisseria meningitidis; identical to SEQ ID NO: 7515

SEQ ID NO: 27490 - protein, 335 aa, Neisseria meningitidis; identical to SEQ ID NO: 26749

SEQ ID NO: 27491 - protein, 350 aa, Neisseria meningitidis
MTVSPVALRRKTECKPHPTARYWKKCDVEALFGLPFLDLIYQAAEVHRQNFNPREIQLSTLLSIKTGGCPEDCAYCPQSAHHNTNLGKEQMMDVDEIVEKAKIAKSRGASRFCMGAAWRGPKPKDVETVSAIIKAVKGLGMETCGTFGMLEEGMAEDLKEAGLDYYNHNLDTDPDRYNDIIHTRRHEDRMDTLGKVRNAGLKVCCGGIVGMNETRAERAGLIASLANLDPQPESVPINRLVKVEGTPLADAEDLDWTEFVRTIAVARITMPQSYVRLSAGRSNMPEAMQAMCFMAGANSIFYGDKLLTTGNPDEDGDRILMEKLNLYPLQFELEGEVAEVEKASGIKVDY

SEQ ID NO: 27492 - protein, 255 aa, Neisseria meningitidis; identical to SEQ ID NO: 3233

SEQ ID NO: 27493 - protein, 61 aa, Neisseria meningitidis; identical to SEQ ID NO: 6755

SEQ ID NO: 27494 - protein, 305 aa, Neisseria meningitidis
MSVYTSVSDDEMRGFLSGYDLGEFVSLQGIAQGITNSNYFLTTTSGRYVLTVFEVLKQEELPFFLELNRHLSMKGVAVAAPVARKDGRLDSVLAGKPACLVACLKGSDTALPTAEQCFHTGAMLAKMHLAAADFPLEMENPRYDAWWTEACARLLPVLSRDDAALLCSEIDALKDNLGNHLPSGIIHADLFKDNVLLDGGQVSGFIDFYYACRGNFMYDLAIAVNDWARTADNKLDEVLKKAFIGGYEGVRPLSAEEKAYFPTAQRAGCIRFWVSRLLDFHFPQEGEMTFIKDPNAFRNLLLSLG

SEQ ID NO: 27495 - protein, 279 aa, Neisseria meningitidis; identical to SEQ ID NO: 223

SEQ ID NO: 27496 - protein, 200 aa, Neisseria meningitidis
MFNIPAVAVSYLIGSLSFAVIVSKYYGMDDPRTYGSGNPGATNVLRSGKKKAAALTLLGDAAKGLVAVLLARVLQEPLGLSDSAIAAVALAALVGHMWPVFFGFKGGKGVATALGVLLALSPATALICALIWLVMAFGFKVSSLAALVATTAAPVAASFFMPHVSWVWATVAIALLVLLRHKSNIGNLLKGKEGKIGEKR

SEQ ID NO: 27497 - protein, 296 aa, Neisseria meningitidis
MNPKSPLFLRLSDRLDVYLRLMRADKPIGTLLLLWPTYWALWLASDGIPDLAVLAAFTIGTFLMRSAGCVINDFADRDFDGAVERTKNRPFAQGRVKKKEALLLTAFLCLLAALCLIPLNHLTWLMSLPALFLALTYPFTKRFFPIPQLYLGLAFSFGIPMAFAAVAGNVPPQAWILFAANVLWTLAYDTVYAMADKEDDLKIGIKTSAVTFGRYDIAAVMLCHGGFTLLMAVLGAVIGAAWAYWTAIPIVLLLQYRQYAAIKSRVRQICFETFLANNRIGWVWFAAIFAHTFFAK

SEQ ID NO: 27498 - protein, 642 aa, Neisseria meningitidis; identical to SEQ ID NO: 269

SEQ ID NO: 27499 - protein, 370 aa, Neisseria meningitidis
MTAKEELFAWLRHMNQNKGSDLFVTTHFPPAMKLDGKITRITDEPLTAEKCMEIAFSIMSAKQAEEFSSTNECNFAISLPDTSRFRVNAMIQRGATALVFRAITSKIPKFESLNLPPVLKDVALKKRGLVIFVGGTGSGKSTSLASLIDYRNENSFGHIITIEDPIEFVHEHKNCIITQREVGVDTENWMAALKNTLRQAPDVILIGEIRDRETMDYAIAFAETGHLCMATLHANSTNQALDRIINFFPEERREQLLTDLSLNLQAFISQRLVPRDGGKGRVAAVEVLLNSPLISELIHNGNIHEIKEVMKKSTTLGMQTFDQHLYQLYEKGDISLQEALKNADSAHDLRLAVQLRSRRAQSSSPDLELI

SEQ ID NO: 27500 - protein, 364 aa, Neisseria meningitidis
MKTNLLNYDLQGLTRHFADMGEKPFRAKQVMRWMHQSGAQNFNEMTDLAKSLRHKLNEQAGIEIPKLMMSQKSSDGTRKWLLDVGTGNGVETVFIPESDRGTLCISSQVGCALECTFCSTGRQGFNRNLTSAEIIGQLWWANKAMGVTPKNERVISNVVMMGMGEPMANFDNVVTALSIMLDDHGYGLSRRRVTVSTSGMVPQMDRLRDVMPVALAVSLHASNDEVRNQIVPLNKKYPLKELMAACQRYLVKAPRDFITFEYVMLDGINDKAQHARELIELVTDVPCKFNLIPFNPFPNSGYERSSNENIRVFRDILQQAGFVVTVRKTRGDDIDAACGQLAGQVQDKTRRQQKWQQILIGQQG

SEQ ID NO: 27501 - protein, 311 aa, Neisseria meningitidis
MSVLIIVEHDNKQLNPTTLHAVTAAAKLGKIDLLVAGSGASAVVEFAKQVAGVEKVLVADAAHYAEGLAEELAPLVVKLAADYCYVAATATTFGKNLLPRVAALLDVPQISDLTEIVDNMTFVRPIYAGNAFETVQADSEKLVLTFRATVFDAVAEQGGNAEVINVEATPAQNLSRFVNRQLSHSDRPELTQAKVIVSGGRALGSAEKFNEVLTPLADVLGAAIGASRAAVDAEYAPNDAQVGQTGKVVAPQLYFAIGISGAIQHVAGMQDSKVIVAINKDADAPIFNVADYGLVGDLFEIVPQLTEALKN

SEQ ID NO: 27502 - protein, 164 aa, Neisseria meningitidis
MNNRHFAVIALGSNLENPAQQVRAALDTLSSHPDIRLKQASSLYMTAPVGYDNQPDFVNAVCTVSTTLDGIALLAELNRIEADFGRERSFRNAPRTLDLDIIDFDGISSDDPRLTLPHPRAHERSFVIRPLAEILPDFILGKHGKVAELSKQLGNQGIRLLPDR

SEQ ID NO: 27503 - protein, 161 aa, Neisseria meningitidis; identical to SEQ ID NO: 8432

SEQ ID NO: 27504 - protein, 397 aa, Neisseria meningitidis; identical to SEQ ID NO: 6616

SEQ ID NO: 27505 - protein, 563 aa, Neisseria meningitidis
MSASQLLSRLTQTVGEKYIITDPAKTEQYRQGYRFGEGKALAVVRPGSILEMWKILQACVEADVIVITQAANTGLTGGSTPDGNDYDRDIVIVNTMRMNIIQTINNNEQVVCLPGSTLNQLELLLKPLGREPHSVIGSSCIGASVLGGVCNNSGGALVQRGPAYTEMALFAQINEESRLELVNHLGIDLGDTPEEILTNLQGHHYQNKDIKQDAGKGHDHAYCEHVRQVDEPTAARFNADPARHYEASGCAGKLMVFAVRLDTFPQEKQTAVFYIGTNDINELTDIRRAALGEFESLPVSGEYIHRHAFDIADVYGKDTFYVIKKFGTHQLPKLFDLKARVDRFGKKASFLPKHFSDKAMQFVSKYLPDHLPKSMRDYRDKYEHHLILKMGGKGVDEARAFLKEYFAHHSGAFFECNAEETQAAMLHRFAVASAAIRYRAVHDDEVEDLVALDIALRRDDRDWFEKLPSEIDNKIIHKLYYGHFMCHVFHQDYIIKKGNDCMALEHEMLHLLDQRGAQYPAEHNVGHLYEAKPALKQFYRKLDPTNSFNPGVGKTSKKKNWAE

SEQ ID NO: 27506 - protein, 273 aa, Neisseria meningitidis; identical to SEQ ID NO: 2413

SEQ ID NO: 27507 - protein, 433 aa, Neisseria meningitidis
MTESVRLPVARLKLSTVALPGSKSISNRTLLLAALSDNACEIHSLLKSDDTDRMLEALDKLGVEIEYLAEDRLKVHGTGGRFPNRTADLFLGNAGTAFRPLTAALAVLGGNYRLHGVARMHERPIGDLTDALRIAGANVEYLGKEHYPPLHIGERQDNGERVIPIKGNVSSQFLTALLMALPLTGQAFEIRMVGELISKPYIDITLKLMAQFGVQVINEGYRVFKIPADARYHAPEHLHVEGDASSASYFLAAGLIAATPVRVTGIGANSIQGDVAFARELEKIGADVVWGENFVEVSRPKERAVQAFDLDANHIPDAAMTLAIVALATGQTCTLRNIGSWRVKETDRIAAMANELRKLGAKVAEEAEAIHITPPETPTPDAVIDTYDDHRMAMCFSLVSLLGVPVVINDPKCTHKTFPTYFDVFSSLTETAE

SEQ ID NO: 27508 - protein, 68 aa, Neisseria meningitidis; identical to SEQ ID NO: 4044

SEQ ID NO: 27509 - protein, 198 aa, Neisseria meningitidis
MKITHCKLKKKVQKELLRFFVLEVTARSAADILGIHPNSAALFYRKIRTVINHHLVLAADEVFEGPVEQDESDFGGRRKGRRGRGAAGKVVVFGILKRNGRVYTVVVNNAKSETLLPVIKKKIMPDSIVYTDSLSNCDKLDVSGFIHYRINHSKEFADRQNHINGIENFWNQAKRVLRKYSGLARTFPRIGSATGCAD

SEQ ID NO: 27510 - protein, 240 aa, Neisseria meningitidis; identical to SEQ ID NO: 3621

SEQ ID NO: 27511 - protein, 378 aa, Neisseria meningitidis
MGLKKACLTVLCLIVFCVGVFYTFDRVNQGERNAVSLLKDKLFNEEGEPVNLIFCYTILQMKVAERIMAQHPGERFYVVLMSENRNEKYDYYFNQIKDKAERAYFFYLPYGLNKSFNFIPTMAELKVKAMLLPKVKRIYLASLEKVSIAAFLSTYPDAEIKTFDDGTGNLIQSSSYLGDEFSVNGAIKRNFARMMIGDWSIAKTRNASDEHYTIFKGLKNIMDDGRRKMTYLPLFDASELKAGDETGGTVRILLGSPDKEMKEISEKAAKDFNIQYVAPHPRQTYGLSGVTTLNSPYVIEDYILREIKKNPHTRYEIYTFFSGAALTMKDFPNVHVYALKPASLPEDYWLKPVYALFTQSGIPILTFDDKNQSYGKSK

SEQ ID NO: 27512 - protein, 269 aa, Neisseria meningitidis
MRPYATTIYQLFILFIGSVFTMTSCEPVNEKTDQKAVSAQQAKEQTSFNNPEPMTGFEHTVTFDFQGTKMVIPYGYLARYTQDNATKWLSDTPGQDAYSINLIEISVYYKKTDQGWVLEPYNQQNKAHFIQFLRDGLDSVDDIVIRKDACSLSTTMGERLLTYGVKKMPSAYPEYEAYEDKRHIPENPYFHKLYYIKKGENPAIITHQNYHRYGENDYSTSVGSCINGFTVRYYPFIREKQQLTQQELVGYHQQVEQLVQSFVNNPSKK

SEQ ID NO: 27513 - protein, 333 aa, Neisseria meningitidis
MQFPYRNVPASRMRRMRRDDFSRRLMREHTLTADDLIYPVFVLEGSAREEDVPSMPGVKRQSLDRLLFTAEEASNLGIPMLALFPVVTTNKTECAQEAYNPEGLVPTAVRALRERFPELGIMTDVALDPYTVHGQDGLTDENGYVMNDETVEVLVKQALCHAEAGAQVVAPSDMMDGRIGAIREALEDAGHIHARIMAYSAKYASAFYGPFRDAVGSSGNLGKADKKTYQMDPANTDEALNEVALDIREGADMVMVKPGLPYLDVVRRVKDEFGVPTYAYQVSGEYAMLQAAIANGWLDGGKVVLESLLAFKRAGADGILTYYAIEAAKMLKR

SEQ ID NO: 27514 - protein, 56 aa, Neisseria meningitidis; identical to SEQ ID NO: 1209

SEQ ID NO: 27515 - protein, 298 aa, Neisseria meningitidis
LNPTNDLKAWQQRAQAQTELLLERFLPSENEIPHTLHEAMRYAALDGGKRLRPMLVLAASELGEAVHEAVGQAMAAIEMIHAYSLVHDDMPAMDNDSLRRGKPTCHIKYGEANALLTGDALQTQAFDVLARPSGLPASRQLAMLSVLAKAGGSRGMAGGQAIDLANVGKQMVQADLEQMHSLKTGALIRAAVLLGAMSCPNLSEDSLAVLDDYAAKLGLAFQVIDDVLDCEADTATLGKTAGKDADNDKPTYVKLMGLEAARSYAHKLVAEAVALLEPFGDKALRLRQLAEFAVARKY

SEQ ID NO: 27516 - protein, 521 aa, Neisseria meningitidis
MTQDKILILDFGSQVTQLIARRVREAHVYCELHSFDMPLDEIKAFNPKGIILSGGPNSVYESDYQADTGIFDLGIPVLGICYGMQFMAHHLGGEVQPGNQREFGYAQVKTIDSELTRGIQDGEPNTLDVWMSHGDKVSKLPDGFAVIGNTPSCPIAMMENAEKQFYGIQFHPEVTHTKQGRALLNRFVLDICGAQPGWTMPNYIEEAVAKIREQVGSDEVILGLSGGVDSSVAAALIHRAIGDQLTCVFVDHGLLRLNEGKMVMDMFARNLGVKVIHVDAEGQFMAKLAGVTDPEKKRKIVGAEFIEVFDAEEKKLTNAKWLAQGTIYPDVIESAGAKTKKAHAIKSHHNVGGLPENMKLKLLEPLRDLFKDEVRELGVALGLPREMVYRHPFPGPGLGVRILGEVKKEYADLLRQADDIFIQELRNTTDENGTSWYDLTSQAFAVFLPVKSVGVMGDGRTYDYVVALRAVITSDFMTAHWAELPYSLLGRVSNRIINEVKGINRVVYDVSGKPPATIEWE

SEQ ID NO: 27517 - protein, 423 aa, Neisseria meningitidis
MKLLVIGNGGREHALAWKLAQSPKVETVFVAPGNAGTAIEPKLQNIDLTAHQDLIEFCRKENIVFTVVGPEAPLAAGVVDDFRAAGLKIFGPTQYAAQLESSKDFAKAFMAKYNIPTAQYQTFENADAAHDYVNQKGAPIVIKADGLAAGKGVIVAMTLDEAHAAIDDMLLDNKMGNAGARVVIEDFLQGEEASFIVMVDGNNVLPMATSQDHKRLLDGDKGLNTGGMGAYSPAPVVTPVVYERAMNEIILPTVAGMKAEGHEFTGFLYAGLMIDQSGAPHTIEFNCRFGDPETQPIMSRLNSDLSDLVEAAIDGKLDSVTAEWSPQTAVGVVLAAQNYPETPKKGDIISGLDAANQVGKVFHAGTTANEKGDVLTNGGRVLCVVGLGDNVVQAKAKAYGALEKISFDGMQYRKDIADKAINR

SEQ ID NO: 27518 - protein, 193 aa, Neisseria meningitidis
MKHTVSASVILLLTACAQLPQNNENLWQPSEHTRSFTAEGRLAVKAEGKGSYANFDWTYQPLVETININTPLGSTLGQLCQDRDGALAVDGKGNVYQAESAEELSRQLVGFKLPIQYLHIWADGRRVAGAPYRILPDGILEQYGWTVGRTADSGGQVRTLQLNNGNLNIRLVFTEIGMPSETETPERCAARTR

SEQ ID NO: 27519 - protein, 232 aa, Neisseria meningitidis
LVKTADGYKAIARIRTGDRVFSKDEASGKTGYKPVTARYGNPYQETVYIKVSDGIGNNQTLISNRIHPFYSGGKWIKAEDLKAGSRLLSESGKTQTVRNIVVKPKPLKAYNLTVADWHTYFVKGSQAETEGVWVHNSCPPYKRPNNATTKAQRESVQGKPCVECGKLAEKMIADHKKPLVVEYYETGTIDKSKMRAIESVQPQCPTCSAKQGGRLSQYSKEQKRKLSNGNKK

SEQ ID NO: 27520 - protein, 326 aa, Neisseria meningitidis
VQPGLWASDGIFSEWRHSCRRRGSRMGKGGDIVVGNGKKYAAPLLVLGCVVFGLGSLIVRSVPVGSYAIAFWRLLISVFVFWFLARFFGQKFPKNRKTVRYTLTAGVFLAFDLALWHESIHAVGPGISTLLNSLQIFFLSAIGVFFFGERLSGLKKAGLISAVAGVAMIAGAEFGYNGNAVWGFASGLVSGLMLALSMVFVRKTHEIEPVALFPSMMILSLGGAVSLVVPALLMDGGALYPTTWKDAGLVLVYGVVMQCFAWAMVAYAIPLLSLSLTGLLLLSEPVAALFIDYFGLGKPIEGVQWAGVALTLSAIYLGSLKQQSEP

SEQ ID NO: 27521 - protein, 140 aa, Neisseria meningitidis; identical to SEQ ID NO: 15310

SEQ ID NO: 27522 - protein, 69 aa, Neisseria meningitidis
MPDRIKPSRNGGGADGIARQQGTAQTGAKPETSPTARHGDFLRPLQGVGFKRRGLEGKTGGAQNCLNAV

SEQ ID NO: 27523 - protein, 671 aa, Neisseria meningitidis
MMKLNPQQLEAVRYLGGPLLVLAGAGSGKTGVITQKIKHLIVNVGYLPHTVAAITFTNKAAAEMQERVAKMLPKPQTRGLTICTFHSLGMKILREEANHIGYKKNFSILDSTDSAKIIGELLGGTGKEAVFKAQHQISLWKNDLKTPEDVVQTASNIWEQQTARVYASYQETLQSYQAVDFDDLIRLPAVLLQQNSEVRNKWQRRLRYLLVDECQDTNTCQFTLMKLLTGAEGMFTAVGDDDQSIYAWRGANMENLRKMQENYPQMKVIKLEQNYRSTARILKIANKVIENNPKLFTKKLWSKLGEGEPVKVVACQNEQHEAEWVVSQIIKQKLIGGDKTQYADFAVLYRGKHQARIFEEALRGARIPYRLSGGQSFFDKAEIKDVLSYVRLLANPNDDPAFLRAVTTPKRGIGDVTLGKLNTYAHEHECSLYEAAQNEEALATLNNTNRQHLQAFMDMFGSYRAKAETGEAGEFINSLLEEIDYENHLLASEEGKAGEIKWRNVGDLVSWFARKGGEDGKNIIELAQTVALMTLLEGKDEEETDAVSLSTLHAAKGLEYPYVFLVGCEEGVLPHNDSIEEGNVEEERRLMYVGITRAKRQLTLTHCVKRKKQGTWQFPEPSRFIDEMPQEDLKILGRKGGEPIVSKEEGRRNLADIIGRLDNLKKSGAAD

SEQ ID NO: 27524 - protein, 191 aa, Neisseria meningitidis; identical to SEQ ID NO: 1730

SEQ ID NO: 27525 - protein, 159 aa, Neisseria meningitidis; identical to SEQ ID NO: 2265

SEQ ID NO: 27526 - protein, 278 aa, Neisseria meningitidis
MQIIHTIRELRAWRKNAGKVAFVPTMGNLHEGHLALVREAKKRADNVVVSIFVNRLQFGQGEDFDKYPRTLQQDADKLEAEGVAVVFAPDEKELYPNVEQRYNVEPPNLQNELCGKFRPGHFLGVATVVSKLFNIVAPDVACFGKKDYQQLAVIKGLTEDLNFDVEIVPVDTGRAEDGLALSSRNQYLSAAERDEAPRLYRELKAVAESLAQGSLDYAGLEKRAVQSLTEYGWVVDYVEIRRVDTLEVARAGDKKLVVLAAARLGTTRLIDNLEIKLP

SEQ ID NO: 27527 - protein, 465 aa, Neisseria meningitidis; identical to SEQ ID NO: 23495

SEQ ID NO: 27528 - protein, 321 aa, Neisseria meningitidis
MLRLTALTLCTVLALGACSPQNSDSAPQAKEQAVSAAQSESASVTVKTARGDVQIPQNPERIAVYDLGMLDTLSKLGVKTGLSVDKNRLPYLEEYFKTTKPAGTLFEPDYETLNAYKPQLIIIGSRAAKAFDKLNEIAPTIEMTADTANLKESAKERIDALAQIFGKQAEADKLKAEIDASFEAAKTAAQGKGKGLVILVNGGKMSAFGPSSRLGGWLHKDIGLPAVDESIKEGSHGQPISFEYLKEKNPDWLFVLDRSAAIGEEGQAAKDVLNNPLVAETTAWKKGQVVYLVPETYLAAGGAQELLNASKQVADAFNAAK

SEQ ID NO: 27529 - protein, 874 aa, Neisseria meningitidis
MKTSELRQKFLKFFETKGHTVVRSSSLVPHDDPTLLFTNAGMNQFKDVFLGFDKRPYSRATTAQKCVRAGGKHNDLENVGYTARHHTFFEMMGNFSFGDYFKRDAIHFAWEFLTSPEWLNIPKDKLLATVYAEDDEAYNIWLNEIGMPSERIVRIGDNKGAKYASDNFWQMGDTGPCGPCSEIFYDHGEEIWGGIPGSPEEDGDRWIEIWNCVFMQFNRDEQGNMNPLPKPSVDTGMGLERMAAVMQHVHSNYEIDLFQDLLKAVARETGAAFSMDEPSLKVIADHIRSCSFLIADGVLPSNEGRGYVLRRIIRRAVRHGYKLGQSKPFFHKLVADLVKEMGGAYPELKEKQAQIEEALKNEESRFAQTLETGMALLENALAKGGKTLDGEIIFKLYDTYGFPYDLTADICRERNIEPDEAGFEREMEAQRARARAAQSFKANAQLPYDGQDTEFKGYTERQTESKVLALYKDGEQVDELNEGDSGAVVIDFTPFYAESGGQVGDVGYIFAGENRFEVRDTQKIKAAVFGQFGVQTSGRLKVGDSVTAKVDDEIRNANMRNHSATHLMHKALRDVLGRHVEQKGSLVTAESTRFDISHPQAVTAEEITEVERRVNEAVLANVAVNAAIMSMEDAQKTGAMMLFGEKYGDEVRVLQMGGFSTELCGGTHVSRTGDIGLFKIISEGGIAAGVRRIEAITGLNALKWAQEQERLVKDIIAETKAQTEKDVLAKIQSGAAHAKALEKELAKAKAELAVHAGAKLLDDAKDLGAAKLVATQIEADAAALREIVTDLTGKSDNAVILLAAVNDGKVSLCAGVSKALTGKVKAGDLVKFAAEQVGGKGGGRPDLAQAGGTDAGKLPAVLDSVKDWVGAKLV

SEQ ID NO: 27530 - protein, 587 aa, Neisseria meningitidis; identical to SEQ ID NO: 5074

SEQ ID NO: 27531 - protein, 198 aa, Neisseria meningitidis; identical to SEQ ID NO: 754

SEQ ID NO: 27532 - protein, 367 aa, Neisseria meningitidis; identical to SEQ ID NO: 4910

SEQ ID NO: 27533 - protein, 484 aa, Neisseria meningitidis
MTTQTIKFHMKPETFKQNAAISLQDKPLRKSLRTAMDMLMTKRKAVLTDEEELQSLRDLCEHIRQRSLSKLPALLEQLEENLTKLGVKVHWAETPTEACQIIHDIITAKNGKLMVKGKSMVSEEIELNHYLEAKGIKAVESDLGEFIVQMAGEKPTHIVMPAIHKTKEQVSELFHQNLGTPLTDDVDQLTGFARKALRDIYSTADVGLSGVNFAVAETGTLCLVENEGNGRLSTTVPPVHIAITGIEKVVAKLSDIPPLYSLLPRSAIGQNITTYFNMITGPRRSEELDGPQEMHLVLLDNGRSQAYAEDQMRRTLQCIRCGACMNHCPVYTRIGGAAYGTTYPGPIGEIISPHLLGLDATRDLPTACTMCGACVEVCPVRIPITEQMQRLRVEAQRSPTETVPHPIRGQGASHTFGEQMAWRTFNGIFSGSKTYRAFGWAATKFRNLTPRKQLGWTQNRVPMKPAKKTLHELMAEKMRQKEQA

SEQ ID NO: 27534 - protein, 418 aa, Neisseria meningitidis
VANKLRNYTINFGPQHPAAHGVLRMILELDGEQIVRADPHIGLLHRGTEKLAETKTYLQALPYMDRLDYVSMMVNEQAYCLAVEKLAGIDVPIRAQYIRVMFAEVTRILNHLMGIGSHAFDIGAMTAILYAFRDREELMDLYEAVSGARMHAAYFRPGGVYRDLPDFMPKYESSKFRNAKVLKQLNESREGTMLDFIDAFCERFPKNIDTLETLLTDNRIWKQRTVGIGVVSPERAMQKGFTGVMLRGSGVEWDVRKTQPYEVYDKMDFDIPVGVNGDCYDRYLCRMEEMRQSVRIIKQCSEWLRVNPGPVITTNHKFAPPKRTEMKTGMEDLIHHFKLFTEGMHVPEGETYTAVEHPKGEFGVYIISDGANKPYRLKIRAPGFAHLQGMDEMAKGHMLADVVAIIGTQDIVFGEVDR

SEQ ID NO: 27535 - protein, 303 aa, Neisseria meningitidis; identical to SEQ ID NO: 7711

SEQ ID NO: 27536 - protein, 944 aa, Neisseria meningitidis; identical to SEQ ID NO: 8761

SEQ ID NO: 27537 - protein, 140 aa, Neisseria meningitidis; identical to SEQ ID NO: 1293

SEQ ID NO: 27538 - protein, 432 aa, Neisseria meningitidis
MAKNVVVIGAQWGDEGKGKIVDWLAEETGGVVRFQGGHNAGHTLVVGGKKTILRLIPSGILHEGLDCFIGSGVVVSPEALLGEIDELNAAGVKNVEGRLKIAPTCPLILPYHIALDQAREASRGKGKIGTTGRGIGPAYEDKVARRAIRAVDLLHPEKLREKLDAVLAYYNVQLQHLHNAEPVKAEDVMAVIEKVAPRIAPMITDVSRVLNEKNKNGEKLLFEGAQGALLDIDYGTYPFVTSSNCLAGAASAGAGVGPQMLDYVLGIVKAYTTRVGSGPFPTELFDEVGVGLAERGHEFGSVTGRARRCGWFDAAALKRSIQINGISGMCITKLDVMDGVETINICVGYELPDGGKTDILPCGSDAVETCKPIYETMPGWRESTFGVKDYGALPENAKAYLKRIEEVCGAPVAIVSTGPDREETIVLHHPFA

SEQ ID NO: 27539 - protein, 225 aa, Neisseria meningitidis
LVKTADGYKAIARIRTGDRVFSKDEASGKTGYKPVTARYGNPYQETVYIKVSDGIGNNQTLISNRIHPFYSGGKWIKAEDLKAGSRLLSESGKTQTVRNIVVKPKPLKAYNLTVADWHTYFVKGSQAETEGVWVHNACPPRKTPSTPVYGNDSEAYAAAKKLGYRKIKERTRNDAAIFKKGKSYISRDVDSHNGGAWKEASSPKNLNRKETRNGTFDKNLNRIGD

SEQ ID NO: 27540 - protein, 92 aa, Neisseria meningitidis
MPAVDLIRERLQTLDPLVLEIGDESHLHKGHAGNTGGGHYAVLVVSGRFEGVSRLNRQKTVKSLLKDLFSGGMIHALGIRAATPDEYFHTAG

SEQ ID NO: 27541 - protein, 123 aa, Neisseria meningitidis; identical to SEQ ID NO: 2701

SEQ ID NO: 27542 - protein, 259 aa, Neisseria meningitidis
MAASPEAKFTEEKILWVKHHTPKLITFAISRPESYRFKAGQFSRLGFYEGEGFIWRAYSIVSAEYADTLEYFAVLIQDGPMSARFAKMQQGDTILLDKNATGFLLPERFPDGKDLVILCTGSGIAPFLSILEQPEIRQRFDTVNLIHSVSFPEELIFNDRLAALSEHPLVGEYRHSFHFVPVTTRAANPSGLSGKRIPELLKNNSIEQALHTKFTPESTRFMICGNPDMVKDTFQTLLDMGYAMHRNRIPGQIMMENGF

SEQ ID NO: 27543 - protein, 344 aa, Neisseria meningitidis
MPNCFKFHTVIERHWQKPYPVLSFLLKPLSGLFAKIAAKRRADFLSGKRQSEKLSVPVVVVGNIHAGGTGKTPIVAALVSGLQEKGVKVGIISRGYGRKSKAVHVLNAESRAEDAGDEPLLLFRKTGAPTAVGSSRAEAGRALLAAHPDIGLIVADDGLQHYALRRDVEIAVFPAADTGRTDLDLLPNGSLREPLLRLDSVDAVVVSGGKADALFRPSENMFHSRIEAGRIYRLNNPSEILDTGRLKNQTVVAVAGIAKPARFFDSLRNMGITVKRTVALPDHADISAADLPDADAVIITEKDAVKFSDGICTDNVWVLPVCAIIEPDLAAFVLERLEDVPKAV

SEQ ID NO: 27544 - protein, 83 aa, Neisseria meningitidis
MISDKQRTELAKKQVMLKILYQAWLAEKRKYAVITVVDNEGNLIEYHPSGNQRTVGHVKQLAYFSRSKNVRQPLDRVKGHLKI

SEQ ID NO: 27545 - protein, 160 aa, Neisseria meningitidis; identical to SEQ ID NO: 12671

SEQ ID NO: 27546 - protein, 612 aa, Neisseria meningitidis
MLPARFTILSVLAAALLAGQAYAAGAADAKPPKEVVKVFRKQQRYSEEEIKNERARLAAVGERVNQIFTLLGGETALQKGQAGTALATYMLMLERTKSPEVAERALEMAVSLNAFEQAEMIYQKWRQIEPIPGKAQKRAGWLRNVLRERGNQHLDGLEEVLAQADEGQNRRVFLLLAQAAVQQDGLAQKASKAVRRAALKYEHLPEAAVADVVFSVQGREKEKAIGALQRLAKLDTEILPPTLMTLRLTARKYPEILDGFFEQTDTQNLSAVWQEMEIMNLVSLHRLDDAYARLNVLLERNPNADLYIQAAILAANRKEDISVIDGYVEKAYGRGTEEQRSRAALTAAMMYADRRDYAKVRQWLKKVSAPEYLFDKGVLAAAAAVELDGGRAALRQIGRVRKLPEQQGRYFTADNLSKIQMLALSKLPDKREALRGLDKIIEKPPAGSNTELQAEALVQRSVVYDRLGKRKKMISDLERAFRLAPDNAQIMNNLGYSLLTDSKRLDEGFALLQTAYQINPDDTAVNDSIGWAYYLKGDAESALPYLRYSFENDPEPEVAAHLGEVLWALGERDQAVDVWTQAAHLTGDKKIWRETLKRHGIALPQPSRKPRK

SEQ ID NO: 27547 - protein, 222 aa, Neisseria meningitidis
MLPSKYEDNALQIKEKSTERTAPFFVLEVTARSAADILGIHPNSAALFYRKIRTVINHHLALAADEVFEGSVEPDESDFGGRHKGRRGRGAAGKVVVFGILKRNGRVYTVVVDNAKSETLLPVIKKKIMPDSIVYTDSLSSCDKLDVSGFIHYRINHSKECADRQNHINGIENFWNQAKRVLRKYNGIDCKSFPLFLKECEFRFNFGTPSQQLKILRDWCGI

SEQ ID NO: 27548 - protein, 177 aa, Neisseria meningitidis
MFPPDKTLFLCLSALLLASCGTTSGKHRQPKPKQTVRQIQAVRISHIDRTQGSQELMLHSLGLIGTPYKWGGSSTATGFDCSGMIQFVYKNALNVKLPRTARDMAAASRKIPGSRLKAGDLVFFNTGGAHRYSHVGLYIGNGEFIHAPSSGKTIKTEKLSTPFYAKNYLGAHTFFTE

SEQ ID NO: 27549 - protein, 147 aa, Neisseria meningitidis; identical to SEQ ID NO: 2466

SEQ ID NO: 27550 - protein, 234 aa, Neisseria meningitidis; identical to SEQ ID NO: 1195

SEQ ID NO: 27551 - protein, 102 aa, Neisseria meningitidis
MTLKTDLLPKINNEDYQRLILKHSAEFSGGEISLLNEILEKFNFDVVQAQALAQAVMQQIRFDPNAYHIDSDDEDTTGICPHCINPPMPPLRDYLVWRETRG

SEQ ID NO: 27552 - protein, 812 aa, Neisseria meningitidis
MTEKSHKKTAKGRAGSPSPTSARNKKADNGARGNKVSERLKAVKELQKTETKKARPEHVVNLIGDALWLMGLAATLYLAISLISFDMGDPSWSHSSPVVEDVANWGGLFGAYVADVGYYLFGWSFWWWIAAACVMLYKNFRLHAKQTENEAYNHKIAAAALFVLTVFSPVLEYFVLGGKYADSLPVGAGGMVGIRVGAVFAWLLGKSGSLLIILVVLLLSLSLLVQISWLEFLNGAGRAVQNRLSALSGKVMALGKRRPNTKTDGVDTQNTRRMVKEAKNITAKPVALPEGSSSNRKSVAVSVAPPPKIQVSLFEDDEPRQAGEYHKPTLNLLRIPDSEPVSINPAELERTAELIESKLAEFGIGVQVVSATSGPVITRYEIEPAQGVKGSQIVALSKDLARSMSLQSVRIVETIAGKNTMGIELPNDKRQDVMLSEILSSPVFAGAKSKLTVALGKDIAGTPVVGDLAKMPHLLVAGMTGSGKSVGVNGMIMSMLFKATPDEVRFIMIDPKMLELSIYDGIPHLLCPVVTDMREAGQALNWCVAEMEKRYRLLSHASVRNLEGFNQKVEAAKAAGKPLLNPFSLNPDEPEPLEKLPLIVVVIDELADLMMTERKAVEQQIARLAQKARAAGIHMIVATQRPSVDVVTGLIKANIPTRMAFTVQSKIDSRTILDQMGADELLKYGDSLFLQPGSAEPTRLQGAFVSDDEVHQVVNYVKSQAPADYIEGLLSGEAALETANIVNPNADSDELFDQAVAYVLESKKTSISSLQRQLRIGYNRAANLMEALENAGVVSPTDLNGSRKILAHKDHL

SEQ ID NO: 27553 - protein, 339 aa, Neisseria meningitidis
MKKILVTGGTGFIGSHTVVSLLKSGHQVVILDNLCNSSINILPRLKTITGQEIPFYQGDIRDREILRRIFAENRIDSVIHFAGLKAVGESVAEPMKYYDNNVSGSLVLAEEMARAGVFSIVFSSSATVYGDPGKVPYTEDMPLGDTTSPYGASKSMVERILTDIQKADPRWSMILLRYFNPIGAHESGLIGEQPNGIPNNLLPYICQVAAGKLPQLAVFGDDYPTPDGTGMRDYIHVMDLAEGHVAAMQAKSNVAGTHLLNLGSGRASSVLEIIRAFEAASGLTIPFEIKPRRAGDLACFYADPSYTKAQIGWQTQRDLTQMMEDSWRWVSNNPNGYDD

SEQ ID NO: 27554 - protein, 473 aa, Neisseria meningitidis
MDTKEILGYAAGSIGSAVLAVIILPLLSWYFPADDIGRIVLMQTAAGLTVSVLCLGLDQAYVREYYAAADKDTLFKTLFLPPLLSAAAIAALLLSRPSLPSEILFSLDDAAAGIGLVLFELSFLPIRFLLLVLRMEGRALAFSSAQLVSKLAILLLLPLTVGLLHFPANTAVLTAVYALANLAAAAFLLFQNRCRLKAVRRAPFSSAVLHRGLRYGIPIALSSIAYWGLASADRLFLKKYAGLEQLGVYSMGISFGGAALLFQSIFSTVWTPYIFRAIEANAPPARLSATAESAAALLASALCLTGIFSPLASLLLPENYAAVRFIVVSCMLPPLFCTLVEISGIGLNVVRKTRPIALATLGALAANLLLLGLAVPSGGARGAAVACAASFWLFFVFKTESSCRLWQPLKRLPLYTHTLLCLTSSAAYTCFGTPANYPLFAGVWAAYLAGCILRHRKDLHKLFHYLKKQGFPL

SEQ ID NO: 27555 - protein, 185 aa, Neisseria meningitidis; identical to SEQ ID NO: 5793

SEQ ID NO: 27556 - protein, 125 aa, Neisseria meningitidis; identical to SEQ ID NO: 535

SEQ ID NO: 27557 - protein, 311 aa, Neisseria meningitidis; identical to SEQ ID NO: 4046

SEQ ID NO: 27558 - protein, 193 aa, Neisseria meningitidis; identical to SEQ ID NO: 1322

SEQ ID NO: 27559 - protein, 143 aa, Neisseria meningitidis; identical to SEQ ID NO: 7006

SEQ ID NO: 27560 - protein, 151 aa, Neisseria meningitidis
MKKPKILFVCLGNICRSPMAEYILRRRAAEAGIPLEADSAGTSGWHDGEDMHRETAKILKKHGIDASGFTSRKIRQSDAAAFDYIIAMDGNNLSELERTFGRRSEKIFKLTDLIPESGYDHVPDPWYTGDFEETFRLADAGCRALLEKISK

SEQ ID NO: 27561 - protein, 291 aa, Neisseria meningitidis
MAYLLISIVFSVSVSILLKMARKKKIDIAQAVAVNYVVAVILTLLVLKPDVGNIGAFLPTWPLFAALGVLLPSVFVIMGKSVESAGIVKSDAAQRLSLFLPIVAALTLFGEKLSEGKLIGLCLAFAALFCLLWKHSGGKKSGSAWRQAALLLGVWAGYGIIDILFKQLAKSGTAFAGNLLVAFVLAGVLMFACLFAKSVRWRAESVVGGILLGGLNFMNIVTYITAHQMMKDNPTLVFAGMNIGVIVLGTLSGALFFKEKINTINTAGIVLALCSIACLFYWAEVKALFGI

SEQ ID NO: 27562 - protein, 435 aa, Neisseria meningitidis
MKPVNIGLLGLGTVGGGTAAVLRDNAEEISRRLGREIRISAVCDLSEEKARQTCPSAAFVKDPFELVAREDVDVVVELFGGTGIAKDAVLKAIENGKHIVTANKKLLAEYGNEIFPLAEEKNVIVQFEAAVAGGIPIIKALREGLAANRIKSIAGIINGTSNFILSEMREKGSAFADVLKEAQALGYAEADPTFDIEGNDAGHKITIMSALAFGTPMNFSACYLEGISKLDSRDIKYAEELGYRIKLLGITRKTGKGIELRVHPTLIPESRLLANVNGVMNAVRVNADMVGETLYYGAGAGALPTASAVVADIIDIARLVEADTAHRVPHLAFQPAQVQAQTILPMDEITSSYYLRVQAKDEPGTLGQIAALLAQENVSIEALIQKGVIDQTTAEIVILTHSTVEKHIKSAIAAIEALDCVEKPITMIRMESLHD

SEQ ID NO: 27563 - protein, 329 aa, Neisseria meningitidis
MKQKIFVLYTGGTIGMTQSSEGLRPDTALVGQALAPFSNGMDFDWHVCGTLIDSSAVQLQNWCAWLDIIAAALPQYDGVLVLHGTDTLAYTANLFALALQGLDKPIVLTGSQWPYNAVGSDAPRNLATAVAAFPLGLKQTLIAFDGKLYPAVGSSKVSTETAAGFDNPHFGALAEWDETQGWHNVRIPNQDTADVSDGLKIRYPDPQAKIAVRTLIPGFAVQELADGLGQLPAHALILQSYGHGNTPADEGFIRAVRDFTRQGKLLLNISQVRQGRTAAVYAQGNAFRNSGIINGGKCNLETATALMTLAVSQGWGAEDVEKELARLKL

SEQ ID NO: 27564 - protein, 197 aa, Neisseria meningitidis
MEHYLSLFIKSVFIENMALSFFLGMCTFLAVSKKVSTAFGLGVAVIFVLGLSVPANQLVYSLLKDGAIVEGVDLTFLKFITFIGVIAALVQILEMFLDKFVPALYNALGIYLPLITVNCAIFGAVSFMAQREYGFGESVVYGFGAGLGWMLAIVALAGITEKMKYSDAPKGLKGLGITFIAAGLMAMAFMSFSGIQL

SEQ ID NO: 27565 - protein, 52 aa, Neisseria meningitidis
MELHDRQEMLFERIFRSVLRLVGVSSETVKQKFAGVELSYAGKAAGESLYCL

SEQ ID NO: 27566 - protein, 231 aa, Neisseria meningitidis; identical to SEQ ID NO: 2473

SEQ ID NO: 27567 - protein, 352 aa, Neisseria meningitidis
MSSRKIIHIDMDAFYASVELREQPHLKGRPVVVAWEGARSVICAASYEARQFELHSAMSVATAKRLCPQAVYVPPHFDLYRQVSAQIHAVFRRYTDLIEPLSLDEAYLDVTRNFKNIPYASEVAKEIRAAIFAETGLTASAGIAPNKFLAKIASDWRKPNGQFVLPPYKVMAFLETLPLGKIPGVGKVTLKKMQSLGMQTAGDLRRFDRGELLNHFGRYGYRLYDLARGTDERPVKAERERLQISTEITLPEDLPLEQAAGHLPHLAEDLWRQITRKNVEAQSVTLKLKTYDFRIITRTLTYSSVLPDCAALLQAAQMLMARVPPQTEDAFRLIGIGVGHLVPKNQQQDLWA

SEQ ID NO: 27568 - protein, 188 aa, Neisseria meningitidis
MLLQNILPFAHCLLRKALPEGGNALDGTAGNGHDTLFLAQTAGIRGKVWAFDIQPQALNNTRCRLQEAGYSNVRLILDGHENLKQYVSEPLNAAIFNFGWLPGGDKSLTTHTETSIPSLCATLSLLKEGGMLIAVLYPGHENGKQEAEAIEQWAKNLPQEQFAVLRYGFTNRKNSPPYLLAFEKLRQK

SEQ ID NO: 27569 - protein, 181 aa, Neisseria meningitidis
MSKIICLTAGHSNTDPGAVNGSDREADLAQDMRNIVAAILRDDYGLTVKTDGTGKGNMPLREAVKLIRGSDVAIEFHTNAAVSKAATGIEALSTVKNKRWCQVLSKAVAKKTGWKLRGEDGFKPDNAGQHSRLAYAQAGGIVFEPFFISNDTDLALFKTTKWGICRAIADAIAMELGAARV

SEQ ID NO: 27570 - protein, 417 aa, Neisseria meningitidis; identical to SEQ ID NO: 9265

SEQ ID NO: 27571 - protein, 306 aa, Neisseria meningitidis; identical to SEQ ID NO: 1708

SEQ ID NO: 27572 - protein, 370 aa, Neisseria meningitidis
MQTAARRSFDYDMPLIQTPTSACQIRQAWAKVADTPDRETAGRLKDEIKALLKEKNAVLVAHYYVDPLIQDLALETGGCVGDSLEMARFGAEHEASTLVVAGVRFMGESAKILCPEKTVLMPDLEAECSLDLGCPEEAFSAFCDQHPDRTVVVYANTSAAVKARADWVVTSSVALEIVSYLKSRGEKLIWGPDRHLGDYIRRETGADMLLWQGSCIVHNEFKGQELAALKAEHPEAVVLVHPESPQSVIELGDVVGSTSKLLKAAVSHPEKKFIVATDLGILHEMQKQAPDKEFIAAPTAGNGGSCKSCAFCPWMAMNSLGGIKYALTSGHNEILLDRKLGEAAKLPLQRMLDFAAGLKRGDVFNGMGPA

SEQ ID NO: 27573 - protein, 636 aa, Neisseria meningitidis
MNILSVENASFAIGHVALLDKTSFQLDSGEKVGLIGRNGAGKSSFLKILAGVQKLDDGQIIVQNNLKIVYVPQESFFDKEATVFDTVAEGLGEIRDLLRRYHHVSHELENGSSEALLKELNELQLAIEAKDGWKLDAAVKQTLGELGLPENEKIGNLSGGQKKRVALAQAWVQKPDVLLLDEPTNHLDIDAIIWLENLLKAFEGSLVVITHDRRFLDNIATRIVELDRGILRSYPGSFSKYSEKKAQELAVEAEHNRLFDKFHAQEEAWIRKGIEARRTRNEGRVRRLEELRRQRAERLNVQGQVNFKLDSGEKSGKIIAELEHASFAYGDKVIMDKFSAILQRGDKIGLIGPNGIGKTTFLKLILGELQPTYGRIRIGSKQEVAYFDQFRSALNENDTVFYTLGQGNDYVEVGGKKKHVMSYLEDFLFPPARAQSPVSSLSGGERNRLLLAKLFTRPANILVLDEPTNDLDIDTQELLEDLLRDYQGTVFLVSHDRMFLDNVITQSIVFEGNGRLKEYIGGYQDYIDAKSREAKIQTESAPKTADAEPVKEKPKANRTVKLSYKEQRELDALPDEIAALEAEQAEINAQLSDPEIFKDYEKAGALQSRAEEIEMLLLEKLERWELLETKQNGNAV

SEQ ID NO: 27574 - protein, 414 aa, Neisseria meningitidis; identical to SEQ ID NO: 9499

SEQ ID NO: 27575 - protein, 361 aa, Neisseria meningitidis
MMENALRLAALGRFSTSPNPRVGCVIAHGSQIVGQGFHVKAGEPHAEVHALRQAGEMAQGATAFVTLEPCSHYGRTPPCAEALLRSGVTRVVAAMRDPNPLVAGKGLALLEAAGIKTECGLLEHQARELNRGFLSRIERRRPFVRLKCAVSLDGKTTLSDGSSFWITGEDARADVQVLRAESCAVLTGIGTVLADNPRLNVRAFPTLRQPARIVLDSRLRLPLDSHLLTDGQSPTYIATLERNEDRLHPYREHAHIRILMPSETAGGKIDLNHLMRLLADEGFGEIMVEAGSELTSAFLAEDLADEIVLYRSPKILGSGKDLLSLPENRAALSAPPLWTPVSSEILGHDIKTVFRKNDNAF

SEQ ID NO: 27576 - protein, 220 aa, Neisseria meningitidis; identical to SEQ ID NO: 5269

SEQ ID NO: 27577 - protein, 113 aa, Neisseria meningitidis; identical to SEQ ID NO: 6827

SEQ ID NO: 27578 - protein, 302 aa, Neisseria meningitidis; identical to SEQ ID NO: 24161

SEQ ID NO: 27579 - protein, 259 aa, Neisseria meningitidis
MKEHKARKRFGQNFLQDTRIISDIVNAVRPQADDVVIEIGPGLAAITEPLAKKLNRLHVVEIDRDIVCRLKTLPFADKLVIHEGDVLQFDFNGIAGKKKIVGNLPYNISTPLLFKLAEVADDVVDMHFMLQKEVVDRMVAAPKSNDYGRLGVMLQYFFDMELLIDVPPESFDPAPKVDSAVVRMIPVKHRIGKADDFEHFAKLVKLAFHQRRKTIRNNLKELATDEDLQAAGINPQDRAEHIAPEKYVALSNYLAGKAV

SEQ ID NO: 27580 - protein, 261 aa, Neisseria meningitidis
MENGKTVPRWRFALKSAGWHLLISLSVAGLAALLVFKVWYPYPYAELTGGLSLYQLVVAVDIVCGPLLTLILASPKKKTKARMVDFSMVGIIQLAALVYGLHSVSLARPVIEAFEKDRINVVTAAEVAVEDLHKAPEGLQSLSWFGIRRIALKEPEDADEKNKTLDLSLKGIEPSMRPDQWLPYSDKEAEEIRKHLKPLKVLADARKTTVADILKQAGLAEGEELYYLPFTSSRQKEWIVITDKEGNTKGYAPIDGFIITP

SEQ ID NO: 27581 - protein, 1058 aa, Neisseria meningitidis
MNKTWKRQVFRHTALYTAILMFSHTGGGGAQAQTHKYAIVMNAQNLPEVKWGQDYRKLAQKSNERQFTHTTNFYIKKNVTLSFNNIDEVVAEKKDVVVFGTATYLPPYGKVSGFDADKLKKRGDALGWIKTIKPGLVGYSYEGVTCQNNYNNASRGCPELIYKTQFSFGQQGLKKKTNGRLDIDEDKSRDNSPIYKLQDYPGLGVSFNLSSESLVKSVKYNKIISSFSEDVTQQNGTQSHHKDKNLVYTTGDYQYKNRYSSRYVGQDEHSAVAFYLNAKLHLLDKKNIKNIAQGKTVNLGTLKPYVEPTEEWKNKRGNHFQGNWTFEDKGEVSVKLKLPEVKAGRCINANNPNPNAKAPSPALTAPALWFGPVKDGKAEMYSASVSTYPDSSSSRIYLQNLKRKTDPNKPGRYSLADLTKSDIESRQPGFTGRQTVIRLDSGVQQIKLQGNEVANFNGNDGKNDTFGIVSEGSFMPDTSEWKKVLLPWTVRAFNDDGRFNTVNKEENNSKPKYSQKYRIRENGNNSKRDLGDIVNSPIVAVGGYLATSANDGMVHIFKKNGGSDERSYNLKLSYIPGTMPRKDIQSQDSTLAKELRAFAEKGYVGDRYGVDGGFVLRKVERNGKDHVFMFGAMGFGGRGAYALDLTKIDSNNLTGVSMFDVPNDKNNNKNDNNRVELGYTVGTPQIGKTHDGKYAAFLASGYATKTIDDQQNKTALYVYDLESSGTLIKKIDVPGGKGGLSSPTLVDKDLDGTVDIAYAGDRGGNMYRFDLSSQSPDQWTVRPIFEGTKPITSAPAISQLKDKRVVIFGTGSDLSEEDVDNTDEQYIYGIFDDDTATTGSVNFSGSGGGLLEQVLEQKDKTLFLTDYKRSDGSGNKGWVVKLKDGQRVTVKPTVVLRTAFVTIHKYTGTDKCGAETAILGINTADGGKLTKKSARPIVPEANTAVAQYSGHKKGTNGKSIPIGCMQKGNEIVCPNGYVYDKPVNVRYLDEKKTDGFSTTADGDAGGSGIDPAGKRSGKNNRCFSQKGVRTLLMNDLDSLDITGPTCGMKRISWREVFF

SEQ ID NO: 27582 - protein, 251 aa, Neisseria meningitidis
MKFARLLFLCAVLAGTQAAAAEMVQIESGSYRPLYLKKDTGLIKVKPFKLDKYPVTNAEFAEFVNSHPQWQKGRIGSKQAEPAYLKHWMKNGSRSYAPKAGELKQPVTNVSWFAANAYCAAQGKRLPTIDEWEFAGLASATQKNGSNEPGYNRTILDWYADGGRKGLHDVGKGRPNYRGVYDMHGLIWEWTEDFNSSLLSSCNANAQMFCSGASVGSSDSSNYAAFLRYGIRTSLQSKYVLHNLGFRCTSR

SEQ ID NO: 27583 - protein, 742 aa, Neisseria meningitidis
MRSAVLFIYFFLLNIFLFQPAVIHIQSNYILFMSIVSAPLPALSALIIFAHYHGIAANPADIQHEFCTSAQSDLNETQWLLAAKSLGLKAKVVRQPIKRLAMATLPALVWCDDGNHFILAKTDGEGEHAQFLIQDLVTNKSAVLSFAEFSNRYSGKLILVASRASVLGSLEKFDFTWFIPAVIKYRRLFFEVLVVSVVLQLFALITPLFFQVVMDKVLVHRGFSTLDVVSVALLVVSLFEIVLGGLRTYLFAHTTSRIDVELGARLFRHLLSLPLSYFEHRRVGDTVARVRELEQIRNFLTGQALTSVLDLAFSFIFLAVMWYYSSTLTWVVLASLPAYAFWSAFISPILRTRLNDKFARNADNQSFLVESITAVGTVKAMAVEPQMTQRWDNQLAAYVASGFRVTKLAVVGQQGVQLIQKLVTVATLWIGARLVIEGKLTVGQLIAFNMLSGQVAAPVIRLAQLWQDFQQVGISVARLGDILNAPTENASSHLALPDIRGEITFEHVDFRYKADGRLILQDLNLRIRAGEVLGIVGRSGSGKSTLTKLVQRLYVPEQGRVLVDGNDLALAAPAWLRRQVGVVLQENVLLNRSIRDNIALTDTGMPLERIIEAAKLAGAHEFIMELPEGYGTVVGEQGAGLSGGQRQRIAIARALITNPRILIFDEATSALDYESERAIMQNMQAICANRTVLIIAHRLSTVKTAHRIIAMDKGRIVEAGTQQELLAKPNGYYRYLYDLQNG

SEQ ID NO: 27584 - protein, 377 aa, Neisseria meningitidis; identical to SEQ ID NO: 7656

SEQ ID NO: 27585 - protein, 222 aa, Neisseria meningitidis
VQADLAYAAERITHDYPKPTGANNTSTVSDYFRNIRAHSIHPRVSVGYDFGGWRIAADYASYRKWNNNKYSVNIKKGRETQHNREELKTENQENGTFHAASSLGLSAIYDFKLNDKFDKFKPYIGARVAYGHVKHQVHSVETKTTIVTSKPNGGPVPSSVTKPPYHQSHSISSLGLGVIAGVGFDITPKLTLDTGYRYHNWGRLENTRFKTHEVSLGVRYHF

SEQ ID NO: 27586 - protein, 210 aa, Neisseria meningitidis; identical to SEQ ID NO: 3262

SEQ ID NO: 27587 - protein, 590 aa, Neisseria meningitidis
MIPSDFIDELLAKTDIVDIIDEQVPLKKGGANYMACCPFHKEKTPSFSVSPTKQFYHCFSCGAHGSAIGFVMEHQGLSFPEAVQFLADRVGMVVPKVRGQNDNPEVRAERKKKKQTLEETTAAAADFYAQQLKFNPAAKAYLDKRGLSAEVIAHYGLGYAPDGWQPLAQVFQPYPNTALVDTGMVIDNEGRYYDRFRHRIMFPIRNPRGQVIGFGGRVLDDSKPKYLNSPDTPLFDKGKNLYGLYEGRAAVKEAERILVVEGYMDVVALAQFGVGYGVAALGTATTAEHVKILMRQADSIYFCFDGDSAGRKAAWRALENALPQLKDDKSLHFLFLPEEHDPDSYIRAYGKAQFEDALLNQSKPLSEYFWEHLSDGIHLNTQEGKAELVKTSSPLLAQITAPALAYLLKQRLSELVGIDPDNLAQLLGQEAPKRHVKQKNYKLPPISVKQPVMLTLVQRQIRSLLINPDWAAYIDLPDYLALDGDFACLANLAESIKNHAAVPETAQVLEYMRGSPYEETITRIFHSTHQSEEMNSSSEEDCENFQIGMKKLLNELKYSQIETLKQKSLQSGLNESEKKLLLSLLTAKQN

SEQ ID NO: 27588 - protein, 398 aa, Neisseria meningitidis
MAKIITPLSANQVKNAKPRDKLYKLSDGGGLALWIYPTGGRSWKLSFVQDGRQQTISLGRYPDFSLADAREWREEVRRKRAHGENVVNKKVRADFAFEKVARDWFVRWSKGRSEKYAGQVMRNFERWVFPAIGNLDIRQVRTADVVGCLRVMEARGIVDTLRKTKNSLKMVFAFAVGSGMMEINPVAQIGSGVFERAKTGNMAALSPSELPRLIDFLEQRNEFAVYAGRVRIHPVTRLCIYWLLLTMTRIQEAALMEWSELDGEVWRIPAERKKERRGHDVPLSRAMQWVLDQARALNVNGRFVFESVNFQGHINKESPRVAMQRAGLDTTAHGLRSLARTYLREVLKVDNDVAEKLLAHSLGTRTQTAYNRSELWEERKDALERWGNDVLRLAKNGK

SEQ ID NO: 27589 - protein, 304 aa, Neisseria meningitidis
MTWRSLLIQNGGKLSLQRRQLLIQQNGESHTVPLEDIAVIIIENRETLITAPLLSALAEHGATLLTCDEQFLPCGQWLPYAQYHRQLKILKLQLNISEPLKKQLWQHIVRQKILNQAFVADETGNDLAAKRLRTLASEVRSGDTGNREAQAAALYFQALFGEKFTRNDNNAVNAALNYTYAVLRAAVARALTLYGWLPALGLFHRSELNPFNLADDFIEPLRPLADLTVIHLYEQGCLKTELTLDIKQHLIKILYYQTSIERQHFSTLAAIDKMISSFQAGVTDKNAKQLKLPEILPLKEYQYE

SEQ ID NO: 27590 - protein, 123 aa, Neisseria meningitidis; identical to SEQ ID NO: 616

SEQ ID NO: 27591 - protein, 259 aa, Neisseria meningitidis
MKTITETLNLAPKGKNFLTADWPAPANVKTLITTRNGGVSQGAYQSLNLGTHVGDNPEAVRRNREIVQQQVGLPVAYLNQIHSTIVVNAAEALDGTPDADASVDDTGKAACAVMTADCLPVLFCDRAGTAVAAAHAGWRGLAGGVLQNTIAAMKVPPVEMMAYLGPAISADAFEVGQDVFDAFCTPMPEAAAAFEGIGGGKFLADLYALARLILKREGVGGVYGGTHCTVLERDTFFSYRRDGATGRMASLIWLDGNAV

SEQ ID NO: 27592 - protein, 258 aa, Neisseria meningitidis
MRAVPPPHISITGLGYLGLPLAQKFYQHGSRVAAIKRSLTSDDINLPIHLDTFDLGSTDAFQTALWRHHADKPVWFFLLPPSSLTHYADTVKQWAELARACNVQHLIFTSSTSVYGDTARECDETATPDPQTESARQILAAEQHLLDSGVPNIDILRLGGLYCAERHPVSRLVQKQNIPGGNRPINIVHRNIAVESLFQTAFNPGGRRLKNIIEPRHPTRREFYTEEAAKLGLPAPDFAPDDSMGKIIRTVCDNSLSL

SEQ ID NO: 27593 - protein, 366 aa, Neisseria meningitidis; identical to SEQ ID NO: 2022

SEQ ID NO: 27594 - protein, 945 aa, Neisseria meningitidis
MLDKYSPAEIESKHYQNWESQGYFQPDMDLTKPSFSIQLPPPNVTGTLHMGHAFNQTIMDGLTRYYRMKGCNTAWIPGTDHAGIATQIVVERQLAAQNVSRHDLGREKFLEKVWEWKEVSGGTITQQMRRVGCSADWTREYFTMDDVRAETVTEVFVRLFEQGLIYRGKRLVNWDPVLGTAVSDLEVESVEEQGSMWHIRYPLADNPAEAVIVATTRPETLLGDVAVAVNPEDERYTHLIGKELILPLTGRTIPVIADEYVEKDFGTGCVKITPAHDFNDYEVGKRHDTRLINVFDLEAKVLANAEVFNFKGEAQPGFALPEKYAGLDRFAARKQMVADLQEQGLLVEIKPHTLMTPKGDRTGSVIEPMLTSQWFVAMSATPNGGEPDSEFKGLSLADKAKKAVDSGAVRFIPENWVNTYNQWMNNIQDWCISRQLWWGHQIPAWYDEAGNVYVARNQAEAEKQAGKTGLTREEDVLDTWFSSALVPFSTLGWPSETEELKAFLPSNVLVTGYEIIFFWVARMIMMTTHFTGKVPFKDVYIHGIVRDHEGKKMSKSEGNVIDPVDLIDGIDLEKLLVKRTTGLRKPETAPKVEEATKKLFPEGIPGMGADALRFTMASYASLGRSVNFDFKRAEGYRNFCNKIWNATNFVLMNTENQDCGYGATAAEPRGYSFPDMWIVGRLNQTIEQVTQAYETYRFDLAAETLYSFVWNDYCDWYLELAKVQLQTGCASRQRATRHTLLRVLEAALRLLHPIIPFITEELWQTVAPMCDAKTADSIMLAHFPEADGGEIVQTAFGQMTVLQDLIGAVRNLRGEMGIQPNVKAPLFVESADDLADYLKYLPMMTRLTEARQVAALPESGDAPVAVCNGARLMLKVEIDKAAETARLSKEAEKLQKALDKLNAKLSKPGYTEKAPAHLVEKDKADLAELEDKMAKVQNQLAKLKD

SEQ ID NO: 27595 - protein, 103 aa, Neisseria meningitidis
MNLENYENILIKLLFHHNNLVNEYSYFIENKNLFKIVSRTKTSKGFFFTIEKPLNFLSKQTYFEFNFKYLHSRKERFGSFMCWINTNLMEFEGFFLTTCSLII

SEQ ID NO: 27596 - protein, 706 aa, Neisseria meningitidis
MRRFLPIAAICAVVLLYGLTAATGSTSSLADYFWWIVAFSAMLLLVLSAVLARYVILLLKDRRDGVFGSQIAKRLSGMFTLVAVLPSVFLFGVSAQFINGTINSWFGNDTHEALERSLNLSKSALNLAADNALGNAVPVQIDLIGAASLPGDMGRVLEHYAGSGFAQLALYNAASGKIEKSINPHKLDQPFPGKARWEKIQQAGSVRDLESIGGVLYAQGWLSAGTHNGRDYALFFRQPVPKGVAEDAVLIEKARAKYAELSYSKKGLQTFFLATLLIASLLSIFLALVMALYFARRFVEPVLSLAEGAKAVAQGDFSQTRPVLRNDEFGRLTKLFNHMTEQLSIAKEADERNRKREEAARHYLECVLEGLTTGVVVFDEQGCLKTFNKAAEQILGMPLTPLWGSSRHGWHGVSAQQSLLAEVFAAIGAAAGTDKPVHVKYAAPDDAKILLGKATVLPEDNGNGVVMVIDDITVLIHAQKEAAWGEVAKRLAHEIRNPLTPIQLSAERLAWKLGGKLDEQDAQILTRSTDTIVKQVAALKEMVEAFRNYARSPSLKLENQDLNALIGDVLALYEAGPCRFAAELAGEPLMVAADTTAMRQVLHNIFKNAAEAAEEADVPEVRVKSEAGQDGRIVLTVCDNGKGFGREMLHNAFEPYVTDKPAGTGLGLPVVKKIIEEHGGRISLSNQDAGGACVRIILPKTVKTYA

SEQ ID NO: 27597 - protein, 445 aa, Neisseria meningitidis
MSNHTSWSSKIGFVLAAAGSAIGLGAIWKFPYTAGTNGGAVFFLLFLIFTILVALPVQLAEFYIGRTGGKNAVDSFRALRPGTQWLWVGRMGVAACFILLSFYSVVGGWVLNYVVHSFTGAIHAGADFEALFGTTISNPAGSLSYQALFMLITVWVVKGGISDGIEKANRYLMPGLFILFIALAIRSLTLPGAMEGVSFLLKPNWSYFKADTMITALGQAFFALSIGVSAMITYASYLGKDQDMFRSGHTIMWMNLLVSLLAGLVIFPAVFAFGFEPSQGPGLIFIVLPAVFMKMPFGTVLFAVFMLLVVFATLTSAFSMLETVIAATIRQDERKRKKHTWLIGTAIFIVGIPSALSFGVWGEFKVFGKTIFDLWDYVISAVIMPVGALGVAVFTAWIQDKQSVLKDAGAGSTVPRAVLLLWLNTLRYLAPIAIIIVFVNSLDIL

SEQ ID NO: 27598 - protein, 105 aa, Neisseria meningitidis; identical to SEQ ID NO: 3758

SEQ ID NO: 27599 - protein, 226 aa, Neisseria meningitidis; identical to SEQ ID NO: 7580

SEQ ID NO: 27600 - protein, 127 aa, Neisseria meningitidis; identical to SEQ ID NO: 2146

SEQ ID NO: 27601 - protein, 687 aa, Neisseria meningitidis
MMTQTLLIELLTEELPPKALNNLGNHFAAAVAEGLEKAQLVDGAAEFTAYASPRRLAVQVKNVKAVQADQKIVKKGPAVANAVKDGAPTKALEGFARGAGAKIEDLTIINDGKQDVYAYEYVQTGKPLGELLEDIINAAVKKLPIPKVMRWGSSTFTFVRPVHGLIVLHGGDIVNVSVLGLQSGNQTLGHRFLSGGEIAIENADSYAAQMRGQGKVVASFAERKAAIQTALNEQAGRLNATVAADEALLDEVTALVEWPVVLEAGFEEHFLAVPQECLILTMQQNQKYFPLLDRNGKLMNRFLLVSNLQTEDPSHIIQGNERVLRARLSDAEFFYKQDQKATLESRLPKLANVVYHNKIGSQAERIERLQSIAAHIAKALGADAAAAERAARLAKADLVTEMVGEFPELQGTMGKYYARLDGETEEIAEAVEQHYQPRFAGDNLPNGKVATAVALADKLETLVGIWGIGLIPTGDKDPYALRRAALGILRMLMQYGLDVNELIQTAFDSFPKGLLNEQTPSETADFMQARLAVLLQNDYPQDIVAAVLAKQPRRLDDVVAKLQAVAAFKQLPEAAALAAANKRVQNLLKKADAELGAVNESLLQQDEEKALFAAAQGLQPKIAAAVAEGNFQTALSELASVKPQVDAFFDGVMVMADDAAVKQNRLNLLNRLAEQMNAVADIALLGE

SEQ ID NO: 27602 - protein, 145 aa, Neisseria meningitidis
MNQTVYLYTDGACKGNPGAGGWGVLMRYGSHEKELFGGEAQTTNNRMELTAVIEGLKSLKRRCTVIICTDSQYVKNGMENWIHGWKRNGWKTAAKQPVKNDDLWKELDALVGRHQVSWTWVKGHAGHAENEHADDLANRGAAQFS

SEQ ID NO: 27603 - protein, 65 aa, Neisseria meningitidis; identical to SEQ ID NO: 25330

SEQ ID NO: 27604 - protein, 251 aa, Neisseria meningitidis; identical to SEQ ID NO: 9216

SEQ ID NO: 27605 - protein, 346 aa, Neisseria meningitidis
MNTPIPFSERLIRWQKQHGRHHLPWQVKNPYCVWLSEIMLQQTQVATVLDYYPRFLEKFPTVQILAAAPQDEVLSLWAGLGYYSRARNLHKAAQQVVGQFGGTFPSERKDLETLCGVGRSTAAAICAFAFNRRETILDGNVKRVLCRVFAQDGNPQDKKFENALWTLAESLLPSENADMPAYTQGLMDLGATVCKRTKPLCHQCPMADICEAKKQNRTAELPRKKTAAEVPTLPLYWLIVRNRDGAILLEKRPAKGIWGGLYCVPCFESLNGLSDFAAKFSLTMADMDEQTALTHRLTHRLLMITPFEGQMPSESPSDGIWIKPAHLKDYGLPKPLEIYLNGNRLE

SEQ ID NO: 27606 - protein, 64 aa, Neisseria meningitidis; identical to SEQ ID NO: 3555

SEQ ID NO: 27607 - protein, 282 aa, Neisseria meningitidis; identical to SEQ ID NO: 1327

SEQ ID NO: 27608 - protein, 56 aa, Neisseria meningitidis; identical to SEQ ID NO: 2971

SEQ ID NO: 27609 - protein, 462 aa, Neisseria meningitidis
MSIKFADLNLDKNILSAVSSEGYESPTPIQAQAIPFALEGRDIMASAQTGSGKTAAFLLPTLQRLTKRSEKPGKGPRALVLTPTRELAAQVEKNALAYAKNMRWFRTVSIVGGASFGYQTRALSKPVDLIVATPGRLMDLMQSGKVDFERLEVLILDEADRMLDMGFIDDIETIVEATPSDRQTLLFSATWDGAVGKLARKLTKDPEIIEVERVDDQGKIEEQLLYCDDMRHKNRLLDHILRDANIDQCVIFTSTKAMTEVIADELYEKGFAANCLHGDMPQGWRNRTLMDLRKGRCKILVATDVAARGIDVPTITHVINYDLPKQAEDYVHRIGRTGRAGRTGIAITFAEVNEYVKVHKIEKYINRKLPELTIEGMEPTRKRKSAGGKPKGKGGWGDRKSGGWRGDHKPGKEGFGGKTRGEGFKKEGFKKDGFKKTGEGFKGKRKAGDSFAGKGERRYKDR

SEQ ID NO: 27610 - protein, 753 aa, Neisseria meningitidis
MLQIEIDGKQVSVEQGATVIEAAHKLGTYIPHFCYHKKLSIAANCRMCLVNVEKAPKPLPACATPVTDGMIVRTHSAKAREAQEGVMEFLLINHPLDCPTCDQGGECQLQDLAVGYGKTTSRYTEEKRSVVGKDMGPLVSAEEMSRCIHCTRCVRFTEEIAGLQEIAMVNRGEHSEIMPFIGKTVETELSGNVIDLCPVGALTSKPFRFNARTWELNRRKSVSAHDALGSNLIVQTKDHTVRRVLPLENEAINECWLSDRDRFAYEGLYHESRLKNPKIKQGGEWMDVDWKTALEYVHSAIKCIAKDGNQNQVGVWANPMNTVEELYLAKKLADGLGVKNFATRLRQQDKRLSDGLKGAQWLGQSIESLADNDAVLVVGANLRKEQPLLTARLRRAAKDRMALSVLASSKEELFMPLLSQEAVHPDEWAGRLKNLSADAEHAVTASLKNAEKAAVILGAEVQNHPDYAAIYAAAQELADATGAVLGILPQAANSVGADVLNVNSGESVAEMANAPKQAVLLLNVEPEIDTVDGAKAVAALKQAKSVMAFTPFVSETLLDVCDVLLPIAPFTETSGSFINMEGRLQSFHGVVQGFGDSRPMWKVLRVLGNLFDLKGFEYHDTAAILKDALDAESLPSKLDNRSTWTGEGVQTASDRLVRVGGVGIYHTDSIVRRSAPLQETSHAAVPAARVNPNTLARLGLQDGQIAVAKQNGASVSVAVKADAGLPENVVHLPLHTENAALGALMDTIELAGA

SEQ ID NO: 27611 - protein, 155 aa, Neisseria meningitidis; identical to SEQ ID NO: 6437

SEQ ID NO: 27612 - protein, 272 aa, Neisseria meningitidis
MKKDHLNTTGFDLWHTIREETAAAVSAEPMLASFLHQTVLRHESLGSVLAYHLSSKLGSPIMDVRALFEIYQQALGSDTQIGKCVEADLKAIYERDPACDEYSLPLLYFKGFHAIQAHRINHRLYLDGRKTLAYFLQNRMSEVFGVDIHPAARFGYGLMLDHATGFVAGETAVLGNNISILHGVTLGGSGKEGGDRHPKIGDGVMIGANASILGNIRIGSNAKIGAGSVVVSDVPPSITVVGVPAKPVARSLKTPSADMDQNIQFAEIDFMI

SEQ ID NO: 27613 - protein, 308 aa, Neisseria meningitidis
MSEMKKTKVHLISGFLGTGKTTALKSLMAQKDPNEKWVIIVNEFGEIGIDGAVLSDNGIPVAEIAGGCLCCTSGPQMGVTVQKMLRDAKPDRLMIEASGLAHAASVIDELKTKPLDSLLEIGAVFTVVDPRQFINPDYVQQALYKDQIGICDVLVASKTDLCTPEQLAEFHDKAAKLFPPKAKVVEVQNAQLDIQWLDIPVIEKSRYRLKALPDNTMGFQSQGFTFPAGRDFDGEKLTNFFNDLPKMTEGLVRAKGVFQVLGTWVWLNWVDGQWGANQVSWRRDSRFELIAKSFDADLIEQKLKDALE

SEQ ID NO: 27614 - protein, 274 aa, Neisseria meningitidis
MNCNTPTDIMFSFEGFRRRGGITDHHADGFGIGFFEGKGVRLFHDDKPSANSPVADLVRAYQIKSENVVAHIRKASQGQTSLANTHPFMREMWGGYWLFAHNGHLIDFFPEQGEFFHPVGTTDSERAFCHILNRLRTRFAARPDDDTLFDAIAGLTHEIRKFGLFNFMLSDGIALFAHASTLLHYIVRQAPFGKARLLDDDVMVDFAEVTTPSDRVAVIATLPLTRDESWSQLAVDELVMFREGNIVRHDRPENPVYMSAEEGLEIARAAGVSV

SEQ ID NO: 27615 - protein, 137 aa, Neisseria meningitidis
MQVEVVSSEQNIYSGEASFVVVPTVQGELGIYPRHEPIMSLVRPGALRLTVPGEDKEVLVAVSGGVLEVQPDKVTVLADVAVRSAEMDQARAEEAKKAAEAGISQAKDDKALAEAHKALAAAIAQLKTLDYIRSHKK

SEQ ID NO: 27616 - protein, 110 aa, Neisseria meningitidis
MSRCCLKRLQTASAVSAFSGGVLGCGVKLCCRRLSVLFNPGVMLFVPDCPVGGAAGFFQYEMLCPFFWQGRLQTGSNLAYDVFMSAGRLNGGRNPPHSRRFLALLCSVAL

SEQ ID NO: 27617 - protein, 176 aa, Neisseria meningitidis; identical to SEQ ID NO: 3131

SEQ ID NO: 27618 - protein, 428 aa, Neisseria meningitidis
MTAQHQAPLRFITAGSVDDGKSTLIGRLLYDSKALLSDQIKTLESGKSKGLKEAIDFSILTDGLEAEREQGITIDVAYRYFSTAKRKFIIADTPGHEQYTRNMVTGASTASAAVVLVDASQLDFGAQPLQLLPQTKRHSAILRQLNCPHIVVAVNKMDLLDYSEDKFNAIVEAYRRLAGRLGLKDVHFVPVSALLGDNLVYPGGNMPWYRGEPLLAILENLPGADEVSRTADDFYFPVQLVVRQDADKADDFRGYQGRIERGSVAVGQTVRIEPNGLTAEVSEIITPKGEVAQAFAGEAATLRLDRDIDVSRGDLFVDKNSPLAPQKHLEATLCWFDERPLNTARRYLLKHGTQTVPAKVGEIESVLDVRTLEQEAGAESLKMNDIAKVRINLQKPVTATPYAENTAAGSFILIDEATYGTVAAGMIL

SEQ ID NO: 27619 - protein, 55 aa, Neisseria meningitidis; identical to SEQ ID NO: 1257

SEQ ID NO: 27620 - protein, 242 aa, Neisseria meningitidis
MPDYIRISRAADSLRDIKITPHFLPHADGSCLIECGNTKVICTASIDENVPPFLRGKNQGWVTAEYGMLPASTASRMRREASAGKQSGRTQEIQRLIGRSLRAVVDMEKLGERQILIDCDVIQADGGTRTASITGAFVALQIAVGKLVSDGILSENPIREAVAAVSVGVVNGVPLLDLDYPEDSGCDSDVNIVMTASGKIIEIQGTAEDAPFSLDELGKLVALAQKGIGELLQHQQNALSAA

SEQ ID NO: 27621 - protein, 91 aa, Neisseria meningitidis; identical to SEQ ID NO: 5452

SEQ ID NO: 27622 - protein, 467 aa, Neisseria meningitidis; identical to SEQ ID NO: 8430

SEQ ID NO: 27623 - protein, 138 aa, Neisseria meningitidis; identical to SEQ ID NO: 774

SEQ ID NO: 27624 - protein, 436 aa, Neisseria meningitidis; identical to SEQ ID NO: 6841

SEQ ID NO: 27625 - protein, 572 aa, Neisseria meningitidis
MNLHQTVEHEAAAAFAAAGIADSPVVLQPTKNAEHGDFQINGVMGAAKKAKQNPRELAQKVADALAGNAVIESAEVAGPGFINLRLRPEFLAQNIQTALNDARFGVAKTDKPQTVVIDYSSPNLAKEMHVGHLRSSIIGDSISRVLAFMGNTVIRQNHVGDWGTQFGMLVAYLVEQQKDNAAFELADLEQFYRAAKVRFDEDAAFADTAREYVVKLQGGDETVLALWKQFVDISLSHAQAVYDTLGLKLRPEDVAGESKYNDDLQPVVDDLVQKGLAVEDDSAKVVFLDEFKNKEGEPAAFIVQKQGGGFLYASTDLACLRYRVGTLHADRLLYVVDHRQALHFEQLFTTSRKAGYLPENVGAAFVGFGTMMGKDGKPFKTRSGDTVKLVDLLTEAVERATALVKEKNPELGADEAAKIGKTVGIGAVKYADLSKNRTSDYVFDWDAMLSFEGNTAPYLQYAYTRVQSVFRKAGEWDANAPTVLTEPLEKQLAAELLKFEDVLQSVADTAYPHYLAAYLYQIATLFSRFYEACPILKAEGASRNSRLQLAKLTGDTLKQGLDLLGIDVLDVM

SEQ ID NO: 27626 - protein, 248 aa, Neisseria meningitidis
MKSSTQAVLEHTAIPKHIAVIMDGNGRWAKKRFLPRIMGHKRGLDALENMVKHCAKLGVQYLTVFAFSTENWRRPEDEVSFLMGLFLQALQKQVRRLHENNMRLKILGSRERFSRQILKGIEEAEALTANNTGLTLSIAADYGGRWDILQAANKLIAEGVSEITEDTLAKHLMLGNAPEPDLFIRTGGETRISNFLLWQMAYAELYFTDILWPDFDETALDAAVASFQKRERRFGRTSEQLPIEQQRN

SEQ ID NO: 27627 - protein, 314 aa, Neisseria meningitidis
VGINANPNCADEAGKLIWENDPNKNWWANRMDDVRGIVQGAVNPFLMGFQGVGIGAITDSAVSPVTDTAAQQTLQGINHLGNLSPEAQLAAATALQDSAFAVKDGIHSAKQWADAHPNITATAQTALAAAEAAGTVWRGKKVKLNPTKWDWVKNTGYETPTARHMQTKALGTVDEIGDTVQQVVKQTSGQKTSGGNPAIDSDPYSPSSVAARIEAGKVRSDLQIKDILSNTTQRSKTKGPAVQYDKVGDYNDALNDFNSLNIRNVQTRPNGTITGNLPDGRAVNVRNDSSGGEPTLEITISNNRKIKIGYGNTR

SEQ ID NO: 27628 - protein, 152 aa, Neisseria meningitidis
MSTFFRQTAQAMIAKHIDRFPLLKLDQVIDWQPIEQYLNRQKTRYLRDHRGRPAYPLLSMFKAVLLGQWHSLSNPELERGVLVSRNLISVASGSIFDSEKAVSISSSAMFWFNCGIILMSTFSLLLICSIAGLIILAFNALNSSYSLSFNPK

SEQ ID NO: 27629 - protein, 251 aa, Neisseria meningitidis
MIKIRNIHKTFGENTILHGIDLDVCKGQVVVILGPSGSGKTTFLRCLNALEMPEDGQIEFDNERPLKIDFSKKPSKHDILALRRKSGMVFQQYNLFPHKTALENVMEGPVAVQGKPAAQAREEALKLLEKVGLGDKVDLYPYQLSGGQQQRVGIARALAIQPELMLFDEPTSALDPELVQDVLNAMKELAREGWTMVVVTHEIKFALEVATTVVVMDGGVIVEQGSPKELFDHPKHERTRRFLSQIQSTKI

SEQ ID NO: 27630 - protein, 302 aa, Neisseria meningitidis
MNTPQSAIIPDHAQAGIFIEADFAANRLNDIKAACRASLDALSALKTRFPDDILGLTIAFGSKAWATFGHTDEGSEIKPFSEMGNGLAPSTQHDMSIHIQSFRQNAAYALAQSVLGAFGDSICVASEEHGLRLYQDRGLDGFVDGTENPQGDENVREVAIIPEGKPDAGGSYVLLQKYLHDLKKWDAVPVAEQEASVGRGKETDDEFGRDVRLPDSHLGRVNLKENGVGLKIVRRSLPFGKISGEHGLMFTAYCRTLHNIEAQLLSMFGDTDGKTDLLLRHLSAAVSGGYYYAPSVERLQNL

SEQ ID NO: 27631 - protein, 92 aa, Neisseria meningitidis; identical to SEQ ID NO: 6928

SEQ ID NO: 27632 - protein, 99 aa, Neisseria meningitidis
MRQIFESVCTDFEAQLVEFDGENDHVLLLVNYPPKVSISKLVNSLKGVSSRMIRQKNYPGIREKLWGGALWSPSYFAGSCDGASISIIRQYIEQQNTPD

SEQ ID NO: 27633 - protein, 459 aa, Neisseria meningitidis
MFAFKSLLDMPRGEALAVVVALIAAMGYTIISLEWLPHMSIIAAIVVLILYGLVRGLKYNDMQQGMIGALNQGMGAIYLFFFIGLMVSALMMSGAIPTLMYYGFGLISPTYFYFSAFALCSVIGVSIGSSLTTCATVGVAFMGMAAAFHADMAMTAGAIVSGAFFGDKMSPLSDTTGISASIVGIDLFEHIKNMMYTTIPAWLISAALMLWLLPNVAAQDLNSVESFRSQLEATGLVHGYSLIPFALLVVLALMRVNAVVAMLFTVIAAVAVTYLHSTPDLRQLGAWFYGGYKLEGEAFKDVAKLISRGGLESMFFTQTIVILGMSLGGLLFALGAIPSLLDAVRSFLTNAGRATFSVAMTSVGVNFLIGEQYLSILLSGETFKPVYDRLGLHSRNLSRTLEDAGTVINPLVPWSVCGVFISHALGVPVWEYLPYAFFCYLSLALTLLFGWTGLTLSKK

SEQ ID NO: 27634 - protein, 186 aa, Neisseria meningitidis; identical to SEQ ID NO: 1228

SEQ ID NO: 27635 - protein, 374 aa, Neisseria meningitidis
MQNTSFDNESDYSDDSDFASASETENRIGLTVPLELAGGRLDAVLAKLLPDYSRSRLTSWIKEGAVIVNDKPSQPKDKMIGGEQICVTVRPSEENLAFVPEPMALDIVYEDDTVIVVNKPAGLVVHPAAGNWTGTLLNGLLAHCPELSQIPRAGIVHRLDKETSGLMVVAKTLSAQNSLVRQLQERTVKRIYRAVANGIVPFDGKIETQIGRDPHNRLKMAVVKFGGKPAVTHVKVLERYLAHSYIECSLETGRTHQIRVHMREANHPLAGDPVYGNPRHPCGDTVKEAVKSLGARQALHAYRLSFTHPKTGETVSFEAPIPNDIYHLLSVLRLEAGLDSSLSNEEEWQDKFGADDDDDWNEDDYDVEVVYVRE

SEQ ID NO: 27636 - protein, 231 aa, Neisseria meningitidis
MSELILKCEGVGKRYRDGGLDVPVLHGLDLEIRAGESTGIIGSSGSGKSTLLHILGGLDMPSEGRVLLMGEDLRALNQRRLGDLRNRHLGFVYQFHHLLPEFSALENVMMPLLIGKKSREEAAEAAMAMLEKVGLKHRSRHRAGELSGGERQRAAIARALVTQPKCLLADEPTGNLDRANARNVLDMMLELKTELGTGLVVVTHDDELASRFERVMVMKDGSLHPKQGADA

SEQ ID NO: 27637 - protein, 807 aa, Neisseria meningitidis
LATLPLRDVVVYPHMVLPLFVGRPKSIAALENAITREEPVFLLAQTDAAVEEPVAADLYQTGTVAQVLQVLKLPDGTVKVLVEGLYRGRVLTIEDTGGLFVSHIETVVEEDTGGNTDLEAVRRTLLAQFEQYAKLNKKIPAEIIGSINGIAENSRLTDTVAAHLQLKLAQRQQILEIPEIGKRMEFLLAQLESELDIMQAEKRIRGRVKRQMEKSQREYYLNEQIKAIHKELGEEDENGELDALEAGIKKAGMSKEAEEKCLSELKKLKMMPPMSAESTVVRNYIDTLLELPWKKKSRVSKDIAKAGLVLDADHYGLEKVKERILEYLAVQKRMDKLKGPILCLVGPPGVGKTSLGESIAKATGRKYVRMALGGVRDESEIRGHRRTYIGSMPGKILQNMAKAGVKNPLFLLDEIDKLGSDFRGDPASALLEVLDPEQNNKFADHYAEVDYDLSDVMFIATSNSLNIPTPLLDRMEIIRLSGYTEDEKINIAMQYLVPKQMKRNGVKEGELLVEESAVRDIIRYYTREAGVRSLDREIAKICRKVVMQITLDEDKKRLSETKKTSKAKPKAVKVNEKNLHDYLGVRRFDYGVAESENRIGQVTGLAWTEVGGELLTVEAAALPGKGVIQCTGQLGDVMKESVSAAWSVVRSRAESVGLAPDFYEKKDIHIHVPEGATPKDGPSAGIAMTLAAVSAFTKIPVRADVAMTGEITLRGEVLPIGGLKEKLLAALRGGIKHVLIPKDNVKDLEEIPENVKTGLTIHPVKWIDEVLALGLESQPEPWAEPSGAEAAAESASKPKPRSRATKH

SEQ ID NO: 27638 - protein, 256 aa, Neisseria meningitidis
MEPERLQKVLAASGVGSRREMEEWINNGWVTVNGKTAQLGDKVTPDDHVTVKGSIIKLKWADRLPRIILYYKQEGEIVSRDDPQGRVSIFDRLPQAASSRWVAIGRLDINTSGLLILTTSGELVQRFAHPSFEVEREYAVRVLGGLTGEQMRVLTEEGVMLEDGLAKVERIREQGGEGANKWYNVVIKEGRNREVRRIFESQGLTVSRLVRVGFGPIGLPNRLKRGQFYELNPAEVANILKWAEMLLPGERRRKKA

SEQ ID NO: 27639 - protein, 154 aa, Neisseria meningitidis; identical to SEQ ID NO: 15052

SEQ ID NO: 27640 - protein, 446 aa, Neisseria meningitidis
MLNPSRKLVELVRILDEGGFIFSGDPVQATEALRRVDGSTEEKIIRRAEMIDRNRMLRDTLERVRAGSFWLWVAAATFAFFTGFSGTYLLMDNQGLNFFLVLAGVLGMNTLMLAVWLAMLFLRVKVGRFFSSPATWFRGKDPVNQAVLRLYADEWRQPSVRWKIGATSHSLWLCTLLGMLVSVLLLLLVRQYTFNWESTLLSNAASVRLVEMLAWLPSKLGFPVPDARAVVEGRLNGNIADAQAWSGLLVGSIACYGILPRFLAWVVCKILLKTSKNGLDLEKPYYQAVIRRWQNKITDADTRRETVSAVSPKIVLNDAPKWAVMLETEWQDGEWFEGRLAQEWLDKGVATNREQVAALETELKQKPAQLLIGVRAQTVPDRGVLRQIVRLSEAAQGGAVVQLLAEQGLSDDLSEKLEHWRNALAECGAAWLEPDRAAQEGRLKDQ

SEQ ID NO: 27641 - protein, 841 aa, Neisseria meningitidis
LKNNRQIKLIAASVAVAASFQAHAGLGGLNIQSNLDEPFSGSITVTGEEAKALLGGGSVTVSEKGLTAKVHKLGDKAVIAVSSEQAVRDPVLVFRIGAGAQVREYTAILDPVGYSPKTKSALSDGKTHRKTAPTAESQENQNAKALRKTDKKDSANAAVKPAYNGKTHTVRKGETVKQIAAAIRPKHLTLEQVADALLKANPNVSAHGRLRAGSVLHIPNLNRIKAEQPKPQTAKPKAETASMPSEPSKQATVEKPVEKPEAKVAAPEAKAEKPAVRPEPVPAANTAASETAAESAPQEAAASAIDTPTDETGNAVSEPVEQVSAEEETESGLFDGLFGGSYTLLLAGGGAALIALLLLLRLAQSKRARRTEESVPEEEPDLDDAADDGIEITFAEVETPATPEPAPKNDVNDTLALDGESEEELSAKQTFDVETDTPSNRIDLDFDSLAAAQNGILSGALTQDEETQKRADADWNAIESTDSVYEPETFNPYNPVEIVIDTPEPESVAQTAENKPETVDTDFSDNLPSNNHIGTEETASAKPASPSGLAGFLKDSSPETILEKTVAEVQTPEELHDFLKVYETDAVAETAPETPDFNAAADDLSALLQPAEAPSVEENVTETVAETPDFNATADDLSALLQPSEVPAVEENAAEIVADDLSALLQPAEAPAVEENVTKTVAEIPDFNATADDLSALLQPSEVPAVEENAAEIVADDLSALLQPAEAPAVEENAAEITLETPDSNTSEADALPDFLKDGEEETVDWSIYLSEENIPNNADTSFPSESVGSDAPSEAKYDLAEMYLEIGDRDAAAETVQKLLEEAEGDVLKRAQALAQELGI

SEQ ID NO: 27642 - protein, 245 aa, Neisseria meningitidis; identical to SEQ ID NO: 25287

SEQ ID NO: 27643 - protein, 289 aa, Neisseria meningitidis; identical to SEQ ID NO: 2681

SEQ ID NO: 27644 - protein, 768 aa, Neisseria meningitidis
MAKNLLIVESPSKAKTLKKYLGGDFEILASYGHVRDLVPKSGAVDPDNGFAMKYQLISRNGKHVDAIVAGAKEAENIYLATDPDREGEAISWHLLEILKSKRGLKNIKPQRVVFHEITKNAVLDAVAHPREIEMDLVDAQQARRALDYLVGFNLSPLLWKKIRRGLSAGRVQSPALRLICERENEIRAFEAQEYWTVHLDSHKGRSKFTAKLAQYNGAKLEQFDLSNEAAQADVLKELEGKEAVVTAIEKKKRSRNPAAPFTTSTMQQDAVRKLGFTTDRTMRTAQQLYEGIDVGQGAIGLITYMRTDSVNLADEALTEIRHYIENKIGKEYLPSAAKQYKTKSKNAQEAHEAIRPTSVYRTPESVKPFLSADQFKLYQMIWQRTVACQMTPAKFDQTTVDITVGKGVFRVTGQVQTFAGFLSVYEESSDDEEGEDSKKLPEMSEGDKLPVDKLYGEQHFTTPPPRYNEATLVKALEEYGIGRPSTYASIISTLKDREYVTLEQKRFMPTDTGDIVNKFLTEHFAQYVDYHFTAKLEDQLDEIAGGKRQWIPVMDKFWKPFIKQVEEKEGIERAKFTTQELDETCPKCGEHKLQIKFGKMGRFVACAGYPECSYTRNVNETAEEAAERIAKAEAEQAELDGRECPKCGGRLVYKYSRTGSKFIGCANYPKCKHVEPLEKPKDTGVQCPQCKKGNLVERKSRYGKLFYSCSTYPDCNYATWNPPVAEECPNCHWPVLTIKTTKRWGVEKVCPQKECGWKEQIEPPAPKE

SEQ ID NO: 27645 - protein, 313 aa, Neisseria meningitidis
MKILLLLIPLVLTACGTLTGIPAHGGGKRFAVEQELVAASSRAAVKEMDLSALKGRKAALYVSVMGDQGSGNISGGRYSIDALIRGGYHNNPESATRYSYPAYDTTATTKADALSSVTTSTSLLNAPAAALTKNSGRKGERSAGLSVNGTGDYRNETLLANPRDVSFLTNLIQTVFYLRGIEVVPPEYADTDVFVTVDVFGTVRSRTELHLYNAETLKAQTKLEYFAVDRDSRKLLIAPKTAAYESQYQEQYALWMGPYSVGKTVKASDRLMVDFSDITPYGDTTAQNRPDFKQNNGKNPDVGNEVIRRRKGG

SEQ ID NO: 27646 - protein, 204 aa, Neisseria meningitidis
MNFTRLLNQVLSTVQKKGGTFSDSPLNSFGGGALVAGIASMLLNGKNRKTITKIGSTAALGYLAYRGYQMWQQNKGRATVTQSDFQPAGETEETYSRTVLRTMIAAAASDGMIDEAERRTIEQESGTDPETAAWLAAEYRLPASIEDIAAAVGNDEALAAEAYLAARLVCADLSRKETVFLARLSQALKLDDNLVESLERQLGF

SEQ ID NO: 27647 - protein, 389 aa, Neisseria meningitidis
MDNELWIILLPIILLPVFFAMGWFAARVDMKTVLKQAKSIPSGFYKSLDALVDRNSGRAARELAEVIDQQPQSYDLNLTLGKLYRQRGENDKAINIHRTMLDSPDTVGEKRARVLFELAQNYQSAGLVDRAEQIFLGLQDGKMAREARQHLLNIYQQDRDWEKAVETARLLSHDDQTYQFEIAQFYCELAQAALFKSNFDVARFNVGKALEANKKCTRANMILGDIEHRQGNFPAAVEAYAAIEQQNHAYLSMVGEKLYEAYAAQGKPEEGLNRLTGYMQTFPELDLINVVYEKSLLLKCEKEAAQTAVELVRRKPDLNGVYRLLGLKLSDLDPAWKADADMMRSVIARQLQRSVMYRCRNCHFKSQVFFWHCPACNKWQTFTPNKIEV

SEQ ID NO: 27648 - protein, 299 aa, Neisseria meningitidis
MFKKSRVPVRVFRSSDKGAPQNVVGASDNAFKILNACLVEGYGDTASLGWELKFKVGSTGIFMPTDKKQTGWGLRISQSEKYGARVSAVRNPSSDDTFELESAYENNEAYFLHDNTNGDTKTRDWTLVGHSLGFILIFHVTEHSSDGPFNTTLYFGRVPTLAAADDHNYLLCYSTDGSYRYLSYRTRNSYLLMARDYLGLNLGRYGTKSKTEGISHRFPARICNGFWCDDVYITEQVESEWEVRGYLPGIMNVVGDAYPYDRKVLEDFDGSGDSFLYLRFYGHSSSPKGQMVNLTAWEV

SEQ ID NO: 27649 - protein, 261 aa, Neisseria meningitidis; identical to SEQ ID NO: 335

SEQ ID NO: 27650 - protein, 861 aa, Neisseria meningitidis; identical to SEQ ID NO: 354

SEQ ID NO: 27651 - protein, 101 aa, Neisseria meningitidis; identical to SEQ ID NO: 1118

SEQ ID NO: 27652 - protein, 148 aa, Neisseria meningitidis
VRVLRENGIEFEPFTYAYEEHGGTAQFARLFGKDEHLVIKTIVLQDENGKGLIVLMHGDKQISTRNLARHLGAKHIEPATPAQANKWTGYLVGGTTPFGIRTKLDIYVEQSVMDLETIYINGGKRGFIIGIRPGDLNILNPKTIQAAV

SEQ ID NO: 27653 - protein, 179 aa, Neisseria meningitidis
MKITHCKLKKKVQKELLRFFVLEVTARSAADILGIHPNSAVLFYRKIRTVINHHLALAADEVFEGPVEQDESDFGGRRKGRRGRGAAGKVVVFGILKRNGRVYTVVVDNAKSDTLMPVIKQKIMPDSIVYTDSLSSYDKLDVSGFIHYRINHSKEFADRQNHINGIENFWNQAKRVLRK

SEQ ID NO: 27654 - protein, 95 aa, Neisseria meningitidis
MDDLIAAFLGYLSGKYSEGKISRLEISLTAGSIFFAVFFIHELIIFIVDGNKENLWNFITEMMKDLFLFSCSVCLLFYFLLFIAETIGKTINKIK

SEQ ID NO: 27655 - protein, 119 aa, Neisseria meningitidis; identical to SEQ ID NO: 121

SEQ ID NO: 27656 - protein, 221 aa, Neisseria meningitidis
MTFTAVLFDLDGVITDTAEYHYRAWKKLAEELGIGIDRKFNEQLKGVSRDDSLKRILAHGGKTVGEAEFAELTRRKNDNYVEMIQAVKPEDVYPGILPLLEALRANGKKIALASASKNGPFLLERMGLTHFFDTVADPAAVAHSKPAPDIFLAAAEGVGADIRHCIGIEDAAAGVAAIKAAGALPIGVGKAEDLGSDIALVSETAGLTYAYLQNVWAQSGR

SEQ ID NO: 27657 - protein, 138 aa, Neisseria meningitidis; identical to SEQ ID NO: 15462

SEQ ID NO: 27658 - protein, 636 aa, Neisseria meningitidis
MTLETLIALPRNIKKICFLIHDFLMIFIAFWFTQSLKADYSDEWFDPANWQSFLLTAFLTACLFFRMGLYRAVTRFISFRILSTALAGSLASAVLFFLNTLIFEERLRLALPIVYFLLLFVSVTGSRMVLRGLLSEHPKKQMAPVIIYGAGRSGRQLLKAVKQMREYSAAAFVDDDPKLWHTVIYDLAVYQPDAIAFLIERYGVEKILLAIPGATQEQRLRIINKLEAYPCEVLTIPGMKDLMDGKISIGTLKKISVSDLLGRDSVAPDNRLMSADIEGKTVMVTGAGGSIGSELCRQIIRRRPEKLLLFELSEFALYAVEKELRETCIQKRLDTEILPFLGSVQNRTLLEHVMTAFSVATVYHAAAYKHVPMVEFNTVEGIRNNIFGTLECALAATTSGVETFVLISTDKAVRPTNTMGASKRMAELCLQALAAEPGQKTRFSMVRFGNVLGSSGSVVPLFEKQIAEGGPLTLTHPEITRYFMTIPEAAQLVIQAGAMGTGGDVFVLDMGESVKIIDLARQMITLSGLKPNTPEQPDGDIEILITGLRPGEKLYEELLIGDNVRKTGHPRIMTANETMLPWHELSALLDRIRAACDRYDQQAIRTLLINAPTGFAPSDGICDLLWVRETHRKNAV

SEQ ID NO: 27659 - protein, 852 aa, Neisseria meningitidis
MPANLSSALETFKQQRDAAEAHYLKANRVSVFFREYTAALETLLAALWAEYFQNSALCLMAVGGFGRGELYPCSDVDLAVVSPAPLSDGIQEQIARFVQTLWDCKLMPSVKSGSVDELCESVRNDITGDTAFLEARFLFGNRQTADKLAEKMNAQRNVAAFVEAKLVEMEHRHAKSQGSGAVLEPNIKSCPGGLRDIHTLLWIAKAQGLATDLPDLLKQRILTRAEAGMLSHGYRRLAHIRIHLHLNAKRAEDRLLFDLQPQVAESMGYEGLNLRRQSEELMRVFYRAIKTVKQLGGILTPMLQSRVSSTPLRVTLRIDDDYIQVNNQIAARHTDIFFRRPEHIFKIVEIMQQRNDITALEPQTLRAWWGATRKINRSFYQNSENRHRFAGFFRNGNGLTQTLRFLNLYGVLGRYLPAWEKIVGLLQHDLFHIYPVDDHILTVVRNVRRLALDMHSHELPYASALMQSFEKQDILYLAAFFHDIAKGRGGDHAIQGIADARQFAADHFLTEEESDLLAWLVENHLLMSTVAQKEDIQDPSVLDAFCKRVQTHERLSALYLLTISDIRGTNPKLWNAWRASLLESLFHAAGRYLTGNGGNPHTLFGRRRQEAADLLTRAAVPEKQQKKLWNALGSAYFARHQSREILWHAANLVHDFETPIVRSRILPKSDSFQVMVFMPNGPRLFARLCRIFSRHGFDILAARAFITEHDYILDTFIVQIPSQHAPEDYPDIQSALEAELNSFIHGHTVAETSNHSRRISRRSRYMPIAPGITITPEEDYPDWYSVEITAVNRPFLLADMAEVFFAHNVSLRYAKISTLDERAEDSFTVFSLDLKNPKIQSSLKQTLLEQLS

SEQ ID NO: 27660 - protein, 425 aa, Neisseria meningitidis
MFERSVIAMACIFALSACGGGGGGSPDVKSADTLSKPAAPVVAEKETEVKEDAPQAGSQGQGAPSTQGSQDMAAVSAENTGNGGAATTDKPKNEDEGPQNDMPQNSAESANQTGNNQPADSSDSAPASNPAPANGGSNFGRVDLANGVLIDGPSQNITLTHCKGDSCNGDNLLDEEAPSKSEFENLNESERIEKYKKDGKSDKFTNLVATAVQANGTNKYVIIYKDKSTSSARVRRSARSRRSLPAEMPLIPVNQADTLIVDGEAVSLTGHSGNIFAPEGNYRYLTYGAEKLSGGSYALSVQGEPAKGEMLAGTAVYNGEVLHFHTENGRSYPTKGRFAAKVDFGSKSVDGIIDSGDDLHMGKQKFKAAIDGNGFKGTWTENGGGDVSGRFYGPAGEEVAGKYSYRPTDAEKGGFGVFAGKKEQD

SEQ ID NO: 27661 - protein, 611 aa, Neisseria meningitidis
MNPTPIHPKLAEITERIIERSRPTREKYLAKIRSAKQMGRLERNQLGCSNLAHGYAAMPKSIKIEMLQETVPNLGIITAYNDMVSAHQPFKDFPDQIKDEAQKNGATAQVAGGTPAMCDGITQGYAGMELSLFSRDVIAMSTAVGLSHQMFDGGLFMGVCDKIVPGLMIGALSFGHIPGIFVPAGPMSSGIGNKEKARTRQLFAEGKVGRDELLKSEMGSYHSPGTCTFYGTANSNQMMMEMMGVHLPAAAFVHPYTDLREALTRYAAGHLARGIKNNTIKPLGEMLTEKSFINALIGLMATGGSTNHTMHLVAMARAAGVILNWDDFDEISSIIPLLIRVYPNGKADVNHFTAAGGLPFVIRELLDAGLLHDDVDTVVGRGMRHYTKEPFLIDGKLEWREAPETSGNDDILRKADNPFSPDGGLRLMKGNIGRGVIKVSAVREGCRIIEAPAIVFNDQREVLAAFERGELERDFVCVVRYQGPRANGMPELHKLTPPLGILQDRGFKVALLTDGRMSGASGKVPASIHMTPEALMGGNIAKIRTGDPIRFDSVTGELNVLIDEAEWNAREVEHIDLGANQQGCGRELFANFRSMTSSAETGAMSFGGEFA

SEQ ID NO: 27662 - protein, 138 aa, Neisseria meningitidis
MYLLDTNVISETRRANRADGNVRAWLNTIDPAEMYTSAIVMMELERGVLGMERKDGQQGGILRRWLEEVVKPTFKDRILPINETTAEICARLHIPDKSPENDAWIAATAKQHGLTLATRNIKDFEHSGVKLINPFETV

SEQ ID NO: 27663 - protein, 245 aa, Neisseria meningitidis; identical to SEQ ID NO: 4045

SEQ ID NO: 27664 - protein, 335 aa, Neisseria meningitidis
MSTFFQQTAQAMIAKHIDRFPLLKLDQVIDWQPIEQYLNRQKTRYLRDHRGRPACPLLSMFKAVLLGQWHSLSDPELEHSLITRIDFNLFCRFDELIIPDYSTLCRYRNWLAQDDTLSELLELINRQLTEKGLKIEKASAAVVDVTIIQTADSKQRQAIEVDEEGQINGQTTPSKDKDARWIKKNGLYKLGYKQHTRTDAEGYIGKLHITPANAHECKHLSPLLEGIAEGTTVYADKGYDSAENRQHLEEHQLLDGIMRKACRNRPLSEVQTKRNRYLSKTRYVVEQSFGTLHRKFRYARAAYFGLIKVSAQSHLKAMCLNLLKAANRLSAPAAA

SEQ ID NO: 27665 - protein, 467 aa, Neisseria meningitidis
MDTTLKTTLTSVAAAFALSACTMIPQYEQPKVEVAETFKNDTADSGIRAVDLGWHDYFADPRLQKLIDIALERNTSLRTAVLNSEIYRKQYMIERNNLLPTLAANANDSRQGSLSGGNVSSSYKVGLGAASYELDLFGRVRSSSEAALQGYFASTANRDAAHLSLIATVAKAYFNERYAEEAMSLAQRVLKTREETYKLSELRYKAGVISAVALRQQEALIESAKADYAHAARSREQARNALATLINQPIPDDLPAGLPLDKQFFVEKLPAGLSSEVLLDRPDIRAAEHALKQANANIGAARAAFFPSIRLTGSVDTHSAELGGLFKSGTGVWSFAPSITLPIFTWGTNKANLDVAKLRQQAQIVAYESAVQSAFQDVANALAAREQLDKAYDALSKQSRASKEALRLVGLRYKHGVSGALDLLDAERSSYSAEGAALSAQLTRAENLADLYKALGGGLKRDTQTDK

SEQ ID NO: 27666 - protein, 581 aa, Neisseria meningitidis; identical to SEQ ID NO: 2972

SEQ ID NO: 27667 - protein, 451 aa, Neisseria meningitidis
MSEYTPQTAKQGLPALAKSTIWMLSFGFLGVQTAFTLQSSQMSRIFQTLGADPHNLGWFFILPPLAGMLVQPIVGHYSDRTWKPRLGGRRLPYLLYGTLIAVIVMILMPNSGSFGFGYASLAALSFGALMIALLDVSSNMAMQPFKMMVGDMVNEEQKGYAYGIQSFLANTGAVLAAILPFVFAYIGLANTAEKGVVPQTVVVAFYVGAALLVITSAFTIFKVKEYDPETYARYHGIDVAANQEKANWIELLKTAPKAFWTVTLVQFFCWFAFQYMWTYSAGAIAENVWHTTDASSVGYQEAGNWYGVLAAVQSVAAVICSFVLAKVPNKYHKAGYFGCLALGALGFFSVFFIGNQYALVLSYTLIGIAWAGIITYPLTIVTNALSGKHMGTYLGLFNGSICMPQIVASLLSFVLFPMLGGLQATMFLVGGVVLLLGAFSVFLIKETHGGV

SEQ ID NO: 27668 - protein, 83 aa, Neisseria meningitidis
LHIGGDITVKTLTAAAFTRFRQQCRLKDTCAVDLSGVGRADSACVSLLLEVLRGCKGSVRLTGIPESVRALSELYEIKDWLKS

SEQ ID NO: 27669 - protein, 121 aa, Neisseria meningitidis
LDYRFGRQYRLLKTDDFSSVFAFRNRRSRDLLQVSRSNGNGLDHPRIGLVVGKKTAKRANERNYMKRVIRDWFRLNKNRLPPQDFVVRVRRKFDRATAKQARAELAQLMFGNPATGCGKQA

SEQ ID NO: 27670 - protein, 154 aa, Neisseria meningitidis; identical to SEQ ID NO: 9513

SEQ ID NO: 27671 - protein, 553 aa, Neisseria meningitidis
MTDNSPPPNGHAQARVRKNNTFLSAVWLVPLIALIAGGWLWVKEIRNRGPVVTLLMDSAEGIEVNNTVIKVLSIDVGRVTRIKLRDDQKGVEVTAQLNADVSGLIRSDTQFWVVKPRIDQSGVTGLGTLLSGSYIAFTPGKSDEAKDVFQVQDIPPVTAIGQSGLRLNLIGKNDRILNVNSPVLYENFMVGQIESAHFDPSDQSVHYTIFIQSPNDKLIHSASRFWLESGINIETTGSGIKLNSAPLPALLSGAISFDSPKTKNSKNVKSEDSFTLYDSRSEVANLPDDRSLYYTAFFKQSVRGLTVGSPVEYKGLNVGVVSDVPYFDRNDSLHLFENGWIPVRIRIEPSRLEINADEQSKEHWKQQFQTALNKGLTATISSNNLLTGSKMIELNDQPSASPKLRPHTVYAGDTVIATRGGGLDDLQVKLADLLDKFDKLPLDKTVAELNGSLTELKSTLKSANAALSSIDKLVGKPQTQNIPNELNQTLKELRQTLQGVSPQSPIYGDVQNTLQSLDKTLKDVQPVINTLKEKPNALIFNSSSKDPIPKGSR

SEQ ID NO: 27672 - protein, 271 aa, Neisseria meningitidis
MTTLKPALPAYLDNIRIILTRTSHPANIGSAARAMKTMGLHKLTIVAPNLMATPMTENPPVFHPDDVQSFVLPEESFILASGAADVLENATIAASLDEALADTTIACALTSRRREITAPLQTPRDLVPELLQAANRGEKVALVFGNETFGLSIEEAQACNRLMTINGNPDYFSLNLAQAVQVVCYEIFSQTDMPMTHLQQEDHAATHEQIKGMVAHMESVMNDIGFFNRRNGERLMRRMQSLFGRANTQTEDIDILRGFFNTVSHRIHKKD

SEQ ID NO: 27673 - protein, 273 aa, Neisseria meningitidis
MMRIFSTGGKMDTQAVITHIVRWLDKYAAQANAKGFVVGVSGGIDSAVVSALAARTGRTTLLLDMPIRQHPDQLERARLHIRNLQGQYANVSAQTVDLTDTFQTFEQTVGVHQTAFDNQPLSLANARSRLRMLTLYYYGQIHGLLVTGTGNKIEDFGVGFFTKYGDGGVDISPIADLTKTQVYRLAEALGVDEAIQKAPPTDGLWDTERTDEEQMGASYPELEWAMGVYGTRKPEDFEGRRREVLEIYTRLHRAMQHKINPIPVCRIPPELLG

SEQ ID NO: 27674 - protein, 330 aa, Neisseria meningitidis
MENVNRIVAEGIAAVEAAQDFNALEQIKARYLGKTGELTGLLKTLGQMSPEERKTIGAHINECKNRFQTAFNAKRDALNEAKLQARLAAEALDITLPGRAQEGGSLHPVTLTLQRVVELFHGMGFEVADGPEIEDDFHNFQALNIPANHPARAMQDTFYVENGDVLRTHTSPIQIRYMLDKKEPPIRIIAPGRVYRVDSDATHSPMFHQAEGLWVEEGVTFADLKAVFTDFIRRFFERDDLQVRFRPSFFPFTEPSAEIDIMGENGKWLEVGGCGMVHPNVLRNVNIDPEKYTGFAFGIGLDRFAMLRYNVNDLRLFFDNDLNFLKQFVK

SEQ ID NO: 27675 - protein, 320 aa, Neisseria meningitidis; identical to SEQ ID NO: 22860

SEQ ID NO: 27676 - protein, 127 aa, Neisseria meningitidis
MTFAYWCILIAYLLPLFCAAYAKKAGGFRFKDNHNPRDFLAHTQGAAARAHAAQQNGFEAFAPFAAAVLTAHATGNAGQATVNTLAGLFILFRLAFIWCYIADKAALRSLMWAGGFACTVGLFVAAA

SEQ ID NO: 27677 - protein, 299 aa, Neisseria meningitidis; identical to SEQ ID NO: 8260

SEQ ID NO: 27678 - protein, 232 aa, Neisseria meningitidis
MKSRHLALGVAALFALAACDSKVQTSVPADSAPAASAAAAPAGLVEGQNYTVLANPIPQQQAGKVEVLEFFGYFCPHCAHLEPVLSKHAKSFKDDMYLRTEHVVWQKEMLTLARLAAAVDMAAAESKDVANSHIFDAMVNQKIKLQNPEVLKKWLGEQTAFDGKKVLAAYESPESQARADKMQELTETFQIDGTPTVIVGGKYKVEFADWESGMHTIDLLADKVREEQKAAQ

SEQ ID NO: 27679 - protein, 89 aa, Neisseria meningitidis; identical to SEQ ID NO: 12045

SEQ ID NO: 27680 - protein, 408 aa, Neisseria meningitidis; identical to SEQ ID NO: 2386

SEQ ID NO: 27681 - protein, 336 aa, Neisseria meningitidis
MLPFFPEPSLSYTQQNRTAVLLLNLGTPDAPTAQAVRPYLKSFLTDRRVVELPKWLWYPILHGLVLTLRPKKSAHAYEKIWFKEGSPLEVYTARQAAALAERMPDLIVRHAMTYGNPSVADVLSELKAQGAGRLLVIPMYPQYAASSSGAAVDKVCEQLLLQRNQMSVRTVSRFYDDTGYIDAMKNHILRYWAEHGRGKKLMLSFHGVPQKHHDLGDPYPDECRHTAKLLAEALELTEDQYVVSFQSQFGRAKWVTPSTQDLFGKLPKQGVTELDVFCPGFLADCLETLEEIALMGREQFYEAGGKSYRYIPCLNDNPDWIDALVALAEENLGGWR

SEQ ID NO: 27682 - protein, 478 aa, Neisseria meningitidis; identical to SEQ ID NO: 4450

SEQ ID NO: 27683 - protein, 161 aa, Neisseria meningitidis; identical to SEQ ID NO: 5494

SEQ ID NO: 27684 - protein, 114 aa, Neisseria meningitidis
MLPNKVLGKYDWNVDGKTGIGAAWVVAAFILPILVWAIFMLSRMQGWLAPTKANPIWALVWLLICLPCLLIASKCLGWQGWRLLANVLACLAVRTLLSVPAALLIAFTLQDLLK

SEQ ID NO: 27685 - protein, 415 aa, Neisseria meningitidis
MLKQTTLLAACASFAALLGGCATQQPAPVIAGNSGMQDTPSSAVYNNPYGATPYSPAPASDAPYVPPVQSAPVYTPPAYVPPSAPAVSGTYIPSYAPVDINAATHTIVRGDTVYNISKRYHISQDDFRAWNGMTDNTLSIGQIVKVKPAGYAAPKAAAVKSRPAVPAAAQPPVQSAPVDINAATHTIVRGDTVYNISKRYHISQDDFRAWNGMTDNMLSIGQIVKVKPAGYAAPKTSAVESRPAVPAAVQTPVKPAAQPPVQSAPQPAAPAAENKAVPAPAPQSPAASPSGTRSVGGIVWQRPTQGKVVADFGGNNKGVDIAGNAGQPVLAAADGKVVYAGSGLRGYGNLVIIQHNSSFLTAYGHNQKLLVGEGQQVKRGQQVALMGNTDASRTQLHFEVRQNGKPVNPNSYIAF

SEQ ID NO: 27686 - protein, 205 aa, Neisseria meningitidis; identical to SEQ ID NO: 721

SEQ ID NO: 27687 - protein, 256 aa, Neisseria meningitidis
MNFTDTHCHLADAALRENLPHILTAARKVGVKRFIVPATCPQDWQSVAELSEMPSEHGQIRIALGIHPWFSDGIAERDCVRLEAMLARYPQAWVGEIGLDFYDKTQTPQQRERQIQVFSRQLEIAQTLRRRVIIHNLKAAADIAAAVKRTGFTWGGIVHAFSGSIEEAHVLAKLGFKIGIGSLLLNPNARKVRDTLKALNDGDFVLETDSPFMLKNTVNTPANILRIAEIAAQIRGTGAAEIAAITERNADSLLRP

SEQ ID NO: 27688 - protein, 140 aa, Neisseria meningitidis; identical to SEQ ID NO: 341

SEQ ID NO: 27689 - protein, 37 aa, Neisseria meningitidis; identical to SEQ ID NO: 3678

SEQ ID NO: 27690 - protein, 266 aa, Neisseria meningitidis; identical to SEQ ID NO: 8298

SEQ ID NO: 27691 - protein, 265 aa, Neisseria meningitidis
MDTAQKQRWAITLSYDGSRFYGWQKQADGVPTVQAALENALAQIAGESVATTVAGRTDTGVHATAQVVHFDTVAVRPQQAWVRGVNAHLPEGIAVLHAQQVAPEFHARFDAYGRHYRYLLESAPVRSPLLKNRAGWTHLKLDIGPMRRAAAYLIGEQDFSSFRAAECQAKSPVKTIYRADLTQSAGLVRLDLHGNAFLHHMVRNIMGALVYVGSGRLSVEGFAALIQERSRLKAPPTFMPDGLYLTGVDYPEAYGIIRPQIPEWL

SEQ ID NO: 27692 - protein, 402 aa, Neisseria meningitidis
MTGIIHSLLDTDLYKFTMLQVVLHQFPQTHSLYEFRCRNASTVYPLADIKEDLEAELDALCRLRFTHDELGYLRSLRFIKSDFVDYLELFQLQRRFVEVGTDDKGRLNIRIEGPMIQAMFFEIFILAIVNELYFRRLETPAVIEEGERRLQAKAARLKEIAAAQNPDDPPFLISDFGTRRRYKLAWQEHVIRTLLEAAPSIVRGTSNVFLAKKLGITPIGTMAHEFLQAFQALDVRLRNFQKAALESWVHEYRGDLGVALTDVVGMDAFLRDFDLYFAKLFDGLRHDSGDPYVWGDKAYAHYQKLKIDSRTKMLTFSDGLDIERSWALHQYFKDRFKTGFGIGTNLTNDMGHTPLNIVLKLVECNGQSVAKLSDSPGKTMTNNSTFLAYLRQVFDVPEPETP

SEQ ID NO: 27693 - protein, 1491 aa, Neisseria meningitidis
MRFTHTTPFCSVLSTLGLFAVSPAYSSIVRNDVDYQYFRDFAENKGAFAVGASNISIQDKQGKILGRVLNGIPMPDFRVSNRQTAIATLIHPQYVNSVKHNVGYGSIQFGNDTQNPEEQAYTYRLVSRNPHPDYDYHLPRLNKLVTEISPAALSSVPLLGNGQPKANAYLDTDRFPYFVRLGSGTQQVRKADGTRTQTAPAYQYLTGGTPLKVLGFQNHGLLVGGSLTDQPLNTYAIAGDSGSPLFAFDKHENRWVLAGVLSTYAGFDSFFNKYIVTQPEFIRSTIRQYETRLDVGLTTNELIWRDNGNGDSTLQGLNERITLPIANPSLAPQNDSRHMPSEDAGKTLILSSRFDNKTLMLADNINQGAGALQFDSNFTVVGKNHTWQGAGVIVADGKRVFWQVSNPKGDRLSKLGAGTLIANGQGINQGDISIGEGTVVLAQKAASDGSKQAFNQVGITSGRGTAVLADSQQIKPENLYFGFRGGRLDLNGNNLAFTHIRHADGGAQIVNHNPDQAATLTLTGNPVLSPEHVEWVQWGNRPQGNAAVYEYINPHRNRRTDYFILKPGGNPREFFPLNMENSTSWQFIGNNRQQAAKQVAQAENARPDLITFGGYLGENAQTGKAAPSYSKTNIEWVNGPNTPHKPSPYTNTPTRTGAGVPTITASKKAATPAPTSHGMPTAPKTGNFSDMTGEAAIEKTRHIANAAVYGRPEYRYNGALNLHYRPKRTDSTLLLNGGMNLNGEVLIEGGNMIVSGRPVPHAYDHQAKREPVLENEWTDGSFKAARFTLRNHARLTAGRNTAHLDGDITAYDLSGIDLGFIQGKTPECYRSYHSGSTHCTPNAVLKAENYRALPATQVRGDITLNDRSELRLGKAHLYGSIRAGKDTAVRMEADSNWTLSQSSHTGALTLDGAQITLNPDFANNTHNNRFNTLTVNGTLDGFGTFRFLTGIVRKQNAPPLKLEGDSRGAFQIHVKNTGQEPQTTESLALVSLNPKHSHQARFTLQNGYADLGAYRYILRKNNNGYSLYNPLKEAELQIEATRAEHERNQQAYNQLQATDISRQVQHDSDATRQALQAWQNSQTELARIDSQVQYLSAQLKQTDPLTGILTRAQNLCAAQGYSVDICRQVAKAADTNDLTLFETELDTYIERVEMAESELDKARQGGDAQAVETARHAYLNALNRLSRQIHSLKTGVAGIRMPNLAELISRSANTAVSEQAAYNTGRQQAGRRIDRHLTDPQQQNIWLETGTQQTDYHSGTHRPYQQTTNYAHIGIQTGITDRLSVGTILTDERTNNRFDEGVSARNRSNGAHLFVKGENGALFAAADLGYSNSRTRFTDYDGAAVRRHAWDAGINTGIKIDTGINLRPYAGIRINRSNGNRYVLDGAEINSPAQIQTTWHAGIRLDKTVELGQAKLTPAFSSDYYHTRQNSGSALSVNDRTLLQQAAHGTLHTLQIDAGYKGWNAKLHAAYGKDSNTARHKQAGIKIGYNW

SEQ ID NO: 27694 - protein, 124 aa, Neisseria meningitidis; identical to SEQ ID NO: 2472

SEQ ID NO: 27695 - protein, 473 aa, Neisseria meningitidis; identical to SEQ ID NO: 19022

SEQ ID NO: 27696 - protein, 706 aa, Neisseria meningitidis
MAYQVLARKWRPKTFSDLVGQEHVVKALQNALDEGRLHHAYLLTGTRGVGKTTIARILAKSLNCENAQHGEPCGVCESCTQIDAGRYVDLLEIDAASNTGIDNIREVLENAQYAPTAGKYKVYIIDEVHMLSKSAFNAMLKTLEEPPEHVKFILATTDPHKVPVTVLSRCLQFVLRNMTAQQVADHLAHVLDSEKIAYEPVALQLLGRAAAGSMRDALSLLDQAIALGSGKVAENDVRQMIGAVDKQYLYELLTGIINQDGAALLSKAQEMAACAVGFDNALGELAILLQHLALIQAVPSALAHYDPDSDILHRLAQTISGEQIQLYYQIAVHGKRDLSLAPDEYAGFMMTLLRMLAFAPLAAASCDANAVIENTELKSPSAQTAEKETAAKKPQPRPEAETTQTPVQTASAAAMPSEGKAAEPVSNQENNDVPPWEDAPDEAQAAAGTAQTSAKSIQTASEAETSPDNQVSKNKAADNETETSLSEVPSENPIQATPNDEAVETEAFAHEAPAEPFYGYGFPDNDCPPEDGAEIPPPDWEHAAPADAEEENNADEGSNDENNTPSAPPPEFSTENWAAIVRHFARKLGAAQMPAQHSAWTEYHPDTGLMVLAMTAEARATADKKRLDKIRDTLAQAYGLQLTLQTQDWHDESGRETPAMQDKRVQAEDRQKAQALLEADPAAQKILQAFGAQWQPESLELAANRP

SEQ ID NO: 27697 - protein, 117 aa, Neisseria meningitidis; identical to SEQ ID NO: 14752

SEQ ID NO: 27698 - protein, 512 aa, Neisseria meningitidis
MVSKLDKYWQHPALYWPLLILFAAATPFTFAPYYHFWLMPLIFGAFVRLIELRPRFAVSSAYLFGLTAYTTQFYWIHTALHDVSGLPDLYAVPLTFLLPAYLALYPALCFWLWKKFTLPRGIKIGLVLPILWTLTEFARERFLTGFGWGAIGYSQITPDSPLAGFAPLGGIHMVTLATAFLGVWLVLASDNTTRSGKRLLPIILIAALLAAGYTARQTDFTRPDGSRSTVALLQGNIDQTLKWREDQVIPTIQKYYEQVGKTTADIVILPETAIPVMRQNLPENILAKFAEQAQNNGSALAVGISQYTSDGNGYENAVINLTGYQENNQDGIPYYAKNHLVPFGEYKPLPFLTTPLYKMMNMPLSDFRKGGSKQSALLMKNQKIAFNICYEDGFGDELIAAAKDATLLANASNMAWYGKSNAMYQHLQQSQARAMELGRYMVRATNTGATAIISPKGNIIAQAQPDTETVLEGHIKGYVGETPYMKTGSSWWLMGILTLAALILFIFRNKEH

SEQ ID NO: 27699 - protein, 355 aa, Neisseria meningitidis; identical to SEQ ID NO: 1236

SEQ ID NO: 27700 - protein, 371 aa, Neisseria meningitidis
MKIVIAPDSFKESLTAQQVAEAIKRGFQQSIADVECLLCPVGDGGEGTVDAIRHSLDLEEKCLQVTGPFGQKEVMRYFQKEQLALFEVADLVGLGKIPLEKRNPLQIQTRGIGELIRHLISQEIKEIYIGVGGTASNDGGIGIAAGLGYQFYDEDGNTLPACGQALLNLASVSTENRYEIPEDVHIRILADVVSPLCGHQGATYTFGKQKGLDSTMFEAVDQAIQDFYEKVSPATLKLKGAGAGGGIAGGLCAFAQASIVSGIDTCLDLIDFDKKVSDVDLVIVGEGRLDRQSLAGKAPIGVAKRTPVGVPVVAICGSLVEDLPSLPFENIQAAFSILEKSEPLEDSLKNASLYLEHTASNIGHLLNMPKI

SEQ ID NO: 27701 - protein, 166 aa, Neisseria meningitidis; identical to SEQ ID NO: 987

SEQ ID NO: 27702 - protein, 74 aa, Neisseria meningitidis
MDAVQELERRIVELEIQSALQEDVIARLNAMVAELRQTLDLQQAQLRLLYQKMQDRNPDAQEPYSLRDEIPPHY

SEQ ID NO: 27703 - protein, 169 aa, Neisseria meningitidis; identical to SEQ ID NO: 24439

SEQ ID NO: 27704 - protein, 330 aa, Neisseria meningitidis
MQSAGIQVLAGIDYEPSCKETYEANINAKFIQADVFELQPETLEKELGLKKNDDDLILIGCSPCQYWSVIQTDKRKSEKSKSLLLEFQRFVEYFNPGYVVVENVPGILSRMKESGLDNFIKLLEEKGFTVHFGIHNTADYGIPQSRKRFTLIANRITEEKLEPAKYSGKRLTVRDVLGMENGFPKIIAGHQDETDFMHSCAGLSDINLKRLALIPKNGGNRLAFAHIPELQLECFIGKDNSFKDTFGRLWWDKPAPTITTKFFSISNGRFAHPEEDRALSLREGATLQSFPRNYVFKAGSRDKIARLIGNAVPPMYAEKIGRAIVDNIEC

SEQ ID NO: 27705 - protein, 204 aa, Neisseria meningitidis; identical to SEQ ID NO: 504

SEQ ID NO: 27706 - protein, 314 aa, Neisseria meningitidis
MHLCGKYYGVNMKLRDLLMGIFLAVSAALLNATIGIFSKILMEQGLSVQHIAFLKTLTGFVFISILLCRTGFTRQIADISRKKEAILPLLLKVAICAFFGIYTLFFFETTAYQYGNAANVVVVLMASAAVSALILDSILLDERICISSVVGVGLAVLGIAMISWTGEGSLGLILNAALAGSGYGCFSVLIKKFGLNGGIYLTRILMFFGSIFLFIPSLEGIEDIHWQWSFIPPLLALSLLPTILGFYCTTKALDYLSAAKVQVTELAEPLFAAVLAWLFLNEIPEGRFFVGAILIIAGIVSINGLYRPLLKRIE

SEQ ID NO: 27707 - protein, 176 aa, Neisseria meningitidis; identical to SEQ ID NO: 1829

SEQ ID NO: 27708 - protein, 115 aa, Neisseria meningitidis; identical to SEQ ID NO: 3528

SEQ ID NO: 27709 - protein, 157 aa, Neisseria meningitidis
MQVTKNFSLRELTRSETARRAGVPNEPSPAEMDNIYYTAQQLEKIREYVGRPIIVTSCLRSERVNKLVGGSPTSAHRHGLAADCDASGMTSLAFAKLLIKMRDEGALKFDQLILEFPERGDGAWVHIGFRRNSPQRNQILTATKKNGKTVYLPGLHP

SEQ ID NO: 27710 - protein, 199 aa, Neisseria meningitidis; identical to SEQ ID NO: 3649

SEQ ID NO: 27711 - protein, 384 aa, Neisseria meningitidis
MKFIDEAKIEVAAGKGGNGATSFRREKFVPRGGPDGGDGGKGGSVWAEADENTNTLVEYRFVKRYQAKNGEKGHGSDRYGAGADDIVLKMPVGTLIRDLDTDEIVADLTYHGQRVCLAKGGKGGLGNIHFKSSVNRAPKQSTPGEEGEARSLQLELKVLADVGLLGMPNAGKSTLITAVSAARPKIANYPFTTLHPNLGVVRIDENHSFVMADIPGLIEGAAEGAGLGHRFLKHLSRTGLLLHVVDLAPFDETVNPAEEALAIINELRKYDEELYGKPRWLVLNKLDMLDEEEARARTAAFLEAVGWDYPKPDDRFQFDMETPRLFQISALTHQGTRELVHQINQYLTEKKRIEAEKAEAEQAAAKAEIAEQQPKTDTGVFKPE

SEQ ID NO: 27712 - protein, 735 aa, Neisseria meningitidis
MFPDQSAPNLLQGLNPEQLSAVTWPPQSALVLAGAGSGKTRVLTTRIAWLLQTGQASVHSIMAVTFTNKAAKEMQTRLGAMIPVDVRAMWLGTFHGLCHRFLRLHHRDAGLPSSFQILDSGDQLSLIKRLLKSLNIAEEIIAPRSLQGFINAQKESGLRASVLSAPDPHTRRMIECYAEYDKICQREGVVDFAELMLRSYEMLQSNEILRQHYQNRFNHILVDEFQDTNKLQYAWLKLMAGGNAAVFAVGDDDQSIYRFRGANVGNMTALMEEFHIDAPVKLEQNYRSVGNILAAANAVIENNDERLGKNLRTDAEAGDKIRYYSAFTDLEEARFIVDETKALEREGWDLDEIAVLYRSNAQSRVIEQSLFRSGIPYKIYGGLRFYERQEIKHALAYLRLAVNPDDDNALLRVINFPPRGIGARTVENLQTASNEQGITLWQAACNAGAKAAKVVAFVRLIEALRNQVGQLSLSEIIVGILKDSGLTEHYRTQKGDNQDRLDNLDELVNAAIEFKPEDSNFEILPENISDDPAFPILAFLSNATLESGENQAGAGEKAVQLMTVHAAKGLEFNAVFLTGMEEGRFPSEMSLAERGGLEEERRLMYVAITRARKRLYITMAQQRMLHGQTQFGIVSRFVEEIPPEVLHYLSVKKPAYDSYGNTRQTAASKDKIIDDYKQPQTYAGFRIGQNVRHAKFGTGVIIDAADKGESARLTINFGKQGVKELDTKFAKLEEM

SEQ ID NO: 27713 - protein, 283 aa, Neisseria meningitidis; identical to SEQ ID NO: 9103

SEQ ID NO: 27714 - protein, 641 aa, Neisseria meningitidis
MQLLAAEGIHQHQLNVQKSTRFIGIKVGKSNYSKNELNETKLPVRVIAQTAKTRSGWDTVLEGTEFKTTLSGADIQAGVGEKARADAKIILKGIVNRIQTEEKLESNSTVWQKQAGSGSTVETLKLPSFEGPALPKLTAPGGYIADIPKGNLKTEIEKLAKQPEYAYLKQLQTVKDVNWNQVQLAYDKWDYKQEGLTGAGAAIIALAVAAVTGGVGAGLIGAAQGTASAAVADAAFTALVSQASISLINNKGNIGNTLKELGRSRTVKNLVVAAATAGVADKIGASALNNVSDKQWINNLTVNLANAGSAALINTAVNGGSLKDNLEANILAALVNTAHGEAASKIKQLDQHYIAHKIAHAIAGCAAAAANKGKCQDGAIGAAVGEILGETLLDGRDPGSLNVKGRAKIIAKAKLAAGAVAALSKGDVSTAANAAAVAVENNSLNDIQDRLLSGNYALCMSAGGAESFCESYRPLGLPHFVSVSGEMKLPNKFGNRMVNGKLIINTRNGNVYFSVGKIWSTVKSTKSNISGVSVGWVLNVSPNDYLKEASMNDFRNSNQNKAYAEMISQTLVGESVGGSLCLTRACFSVSSTISKSKSPFKDSKIIGEIGLGSGVAAGVEKTIYIGNIKDIDKFISANIKK

SEQ ID NO: 27715 - protein, 262 aa, Neisseria meningitidis; identical to SEQ ID NO: 3640

SEQ ID NO: 27716 - protein, 40 aa, Neisseria meningitidis; identical to SEQ ID NO: 14736

SEQ ID NO: 27717 - protein, 458 aa, Neisseria meningitidis
MKHIHIIGIGGTFMGGIAAIAKEAGFEVSGCDAKMYPPMSTQLEALGIDVYEGFDAAQLDEFKADVYVIGNVAKRGMDVVEAILNLGLPYISGPQWLAENVLHHHWVLGVAGTHGKTTIASMLAWVLEYAGLAPGFLIGGVPENFGVSARLPQTPRQDPNSQSPFFVIEADEYDTAFFDKRSKFVHYRPRTAVLNNLEFDHADIFADLGAIQTQFHHLVRTVPSEGLIVCNGQQQSLQDTLDKGCWTPVEKFGTEHGWQAGEANADGSFDVLLDGKKAGHVAWSLMGGHNRMNALAVIAAARHAGVDIQTACEALSTFKNVKRRMEIKGTVNGITVYDDFAHHPTAIETTIEGLRQRVGNARILAVLEPRSNTMKLGTMKSALPESLKEADQVFCYAGGVDWNVAEALAPLGGRLHVGKDFDAFVAEIVKNARTGDHILVMSNGGFGGIHTKLLDALR

SEQ ID NO: 27718 - protein, 152 aa, Neisseria meningitidis
VRNNGGNRFGGVPYGNMAVEHYRIVAKEDGTILGADAYGPPKADDVLVLGVLEQGFRLDDAQIIVKTGMASGVTADVGFVYADGADDANVPQDAAYFASAADFASAARIRCQSAKLVTLPKQALLTVTLKGADSKAAADIDILIYGEKFGQL

SEQ ID NO: 27719 - protein, 415 aa, Neisseria meningitidis
MFSLEAWIGLRYLRAKKRNGFMSFITMVSIAGIALGVTALIVVLSVMNGFQKEIRGQLLNVAPHAEIGYIDNTDTDWRNLLRFTENRKGILAAAPYVSNQALLANAGEIRGVQMRGILPSEERKVVEYGDKMPAGKFEDLIPGEFDIILGVGLAEALGAEVGNKVTVITPEGNVTPAGVVPRLKQFTVVGLVKTGVYEVDNSLAMTHIQDARVLYRLDKEVAGLRLKLADPQNAPALTAKLIPEAQRDAVWVRDWTYNNRSYFEAVELEKRMMFIILTLIIAVAAFNLVSSLVMAVTEKQADIAILRTLGLSPGGVMKIFMVQGAFSGFFGTLAGVVCGVLLGWNVGRVVAFFENLLGVHLINSQVYFIDYLPSDVDMGDVALIACISLGLSFVATLYPSRRASKTQPAEALRYE

SEQ ID NO: 27720 - protein, 157 aa, Neisseria meningitidis
MLSAESLKQIDIELAKYPADQRRSAIMGALRIAQTEKGWLAPETIAFVADYIGISPAQAYEVATFYNMYDLEPVGKYKLTVCTNLPCALRGGVNAADYLKQKLGIGFGETTPDGKFTLVEGECMGACGDAPVMLVNNHSMCSFMTEEVIEKKLAELE

SEQ ID NO: 27721 - protein, 280 aa, Neisseria meningitidis
MIQHAGLGYRRDLAEDFLSLSENSPICFIEAAPENWLKMGGWARKQFDRVAERLPLALHGLSMSLGGQAPLDTDLIDGIKEMMRRYDCTFFSDHLSYCHDGGHLYDLLPLPFTEEMVHHTARRIREVQDRLGCRIAVENTSYYLHSPLAEMNEVEFLNAVAREADCGIHLDVNNIYVNAVNHGLLSPEAFLENVDAERVCYIHIAGHDVETPELLIDTHGAAVLPTVWDLLELAYAKLPTIPPTLLERDFNFPPFAELEAEVAKIADYQTRAGKECRRAA

SEQ ID NO: 27722 - protein, 415 aa, Neisseria meningitidis
MQLTAVGLNHQTAPLSIREKLAFAAACLPEAVRNLARSNAATEAVILSTCNRTELYCVGDSEEIIRWLADYHSLPIEEISPYLYTLGMQETVRHAFRVACGLDSMVLGEPQILGQIKDAVRVAQEQESMGKKLNALFQKTFSVAKEVRTDTAVGENSVSMASASVKLAEQIFPDIGDLNVLFIGAGEMIELVATYFAAKSPRLMTVANRTLARAQELCDKLGVNAEPCLLSDLPAILHEYDVVVSSTASQLPIVGKGMVERALKQRQSMPLFMLDLAVPRDIEAEVGDLNDAYLYTVDDMVNIVQSGKEARQKAAAAAETLVSEKVAEFVRQQQGRQSVPLIKALRDEGEKARKQVLENAMKQLAKGATAEEVLERLSVQLTNKLLHSPTQTLNKAGEEDKDLVHAVAQIYHLDK

SEQ ID NO: 27723 - protein, 233 aa, Neisseria meningitidis
LRRQFAASDACRTGLKEGEIMGLGMEIGKLIVAFLVLINPFSALSLYLDLTNGHSRKVARTAAVAVFAVIAVFALIGGTLLKVLGISVGSFQVGGGILVLLIAISMMNGNDNPAKQNLGAQPETGQVRPARNAGAIAVVPIAIPITIGPGGISTVIIYASAAKTYSDIALIIVAGLVVSAICYAILIVAGKVSRLLGATGLTILNRIMGMMLAAVSVEIIVSGLKTIFPQLAG

SEQ ID NO: 27724 - protein, 868 aa, Neisseria meningitidis
MAANQRYRKPLPGTDLEYYDARAACEDIKPGSYDKLPYTSRILAENLVNRADKVDLPTLQSWLGQLIEGKQEIDFPWYPARVVCHDILGQTALVDLAGLRDAIAEKGGDPAKVNPVVQTQLIVDHSLAVECGGYDPDAFRKNRQIEDRRNEDRFHFINWTKTAFENVDVIPAGNGIMHQINLEKMSPVVQVKNGVAFPDTCVGTDSHTPHVDALGVISVGVGGLEAETVMLGRASMMRLPDIVGVELNGKRQAGITATDIVLALTEFLRKERVVGAFVEFFGEGARSLSIGDRATISNMTPEFGATAAMFAIDEQTIDYLKLTGRDDAQVKLVETYAKTAGLWADALKTAVYPRVLKFDLSSVTRNMAGPSNPHARFATADLASKGLAKPYEEPSDGQMPDGAVIIAAITSCTNTSNPRNVVAAALLARNANCFGLKRKPWVKTSFAPGSKVAEIYLKEAGLLPEMEKLGFGIVAFACTTCNGMSGALDPKIQKEIIDRDLYATAVLSGNRNFDGRVHPYAKQAFLASPPLVVAYALAGSIRFDIENDVLGVADGKEIRLKDIWPADEEIDAVVAEYVKPQQFRDVYVPMFDTGTAQKAPSPLYDWRPMSTYIRRPPYWEGALAGERTLRGMRPLAILPDNITTDHLSPSNAILAVSAAGEYLAKMGLPEEDFNSYATHRGDHLTAQRATFANPKLFNEMVKNEDGSVRQGSFARVEPEGETMRMWEAIETYMNRKQPLIIIAGADYGQGSSRDWAAKGVRLAGVEAIVAEGFERIHRTNLIGMGVLPLQFKPDTNRHTLQLDGTETYDVVGERTPRCDLTLVIHRKNGETVEVPVTCRLDTAEEVLVYEAGGVLQRFAQDFLEGNAA

SEQ ID NO: 27725 - protein, 90 aa, Neisseria meningitidis
MKQTVKWLAAALIALGLNQAVWADDVSDFRENLQAAAQGNAAAQYNLGAMYYKGRGVRQDLVLAQEWLGKACQNGDQDGCDNDQRLKAGY

SEQ ID NO: 27726 - protein, 422 aa, Neisseria meningitidis
VKPLRRLTNLLAACAVAVAAFGQPALAADLAQDPFITDNAQRQHYEPGGKYHLFGDPRGSVSDRTGKINVIQDYTHQMGNLLIQQANINGTIGYHTRFSGHGHEEHAPFDNHAADSASKEQGNVDEGFTVYRLNWEGHEHHPADAYDGPKGGNYPKPTGARDEYTYHVNGTARSIKLNPTDTRSIRQRISDNYNNLGSNFSDRADEANRKMFEHNAKLDRWGNSMEFINGVAAGALNPFISAGEAVDQWMQENPNAAETVETLVNVLPFAKVKNLTKAAKPGKAAVSGDFSDSYKHNTASRLSQSVDGEMFQTRNVDFKAKSIGTKIHDGAQGKHISGHRNYIEGKSTLNQNINPQELLNGIHSGAYPVISKGARGNPVVDFGYPIGSDGKSGLSTNFGTIHSGKNGVHIVPANPKTIKKVQ

SEQ ID NO: 27727 - protein, 525 aa, Neisseria meningitidis
MRANPKTQAMPSETISLMKTRSLISLLCLLLCSCSSWLPPLEERTESRHFNTSKPVRLDNILQIRHTPHTNGLSDIYLLNDPHEAFAARAALIESAEHSLDLQYYIWRNDISGRLLFNLVYLAAERGVRVRLLLDDNNTRGLDDLLLALDSHPNIEVRLFNPFVFRKWRALGYLTDFPRLNRRMHNKSFTADNRATILGGRNIGDEYFKVGEDTVFADLDILATGSVVGEVSHDFDRYWASHSAHNATRIIRSGNIGKGLQALGYNDETSRHALLRYRETVEQSPLYQKIQAGRIDWQSVQTRLISDDPAKGLDRDRRKPPIAGRLQDALKQPEKSVYLVSPYFVPTKSGTDALAKLVQDGIDVTVLTNSLQATDVAAVHSGYVKYRKPLLKAGIKLYELQPNHAVPATKDKGLTGSSVTSLHAKTFIVDGKRIFIGSFNLDPRSARLNTEMGVVIESPKIAEQMERTLADTTPEYAYRVTLDRHNRLQWHDPATRKTYPNEPEAKLWKRIAAKILSLLPIESLL

SEQ ID NO: 27728 - protein, 256 aa, Neisseria meningitidis
MTTTEHDNDDAFLLRYSRHILLDEIGIERQQKLSDAHILVVGCGGLGAAALPYLAASGVGTLTIADFDTVELHNLQRQVAFDEGDVGKLKTEALADRLHHINHTVDVRTVNEKLDSGRLTGLVQTADIVLDCCDNYATRQAVNRACVQTKTPLVSGAAVRFEGQLAVYRPDLPDSPCYACLFDGGSASDGICSLFGVFSPLVGIIGCTQAAEALKILLDAGEPSHGRLAVYRALEGGWRYFDLPRNPECPVCGAAR

SEQ ID NO: 27729 - protein, 2503 aa, Neisseria meningitidis
VVAVAETTKREGKSCADSDSGSAHVKSVPFGTTHAPVCRSNIFSFSLLGFSLCLAVGTANIAFADGIIADKAAPKTQQATILQTGNGIPQVNIQTPTSAGVSVNQYAQFDVGNRGAILNNSRSNTQTQLGGWIQGNPWLARGEARVVVNQINSSHSSQMNGYIEVGGRRAEVVIANPAGIAVNGGGFINASRATLTTGQPQYQAGDLSGFKIRQGNVVIAGHGLDARDTDFTQILSHAVKIDGPVWGKDVRVVAGQNDVVATGNAHSPILNNAAANTSNNTANNGTHIPLFAIDTGKLGGMYANKITLISTAEQAGIRNQGQLFASSGNVAIDANGRLVNSGTMAAANAKDTDNTAEHKVNIRSQGVENSGTAVSQQGTQIHSQSIQNTGTLLSSGEILIHNSGSLKNETSGTIEAARLAIDTDTLNNQGKLSQTGSQKLHIDAQGKMDNRGRMGLQDTAPTASNGSSNQTGNSYNASFHSSTTTPTTATGTGTATVSISNITAPTFADGTIRTHGALDNSGSIIANGQTDVSAQQGLNNAGQIDIHQLNAKGSAFDNHNGTIISDAVHIQAGSLNNQNGNITTRQQLEIETDQLDNAHGKLLSAEIADLAVSGSLNNQNGEIATNQQLIIHDGQQSTAVIDNTNGTIQSGRDVAIQAKSLSNNGTLAADNKLDIALQDDFYVERNIVAGNELSLSTRGSLKNSHTLQAGKRIRIKANNLDNAAQGNIQSGGATDIGTQHNLTNRGLIDGQQTKIQAGQMNNIGTGRIYGDNIAIAATRLDNQDENGTGAAIAARENLNLGIGQLNNRENSLIYSGNDMAVGGALDTNGQATGKAQRIHNAGATIEAAGKMRLGVEKLHNTNEHLKTQLVETGREHIVDYEAFGRHELLREGTQHELGWSVYNDESDHLRTPDGAAHENWHKYDYEKVTQKTQVTQTAPAKIISGNDLTIDGKEVFNTDSQIIAGGNLLVQTEKDGLHNEQTFGEKKVFSENGKLHSYWREKHKGRDSTGHSEQNYTLPEEITRNISLGSFAYESHRKALSHHAPSQGTELPQSNGISLPYTSNSFTPLPSSSLYIINPVNKGYLVETDPRFANYRQWLGSDYMLDSLKLDPNNLHKRLGDGYYEQRLINEQIAELTGHRRLDGYQNDEEQFKALMDNGATAARSMNLSVGIALSAEQVAQLTSDIVWLVQKEVKLPDGGTQTVLVPQVYVRVKNGDIDGKGALLSGSNTQINVSGSLKNSGTIAGRNALIINTDTLDNIGGRIHAQKSAVTATQDINNIGGILSVEQTLLLNAGNNINSQSTAASSQNTQGSSTYLDRMAGIYITGKEKGVLAAQAGKDINIIAGQISNQSEQGQTRLQAGRDINLDTVQTSKHQATHFDADNHVIRGSTNEVGSSIQTKGDVTLLSGNNLNAKAAEVSSANGTLAVSAKNDINISAGINTTHVDDASKHTGRSGGGNKLIITDKAQSHNETAQSSTFEGKQVVLQAGNDANILGSNVISDNGTRIQAGNHVRIGTTQTQSQSETYHQTQKSGLMSAGIGFTIGSKTNTQENQSQSNEHTGSTVGSLKGDTTIVAGKHYEQIGSTVSSPEGNNIIHAQSIDIQAAHNKLNSNTTQTYEQKGLTVAFSSPVTDLAQQAIAVAQSSKQVGQSKNGRVNAMAAANAGWQAYQTGKSAQNLANGTTNAKQVSISITYGEQQNRQTTQVQASQAQASQIQAGGKTTLIATGAAEQSNINIAGSDIAGKAGTILIADNDITLQSAEQSNTERSQNKSTGWNAGAAVSFGQGGWSLGVTAGGNVGKGYGNGDSVTHRHSHIGDKGSQTLIQSGGDTTIKGAQVRGKGVQVNAKNLSIQSVQDSETYQSKQQNASAQVTVGYGFSASGDYSQSKIRANHASVTEQSGIYAGEDGYQIKVGNHTDLKGGIITSTQSAGDKGKNRFQTATLTHSDIKNHSQYKGESFGLGASASISGKTLGQGAQNKPQNKHLTSVADKNGASSSVGYGSDSDSQSSITKSGINTQNIQITDEAAQIRLTGKTAAQTKADIGTNVTTDTAERHSGSLKNTFNREAVQNELDLQREVTQEFDKTRQGVKQELYAVVDSKRAQATQERLKNGGYDNDKSRALNKEANELDEKIRWLDAGLGLVWGAGSSDMAWSMFATTQADRAVRSATAPKEMWFHKKIIDEKTGKVSFDTRQIWSLNDLSKEELASIQDTNGKVITVSNPGIFNNREDSLSNAAKQNRNSTNGSGVIAVMNPPTGKYKSDSNNKIKDFLWLSSSLVSELMYVGYDQLNNKVFQGYLPKTNSEKLNQDIYREVQKMGNGWSVDTSNHSRGGITASVSLKDWVNNQKQNGIAPIRKARFYGTATNVQNDYADVLQKNGYTYTGADGKTYNSGAYSIVHDKDFVGNKWIPFLLGNNETTKGACKGFCYSHSSYFAEVPEQYKRDKNGNFVTDNEGNKIETKDWDSYTKIWGIPKKGTDGKDINHAIPKLVNPNKPNGEKYEENPF

SEQ ID NO: 27730 - protein, 288 aa, Neisseria meningitidis; identical to SEQ ID NO: 26321

SEQ ID NO: 27731 - protein, 185 aa, Neisseria meningitidis
MENNKAKSDDNSVSIEFIQDFITASTDVINLSYENFRKNFYTQMSTDSTNYAAKHESLGKSVQRELQKTQSQLRQVVRKMQSKYNINNKARVAEISLLRQMQSQFSRKDVNKNLGNGNTLAKQGSYTKKDGTTAQAGDSLLAADNLHSLLTDKMLSISHVRENTISPFVLGCLKQITINVSHYLK

SEQ ID NO: 27732 - protein, 407 aa, Neisseria meningitidis; identical to SEQ ID NO: 12938

SEQ ID NO: 27733 - protein, 71 aa, Neisseria meningitidis; identical to SEQ ID NO: 3375

SEQ ID NO: 27734 - protein, 484 aa, Neisseria meningitidis; identical to SEQ ID NO: 18202

SEQ ID NO: 27735 - protein, 356 aa, Neisseria meningitidis
MTKHIAILRGDGIGPEIVAETVRVLDKLIAQGLDAGYEYAPLGGEAYDEYGHPYPEFTQNLCRKADAVLLGAVGSPQYDNLDRPLRPERGLLAIRKDLNLFANLRPAILYPELANASTLKPEIVAGLDILIVRELTGDIYFGEPRGIRVLENGEREGYNTMKYSESEIRRIAHVAFQSAQKRSKKVCSVGKANVLETTELWREIFEEIGKQYPDVELSHMYVDNAAMQLVRAPKQFDVIATGNIFGDILSDEASMLTGSIGMLPSASLDENGKGLYEPSHGSAPDIAGQNKANPLATILSLAMLLRYSLNDEARAQQVENAVQKVLQQGLRTGDIYEEGTKLVSCSEMGDAVLAAL

SEQ ID NO: 27736 - protein, 602 aa, Neisseria meningitidis; identical to SEQ ID NO: 9493

SEQ ID NO: 27737 - protein, 116 aa, Neisseria meningitidis; identical to SEQ ID NO: 5541

SEQ ID NO: 27738 - protein, 138 aa, Neisseria meningitidis; identical to SEQ ID NO: 4969

SEQ ID NO: 27739 - protein, 212 aa, Neisseria meningitidis
MKKINVAPENPQYRIVEIFESLQGEGWNTGMPAVFVRLGKCNLACGWCDTDYLTFGMMSLSDILGCLKTYAARNIIITGGEPTIQPHLDMLLDMLKAEGYFLCIETNGLNPAPPQIDYVATSPKACYAAKYEKSCIETADEVRIVADGDVLAFCENMERKIRAHHYYLSPCEQDGAMNIYDTIRQIGILNSRPDAPVHWQLSVQTHKWAGIE

SEQ ID NO: 27740 - protein, 343 aa, Neisseria meningitidis
MGIKVAINGYGRIGRQVLRAIYDYQIQDQLQIVAVNASGSLETNAHLTKFDTVHGRFEADVSHDGGNLIVNGDKIPFFSTRNPAELPWKELGVDLVMECTGAFTSKEKAKVHLESGAKKVLISAPGGDDVDATVVYGVNDSVLTADMTVVSNASCTTNCLSPVAKVLSESVGIVKGAMTTIHALTNDQTVTDVRHKDLRRARSGVENMIPTKTGAAKAVGLVLPELKDKLDGLAIRVPTVNVSLVDLNFQAARDTTIEEINALMKAASEAGALKGVLGYNTLPLVSMDFNHTTEASHFDATLTKVVDGNMIKVFAWYDNEWGFSCQMLNTARRMFGLEVRPLK

SEQ ID NO: 27741 - protein, 209 aa, Neisseria meningitidis
MAAHLEEQQELDNFKYFWKTTGKWLFAVLILAALGYLGYTVYQNRAASQNQEAAAVLANIVEKAQNKAPQNEINAELTKLQQSYPHSISAAQATLMAAATEFDAQRYDVAEGHLKWVLSNQKDSLIQALAAQRLGVVLLQQKKYDAALAALDTPVEADFAPLLMETKGDVYAAQGKSQEALKNYGQALEKMPQDSVGRELVQMKLDSLK

SEQ ID NO: 27742 - protein, 407 aa, Neisseria meningitidis
MSGNASSLSSSSAIGLIWFGAAVSIAEISTGTLLAPLGWQRGLAALLLGHAVGGALFFAAAYIGALTGRSSMESVRLSFGKRGSVLFSVANMLQLAGWTAVMIYAGATVSSALGKVLWDGESFVWWALANGALIVLWLVFGARKTGGLKTVSMLLMLLAVLWLSAEVFSTAGSTAAQVSDGMSFGTAVELSAVMPLSWLPLAADYTRQARRPFAATLTATLAYTLTGCWMYALGLAAALFTGETDVAKILLGAGLGAAGILAVVLSTVTTTFLDAYSAGVSANNISARFAETPVAVGVTLIGTVLAVMLPVTEYENFLLLIGSVFAPMAAVLIADFFVLKRREEIEGFDFAGLVLWLAGFILYRFLLSSGWESSIGLTAPVMSAVAIATVSVRLFFKKTQSLQRNPS

SEQ ID NO: 27743 - protein, 213 aa, Neisseria meningitidis; identical to SEQ ID NO: 5657

SEQ ID NO: 27744 - protein, 348 aa, Neisseria meningitidis; identical to SEQ ID NO: 10439

SEQ ID NO: 27745 - protein, 334 aa, Neisseria meningitidis; identical to SEQ ID NO: 6545

SEQ ID NO: 27746 - protein, 190 aa, Neisseria meningitidis; identical to SEQ ID NO: 8959

SEQ ID NO: 27747 - protein, 201 aa, Neisseria meningitidis; identical to SEQ ID NO: 1094

SEQ ID NO: 27748 - protein, 229 aa, Neisseria meningitidis
VQADLAYAAERITHDYPQATGANNTSTVSDYFRNIRAHSIHPRVSVGYDFGGWRIAADYASYRKWNNNKYSVNTKEVERNNTSGNWKELKTENQENGTFHASSSLGLSAIYDFKLNDKFDKFKPYIGVRVAYGHVKHQVHSVRKETTTAFLKPSKGATEPGKIPSLVTKPAYHESHSTSSLGLGVIAGVGFDITPKLTLDTGYRYHNWGRLENTRFKTHEVSLGMRYHF

SEQ ID NO: 27749 - protein, 117 aa, Neisseria meningitidis
MSEIKIFHNPRCSKSRAALSLLEERGIAAEVVKYLDTPPDLSELKDIFNKLGLASARGMMRVKDDLYKELGLDNPDLDNDALLRAIADHPALLERPIVLANGKAAVGRPLENIEAVL

SEQ ID NO: 27750 - protein, 69 aa, Neisseria meningitidis; identical to SEQ ID NO: 3128

SEQ ID NO: 27751 - protein, 436 aa, Neisseria meningitidis
MSAPDLFVAHFREAVPYIRQMRGKTLVAGIDDRLLEGDTLNKLAADIGLLSQLGIRLVLIHGARHFLDRHAAAQGRTPHYCRGLRVTDETSLEQAQQFAGTVRSRFEAALCGSVFGFARAPSVPLVSGNFLTARPIGVIDGTDMEYAGVIRKTDTAALRFQLDAGNIVWLPPLGHSYGGKTFYLDMLQTAASVAVSLQAEKLVYLTLSDGISRPDGTLAETLSAQEAQSLAEHAGGETRRLISSAVAALEGGVHRVQILNGAADGSLLQELFTRNGIGTSIAKEAFVSIRQAHSGDIPHIAALIRPLEEQGILLHRSREYLENHISEFSILEHDGNLYGCAALKTFAEADCGEIACLAVSPQAQDGGYGERLLAHIIDKARGIGISRLFALSTNTGEWFAERGFQTASEAELPEARRKAYRNNGRNSHILVRRLHR

SEQ ID NO: 27752 - protein, 192 aa, Neisseria meningitidis; identical to SEQ ID NO: 1137

SEQ ID NO: 27753 - protein, 720 aa, Neisseria meningitidis; identical to SEQ ID NO: 8900

SEQ ID NO: 27754 - protein, 311 aa, Neisseria meningitidis
MNPKKLVIASRESLLAMWQAKHIQGRLKALYPDCEVEILGMTTRGDQILDKTLSKVGGKGLFVKELEQALYDGRADLAVHSIKDVPMDLPEGFALAAIGERANPFDAFVSNQYARLEEMPKGAVVGTSSLRREAQLRARYPHLVIKPLRGNVQTRLSKLDNGEYDAIILAAAGLQRLELDGRIRMILSESDSLPAAGQGALGIEIAAHREDLYEVLKPLNHDTTHACVTAERALARALGGSCQVPLAAYCTEENGLLTLRGLVGHPDGSVILQADAQAPAEYADALGRAVAKKLADDGARELIGAVLNTEN

SEQ ID NO: 27755 - protein, 60 aa, Neisseria meningitidis; identical to SEQ ID NO: 2489

SEQ ID NO: 27756 - protein, 267 aa, Neisseria meningitidis; identical to SEQ ID NO: 1506

SEQ ID NO: 27757 - protein, 241 aa, Neisseria meningitidis
MSEGMVSPVLYLIPTPLGTPDTPCLLPHEQRAVVGLTDFVVEAEKTARAHLKHLGVTTPIRELNLQTLNEHTDLKTLPELLKPLQEGRSIGIVSEAGCPAVADPGANLVALAHKHGFEVRPLVGPSSLLLALMASGANGQSFAFKGYLPSEKNERIQSLKALEQRSRQQNETQLFIETPYRNDALLADAVENLHPETRLCVATDLTLPTQEIISQTIAQWRKRKEMPNLKKRPTIFVMYAG

SEQ ID NO: 27758 - protein, 859 aa, Neisseria meningitidis
MRYDKLTAKFQQALAEAQSLALAADGSYLEAGFVLKALLDDQNSGAAALLAHAGVNVPQVKQRLQQHLNSLPKVSGQGGDILPSRELQAVLNLMDKAATKRGDAYIASELFLLALVQQNDAAGKILKEAGATEQNINAAIDAVRGGQNVNDANAEDQRDALKKYTLDLTQRARDGKLDPVIGRDDEIRRAIQVLQRRTKNNPVLIGEPGVGKTAIVEGLAQRIVNGEVPESLRNKRLLVLDLAALIAGAKYRGEFEERLKGVLNDLAKDDGNTLIFIDEIHTLVGAGKTDGAMDAGNMLKPALARGELHCIGATTLDEYRQYIEKDAALERRFQKVLVGEPSVEDTIAILRGLQERYEIHHGIDITDPAIVAAAELSDRYITDRFLPDKAIDLIDEAASRVKMEKETKPEAMDKIDRRLIQLRMEKAHVEKEKDDASKKRLELIDEEINGLQKEYADLDEIWKAEKAISDGAANIKKQIDEVKIKIEQAKRQGDLALASKLMYEDLEHLEKQRAAAERADTDSTKPANKLLRNNVGAEEIAEVVSRMTGIPVSKMMEGERDKLLKMEEVLHRRVVGQDEAVRAVSDAIRRSRSGLADPNKPYGSFLFLGPTGVGKTELCKALAGFLFDSEDHLIRIDMSEYMEKHAVARLIGAPPGYVGYEEGGYLTEQVRRKPYSVILLDEVEKAHPDVFNILLQVLDDGRLTDGQGRTVDFKNTVIVMTSNIGSQHIQQMGTQDYEAVKEVVMEDVKEHFRPEMINRIDEVVVFHGLDQANIRSIAKIQLKGLEKRLEKQNLRLTVSDAALDIIAKAGFDPIYGARPLKRAIQSEIENPLAKALLAGNYAPESEIRVEADGDRLKFA

SEQ ID NO: 27759 - protein, 317 aa, Neisseria meningitidis
MNHKKIVVLDADTLPGRVFHFDFPHELAVYGTTGADETAERVRDAHIVITNKVMISADIIAANPQLELIAVSATGVNNVDIGAAEAAGVAVCNVRAYGNESVAEHAFMLMIALMRNLPAYQRDVAAGLWEKSPFFCHYGAPIRDLNGKTLAVFGRGNIGRTLARYAQAFGMRVVFAEHKHAPDVREGYVSFEDAVQAADVLSLHCPLNAQTENMIGENELRQMKPGAVLINCGRGGLVDENALLAALKYGQIGGAGVDVLTNEPPKNGNPLLNARLPNLIVTPHTAWASREALDRLFDILLANIHAFVKGKAQNRVV

SEQ ID NO: 27760 - protein, 340 aa, Neisseria meningitidis; identical to SEQ ID NO: 12398

SEQ ID NO: 27761 - protein, 351 aa, Neisseria meningitidis; identical to SEQ ID NO: 24180

SEQ ID NO: 27762 - protein, 335 aa, Neisseria meningitidis; identical to SEQ ID NO: 26749

SEQ ID NO: 27763 - protein, 229 aa, Neisseria meningitidis
MTAFVHTLSDGMELTVEIKHRAKKNLIIRPIGTHTVSISVPPHLSAAALNRWLRDNEAVLRRTLAKTPPHNTANRLPEHIWFHGRQLALTTHQDTQILLMPSEIRVPEDTHDKQAALLATFLKRQAHSYLIPRLERHARTTQLFPASSSLTSAKTFWGVCRKTTGIRFNWRLVGAPEYVADYVCIHELCHLAHPDHSPAFWELTRRFAPYTPEAKQWLKIHGRELFALG

SEQ ID NO: 27764 - protein, 233 aa, Neisseria meningitidis; identical to SEQ ID NO: 3101

SEQ ID NO: 27765 - protein, 282 aa, Neisseria meningitidis
MLQAALRFPHVFKARAEDSHKGTFGTLAVVGGSAGMSGAPVLAASAAMYLGCGKVWAGFNQDALPFAVIAGFPEIMLDTADGLTKRQGINAWTAGCGLGTDKAAVGTLAGILTEHTDKPVLLDADALNILSTDAETRNLARGCKNLILTPHPAEAARLLGTTVAQVQADRTAAVRKIGAIFGATVVLKGHKTLVAASDTEIYVNESGNAGLATAGSGDVLGGIIGSLLAQGVPVFEAACAGVWLHGAAADVIKESAGIAAGLLAGEIAPAARWLRNRITESM

SEQ ID NO: 27766 - protein, 315 aa, Neisseria meningitidis
MEFFIILLAAVAVFGFKSFVVIPQQEVHVVERLGRFHRALTAGLNILIPFIDRVAYRHSLKEIPLDVPSQVCITRDNTQLTVDGIIYFQVTDPKLASYGSSNYIMAITQLAQTTLRSVIGRMELDKTFEERDEINSIVVSALDEAAGAWGVKVLRYEIKDLVPPQEILRSMQAQITAEREKRARIAESEGRKIEQINLASGQREAEIQQSEGEAQAAVNASNAEKIARINRAKGEAESLRLVAEANAEAIRQIAAALQTQGGADAVNLKIAEQYVAAFNNLAKESNTLIMPANVADIGSLISAGMKIIDSSKTAK

SEQ ID NO: 27767 - protein, 504 aa, Neisseria meningitidis
MLYFRYGFLVVWCAAGVSAAYGADAPAILDDKALLQVQRSVSDKWAESDWKVENDAPRVVDGDFLLAHPKMLEHSLRDALNGNQADLIASLADLYAKLPDYDAVLYGRARALLAKLAGRPAEAVARYRELHGENAADERILLDLAAEFDDFRLKSAERHFAEAEKLDLPAPVLENVGRFRKKAEGLTGWRFSGGISPAVNQNANNAAPQYCRQDGGSQICSVSRAERATGLNYEIEAEKLTALADNHYLLFRSNIGGTSYYFSKKSAYDDGFGRAYLGWQYKNARQTAGILPFYQVQLSGSDGFDAKTKRVNNRRLPPYMLAHGVGVQLSHTYRPNPGWQFSVALEHYRQRYREQDRAEYNNGRQDGFYVSSAKRLGESATVFGGWQFVRFVPKRETVGGAVNNAAYRRNGVYAGWAQEWRQLGGLNSRVSASYARRNYKGVAAFSTEAQRNREWNVSLALSHDKLSYKGIVPALNYRFGRTESNVPYAKRRNSEVFVSADWRF

SEQ ID NO: 27768 - protein, 96 aa, Neisseria meningitidis
LKVPAKRYFTLDELCGLLQISPYGFAQWQHNHGVVVGYGGERYTRLDVVKLLKLQSTFAPYAEGAESGSDGNRPVTLQEIGDGLKDLLADLDKELC

SEQ ID NO: 27769 - protein, 704 aa, Neisseria meningitidis
MFLFSDGLQSINNNNRRKRIVKNAYIPSRGIRKIPHLSTLLPEFHIYKDGKGAEAVVGWGLRPTTHKARAFATEHQLPFIALEDGFLRSLGLGVSGYPPYSIVYDDIGIYYDTTRPSRLEQLILAADTMPSETLAQAQQTMDFILQHHLSKYNHAPELSDDHPLRSPSKPETVLIIDQTFGDMAIQYGGADASTFELMFQTALNENPQADIWVKTHPDVLCGKKQGYLTQLAQQHRVHLLAEDINPISLLQNVDKVYCVTSQMGFEALLCGKPLTTFGLPWYAGWGVSDDRHPEINRLVQTQRRATRNLLQLFAAAYLQYSRYLNPNTGEAGSLFDVIDYLATVKRKNDKLRGELYCVGMSLWKRAVAKPFFNVPSCRLKFISSTQKLARVKLSDDARILAWGNGKEAIVRFAEQHHIPLLRMEDGFIRSVGLGSNLVPPLSLVTDDMSIYFNAETPSRLEYILQNQNFDDQDFQTALKLQKMLTENHISKYNVGSSDFTAPSTDKTVILVPGQVEDDASIRYGSPKIYRNLDLLRTVRERNPNAYIIYKPHPDVVSGNRIGHISPEDAARYADQTAEQADILTCLQYADEIHTMTSLTGFEALLRGKKVSCYGLPFYAGWGLTQDLLPIPRRSRRLELWQLIAGTLIHYPDYIHPETHQAINAETAAQILIRQKNMQKNNNGLHRGCFAKKLGKIKQLYRSFK

SEQ ID NO: 27770 - protein, 174 aa, Neisseria meningitidis
MQTRILSAVLLAFSTAAFAGGAFTLQFDNPSEDGGFTQNQLLSAPYGFGCSGGNASPALSWKNPPAGTKSFVLTVYDKDAPTGLGWMHWVVADIPADVRRRNAASLQLSRCANIADDQSAAISAVISLRICRIRLTPSYTAKPMPSCCNHANTPQSAASAALCGTSSSASTAAA

SEQ ID NO: 27771 - protein, 103 aa, Neisseria meningitidis; identical to SEQ ID NO: 1558

SEQ ID NO: 27772 - protein, 106 aa, Neisseria meningitidis; identical to SEQ ID NO: 853

SEQ ID NO: 27773 - protein, 468 aa, Neisseria meningitidis
MKLFQRIFATFCAVIVCAIFVASFSFWLVQNTLAENQFNQRRTIETTLMGSIISAFRARGDAGAREILTEWKDSPVSSGVYVIQGDEKKDILNRYIDSYTIERARLFAAGHPHSNLVHIEYDRFGEEYLFFTKDWDKLQARRLPSPLLIPGLPLAPIWHELIILSFIIVVGLLMAYILAGNIAKPIRILGNGMDRVANGELETRISQQVDDRDDELSHLAIQFDKMVEKLEKLVAKERHLLHHVSHEMRSPLARMQAIVGLIQAQPQKQEQYLKRLEGELTRMDTLAGELLTLSRLETSNMALEKESLKLLPFLGNLVEDNQSIAQKNGQTVTLSADGKIPENTTILANESYLYRAFDNVIRNAINYSPEGSTILINIGQDHKHWIIDVTDNGPGVDEMQLPHIFTAFYRADSSANKPGTGLGLALTQHIIEQHCGKIIAENIKPNGLRMRFILPKKKTGSKTEKSAN

SEQ ID NO: 27774 - protein, 217 aa, Neisseria meningitidis
MLEILFRHQDFVAINKPGGISVHQDSGETGLARTLAIQLGVERVWLLHRLDKQTSGILLFALNKESASALSGQFAGKSIKKTYLALSDRKPSKKQGWIKGGMEKSRRGMWKLTRNTENIAVTRFHSISIAEKLRLFILEPHTGKTHQLRVAMKSLGSPILGDSLYGGTESETMFLYAWKIQFAYQNRQIEIVAPLKNEWQTENISHALEEFYMAKAG

SEQ ID NO: 27775 - protein, 289 aa, Neisseria meningitidis
MKPIKKAVFPVAGMGTRFLPATKASPKEMLPIVDKPLIQYAVEEAVEAGCTEMVFVTGRNKRSIEDHFDKAYELETELEMRHKDKLLEHVRNILPPNITCLYIRQAEALGLGHAVLCARAAIGDEPFAVILADDLIDAPKGALKQMIEVYERSGNSILGVETVEPSQTGSYGIVETEQLKQFQRITGIVEKPKPEDAPSNLAVVGRYILTPRIFDLLTNLPRGAGNEIQLTDGIAKLLDHEFVLAHPFEGTRYDCGSKLGYLEATVAYGLKHPETGEPFRRLLEKYRTE

SEQ ID NO: 27776 - protein, 279 aa, Neisseria meningitidis
MTATAAAIDRLLPQTQCRECGYDGCLPYAQAVATGEAYNLCAPGGEAVIRDISALLGKPLVAPAKTQAKALAQIDETACIGCTACIRACPADAIMGAGKLMHTVIADECTGCGLCVAPCPVDCIHMQPVADTVLPRARRFSLSADSRFAAAEHARARYLKRNERKQREADERKAMLAEREAAVRNARPQTPDTPKKPAFNPADLIAKAMAKAQTQQDRLAAADNRKDYQAKQIAEARERAELRRAQRDMKYGSDSEKAAALEYLKQYKAKQDAAQNTAS

SEQ ID NO: 27777 - protein, 213 aa, Neisseria meningitidis; identical to SEQ ID NO: 8153

SEQ ID NO: 27778 - protein, 224 aa, Neisseria meningitidis
MNLKALIARFRVLANDKAEPYFWRDEEVSGWLNDAVHEACLRGRLLHSDDAFVTDVEKGRPLYAYATGEFAAGYVYEIDSIRFVFDGKSVCLKLVSPETADVCAPGWRDGAATGLPVYAVQGDEKLTLAPAPDRNGRLFVGGYCLPRDMEEDGDAPEINSIHHRNLVYWALAEAFSIPDTETFDPQRSESARRRFELYFGLPTDSDLRRITREDTLHLNRHFWI

SEQ ID NO: 27779 - protein, 209 aa, Neisseria meningitidis; identical to SEQ ID NO: 1847

SEQ ID NO: 27780 - protein, 498 aa, Neisseria meningitidis
MTTENQAGNPESGIGTSEQTKAAPKAKKTFDPRASVIQIHPEGERIHPKKAEGRFAKLRIAAVLATQFVFYVIPWFNWSGRQAVVFNIPERHFFIFGLSLGVGDLIYLALLLMICAFGLFWWTTIAGRLWCGYSCPQTVYTEIMLWIDNLVEGDRNKRLKLEKSPWNFTKIRIKATKYLLIFLVCAWTGITFAGWFVPIRQFVPDLFTGAAGGGAMFATAFYGFMTFFFAHIMREKVCLHMCPYARFQSAMFDKDTLIVSYDAERGEPRGARKKTVNKEEAGLGDCINCAMCVQVCPVGIDIRNGLQYQCIGCAACIDACDEIMDKMGYPRGLIRYTTESALEHEYSEKDIKKRLLRPRVAGYGAVLALVIIAFLAGLSTRKMVEVDILKDRGVLVRENAKGWLENAYSLRIINKSEKEQLITASVKGFDEIALTGLPEGGIKVAPRETVTLPVQVSTIPEYADKGSHPIEFTFQYRESGAPDGKPVVLEEDATFIGE

SEQ ID NO: 27781 - protein, 168 aa, Neisseria meningitidis; identical to SEQ ID NO: 13130

SEQ ID NO: 27782 - protein, 430 aa, Neisseria meningitidis
MQFSAFGEKFTQHSGILQLMDDLGDALKSDKPVNMLGGGNPARIAEVNAVFADVFSKLAAEHAVENIGNYSNPQGDAALIDALTAFLNREYGWNLTADNIALTNGSQNAFFYLFNLFGGKFNLSDGTSAEKAILLPLAPEYIGYADVHVEGQHFVSVKPKIENVEHEGEAGFFKYRVDFDALENLPELKAGKIGAICCSRPTNPTGNVLTDSEMARLDALAQEHGIPLIIDNAYGMPFPNIIYSDVTLNWHENIILCFSLSKVGLPGVRTGIIVAAPEVVKAVSSLNAIVNLAPTRFGAAIAAPLLESGEMKRLADQVIRPFYRNQAQTAVSLLKRELGAYPMKIHKPEGAIFLWLWFENLPVSSQTLYEMLKAEGTLIIPGEHFFVGIDTQDYPHAGECIRMSIAQDAQTLEKGIAAIGKTVRKLYDNV

SEQ ID NO: 27783 - protein, 313 aa, Neisseria meningitidis
MAIQWFPGHMNKAKKAIAERAKSVDMVIEMLDARMPASSENPLLAQLSKGKPKLKILNKQDLADPERTKVWLDHYNSRPDTRAIALDSSETGAHGKITQACRAMIPHRQGIDKPLRVLICGIPNVGKSTLINGMIGKKSAKTGNEPGITKAEQRLFLADDFWLYDTPGMLWPKIIVEESGYNLAAGGSVGRNALDEEEVALELLDYLRRHYLPMLQERYQADKDPSSHWDENVWLEWIAKKRGAVLSGGRINYQKAAENILTDFREGKIGRITLETPNQWETWLKKARQKEAELKAIREARKAERKGQKPSEA

SEQ ID NO: 27784 - protein, 212 aa, Neisseria meningitidis
MSKLTPREILTAGAVVPVMAIDDLSTAVDLSHALVEGGIPTLEITLRTPVGLDAIRLIAKEVPNAIVGAGTVTNPEQLKAVEDAGAVFAISPGLHESLAKAGRNSSIPLIPGVATPGEIQLALEHGIDTLKLFPAEVVGGKAMLKALYGPYADVRFCPTGGISLATAPEYLALPNVLCVGGSWLTPKEAVKNKDWDTITRLAKEAAALKPKA

SEQ ID NO: 27785 - protein, 98 aa, Neisseria meningitidis; identical to SEQ ID NO: 9533

SEQ ID NO: 27786 - protein, 86 aa, Neisseria meningitidis; identical to SEQ ID NO: 7137

SEQ ID NO: 27787 - protein, 208 aa, Neisseria meningitidis
MTQERLPEFFDRAPTLTVQDPLAAFLGAAQDGILTYRYADAVRLCGHSCPTVAGAYLMVIKGLKALYGEELPERGGIEAAMQGTRDEGTVGVTASVVQLLTGAAPETGFGGIGIQGRFARRNLLSFGAGEINGTLALRRRDTGKTVAVSLNAALKPFAPQMRDIMPKAVSGSASTDELKHFGQLWQARVKAFLTESADDPQFVIVREV

SEQ ID NO: 27788 - protein, 200 aa, Neisseria meningitidis
MTDKISPDALIEAALLTQTEPLTEKSMRELCVPPLSQDKLIDVLAQLKTRWQDRALQLVHTQEGWRFQIVQTAFERLGSLQEQRAPRYSRAVMETLAIIAYQQPVTRGDIEGIRGVAVSQNVMQTLQDRGWIEVIGHRDTLGKPALWATTATFLSDLRLDGLEELPPLTELGELVLPDLIEMPPTDEEEPEAVPSDTLPN

SEQ ID NO: 27789 - protein, 218 aa, Neisseria meningitidis
VKKRLFCSRNGLRYYLLGGFCLSVFPLLLVFASSVWAVYRTGGQVLPPYVRADAALVLGAAAWDKHPSPVFRERINHAIALYQSRRVGKIVFTGGRTKKGYMTEAEVGRRYALKQGVPARNILFENTSRNTYENLNNIRPVLRANGIASVVIVSDPYHLARAAEMAEDLGVRVYMSATPTTRFDAGNKKKIFMLQEGYALSLYRLEKWGWDFFNWLFH

SEQ ID NO: 27790 - protein, 352 aa, Neisseria meningitidis
MTAALHIGHLSKSFQNTPVLNDISLSLDPGEILFIVGASGCGKTTLLRCLAGFEQPDSGEISLSGRTIFSKNTNLPVRERRLGYVVQEGVLFPHLTVYRNTAYGLGNGKGKTAQERQRIEAMLELTGISELAGRCPHELSGGQQQRVALARALAPDPELILLDEPFSALDEQLRRQIREDMIAALRANGKSAVFVSHDREEALQYADRIAVMKQGRILQTASPHELYRQPADLDAALFIGEGIVFPAALNADGTADCGLGRLPVQSGAPAGTRGTLLIRPEQFSLHPHSAPTASIHAVVLKTTPKARHTEISLRVGQTVLTLNLPSAPTLSDGISAVLHLDGPALFFPGNTL

SEQ ID NO: 27791 - protein, 237 aa, Neisseria meningitidis; identical to SEQ ID NO: 14709

SEQ ID NO: 27792 - protein, 122 aa, Neisseria meningitidis; identical to SEQ ID NO: 2377

SEQ ID NO: 27793 - protein, 296 aa, Neisseria meningitidis; identical to SEQ ID NO: 337

SEQ ID NO: 27794 - protein, 151 aa, Neisseria meningitidis; identical to SEQ ID NO: 4962

SEQ ID NO: 27795 - protein, 130 aa, Neisseria meningitidis
MPTSTKPYVLRALCEWCSDNSLTPHILVWVNEHTRVPMQYVRDNEIMLNIGATATQNLQIDNDWISFSARFGGQAHDIWIPVGHVLSLFARETGEGMGFELEEYRPDTPPENTSAETAPRPAKKGLKLVK

SEQ ID NO: 27796 - protein, 166 aa, Neisseria meningitidis; identical to SEQ ID NO: 13557

SEQ ID NO: 27797 - protein, 797 aa, Neisseria meningitidis
MKLKQIASALMVLGISPLALADFTIQDIRVEGLQRTEPSTVFNYLPVKVGDTYNDTHGSAIIKSLYATGFFDDVRVETADGQLLLTVIERPTIGSLNITGAKMLQNDAIKKNLESFGLAQSQYFNQATLNQAVAGLKEEYLGRGKLNIQITPKVTKLARNRVDIDITIDEGKSAKITDIEFEGNQVYSDRKLMRQMSLTEGGIWTWLTRSNQFNEQKFAQDMEKVTDFYQNNGYFDFRILDTDIQTNEDKTKQTIKITVHEGGRFRWGKVSIEGDTNEVPKAELEKLLTMKPGKWYERQQMTAVLGEIQNRMGSAGYAYSEISVQPLPNAETKTVDFVLHIEPGRKIYVNEIHITGNNKTRDEVVRRELRQMESAPYDTSKLQRSKERVELLGYFDNVQFDAVPLAGTPDKVDLNMSLTERSTGSLDLSAGWVQDTGLVMSAGVSQDNLFGTGKSAALRASRSKTTLNGSLSFTDPYFTADGVSLGYDVYGKAFDPRKASTSIKQYKTTTAGAGIRMSVPVTEYDRVNFGLVAEHLTVNTYNKAPKHYADFIKKYGKTDGTDGSFKGWLYKGTVGWGRNKTDSALWPTRGYLTGVNAEIALPGSKLQYYSATHNQTWFFPLSKTFTLMLGGEIGYANGYGKTKEIPFFENFYGGGLGSVRGYESGTLGPKVYDEYGEKISYGGNKKANVSAELLFPMPGAKDARTVRLSLFADAGSVWDGKTYDDNSSSATGGRVQNIYGAGNTHKSTFTNELRYSAGGAVTWLSPLGPMKFSYAYPLKKKPEDEIQRFQFQLGTTF

SEQ ID NO: 27798 - protein, 821 aa, Neisseria meningitidis
MKKTCFHCGLDVPEHLHLTVRYENEDRETCCAGCQAVAQSIIDAGLGSYYKQRTADARKTELPPQEILDQIRLYDLPEVQSDFVETHGGTHEAVLMLGGITCAACVWLIEQQLLRTDGIVRIDLNYSTHRCRVVWDDGKIRLSDILLKIRQIGYTAAPYDAQKIEAANQKERKQYIVRLAVAGLGMMQTMMFALPTYLYGGDIEPDFLQILHWGGFLMVLPVVFYCAVPFYQGALRDLKNRRAGMDTPIAVAIIMTFIAGVYSLATNAGQGMYFESIAMLLFFLLGGRFMEHIARRKAGDAAERLVKLIPAFCHHMPDYPDTQETCEAAVVKLKAGDIVLVKPGETIPVDGTVLEGASTVDESMLTGESLPVAKMPSEKVTAGTLNTQSPLIIRTDRTGGGTRLSHIVRLLDRALAQKPRTAELAEQYASSFIFGELLLAVPVFIGWTLYADAHTALWITVALLVITCPCALSLATPTALAASTGTLAREGILIGGKQAIETLAQTTDIIFDKTGTLTQGNPAVRRIELLGSMTEAQVLAVAQSLEQQSEHPLARAILNCRISGGSVPDIAIKQRLNRIGEGVGAQLTVNGETQVWALGRADYVAEIAGKPPQDGQASESGSAVFLGSQSGFAAVFYLTDPLKDSAAEAVRQLAGKNLTLHILSGDRETAVAETARALGVAHYRAQAMPEDKLEYVKALQKEGKKVLMIGDGINDAPVLAQADVSAAAAGGTDIARDGADIVLLNEDLRTVAHLLDQARRTRHIIRQNLIWAGAYNIIAVPLAVLGYVQPWIAALGMSFSSLAVLGNTLRLHKREEMPSEQ

SEQ ID NO: 27799 - protein, 929 aa, Neisseria meningitidis
MTDYSKTVNLLESPFPMRGNLAKREPAWLKSWYEQKRYQKLREIAKGRPKFILHDGPPYANGDIHIGHAVNKILKDIIIRSKTQAGFDAPYVPGWDCHGLPIEVMVEKLHGKDMPKARFRELCREYAAEQVARQKKDFIRLGVLGDWDHPYLTMDFKTEADTVRMLGEIYKSGYLYRGAKPVQFCLDCGSSLAEAEVEYKDKVSPAIDVAYPFKDTAALAAAFGLAGIEGKAFAVIWTTTPWTLPASQAVSAGADVVYQLIDTPTGKLVLAKDLAEDALKRYGFSDGIAILAETTGDKLENLHMNHPFLERDIPMLNGEHVTTDAGTGLVHTAPAHGLEDYAVCNKYGIELYNPVNAEGKYIGETPRVAGMRVWEANPVILQWLEETSNLLASSKIEHSYAHCWRHKTPLIYRATGQWFVGMDKAGADGKTLRDKAIKAVDDTEFFPSWGRARLEAMIEGRPDWVVSRQRYWGTPMTFFVHKETGELHPNSAELLEKVALKIEEKGIEAWFSLDKSELLSAEDCENYDKLSDTMDVWFDSGSTHYSVVKQREELEWPADLYLEGSDQHRGWFQSSMLTGCASSMGRAPYKQLLTHGFVVDGEGKKMSKSIGNVVAPQEVYNEFGADILRLWAASTDYSGELAISKEILKRVTESYRRIRNTLSFLFANLSDFNPIEDAVQQADMVEIDRYAVVLARQLQERLAGDYYPRYAFHFAVKDIVSFCSEDLGAFYLDILKDRLYTTKADSHARRSAQTALYHITRSLVLLIAPILCFTGEEAWDIIGGGEEDSVLFHTWHEFPTINEKTEAELVKKWTAIREAREAVTAAIEPLRADKTVGSSLQAEAEITAPEEMAGYLNALGEELRFALLVSKAEVKVGSELAVAAKASDGEKCERCWHYTRDVGAVAGYETVCKRCAENVGGEGETRHYA

SEQ ID NO: 27800 - protein, 404 aa, Neisseria meningitidis; identical to SEQ ID NO: 756

SEQ ID NO: 27801 - protein, 97 aa, Neisseria meningitidis
MKTNDKLNRQIDVLQKQSAAIHNEAYIEMNTLLYRHREVVSVHNRKADYAEKGKERIALFPRGLNGITKLPAAVLLPERPDCFDMKAVWQMFNRIPR

SEQ ID NO: 27802 - protein, 176 aa, Neisseria meningitidis
MESFELEDLTLWLVRDADEAEMWIDRWAISYPVVQMSEASAGQSIGEWQAGLQTAFERIRGKYVAVVAHGAGAAAFLAWLYQADILTRKKIANIILVPQRPDIFPDDAEHTFQRVRCPCRAALVVPEHGGVPHGWAQKQADLWNARLLVSPHSGSLNGMLGGWQWGMKLMQEMLLA

SEQ ID NO: 27803 - protein, 87 aa, Neisseria meningitidis; identical to SEQ ID NO: 1364

SEQ ID NO: 27804 - protein, 330 aa, Neisseria meningitidis
MKTHEISKDSVSLIGVAEHEAGQRLDNYLIKILKGVPKSHIHRIIRAGEVRLNKKRCKPDSRIAEGDTVRIPPVRVAEKEMPSERRAAVPARAFDVVYEDDALLVIDKPSGVAVHGGSGVSFGVIEQLRRARPEARYLELVHRLDKDTSGLLMVAKKRSALVKLHEAIRNDHPKKIYLALGVGKLPDDNFHVKLPLFKYTGAQGEKMVRVSADGQSAHTVFRALNRFSDGILHGVGLSHLTLVRATLKTGRTHQIRVHLQSQGCPIAGDERYGDYQANRRLQKLGLKRMFLHASELHLNHPLTGEPLVLKAELPPDLAQFAVMLENGTKM

SEQ ID NO: 27805 - protein, 154 aa, Neisseria meningitidis
MYKHLVVAVDGSETSINALKHAAELAGVNGARLTLVHVANPAEYMALAPEFLQHESYEAAAIAQGNEVLDAAERTARELGVENTVKHLLVANKGAREMAQDLVDYADENGADLLVLGTHGRTGLMHLLMGSFAETVMRQSHLPLLIIRSKAEEA

SEQ ID NO: 27806 - protein, 159 aa, Neisseria meningitidis
MKHILPLIAASALCISTASAHPASEPQTQNETAMTTHTLTSKYSFDETVSRLETAIKSKGMNIFAVIDHQEAARRNGLTMQPAKVIVFGTPKAGTPLMVKDPAFALQLPLRVLVTETDGKVRAAYTDTRALIAGSRIGFDEVANTLANAEKLIQKTVGE

SEQ ID NO: 27807 - protein, 99 aa, Neisseria meningitidis; identical to SEQ ID NO: 5781

SEQ ID NO: 27808 - protein, 475 aa, Neisseria meningitidis
MIHTEPSAQPSTMDTAAFLKHIESAFRRIFSDGIDLMRYLPEDKWLALKQAGLLLPFLDKKHGGRKGSQFEIQEVLRIAGHYGVPVTLRTGIEGALVLQPLQEFGDEAQVAQGLEMIFKGEGGGLGVTEPETSGAAIAREMQSYYEYTDGQTIYVNAAKYWQGNSQSDFLLVAAKERKNGKLAKVIDLLLVPKTYIRCETLASEGLRAVRYAVNRIDAEMPATAVMKLSQSDAAGLRAFQNIFIRSRLQLIGMTHGIMEYILENLGRYVRNDIRFVDYERREIRRRHQVSEILYRYVCHSVSPVAPVAHQLMEANIVKTLATEYTYAAAQMLQKLLGAKGFERGHTAGNIAIDIRPFTIFEGPNDMLYAEIYDQFVRATAEEKEAGMKLDKNQTLLDRLQTDARFAAVARDYTLPEDIRSFLQEHTLTDACALQKVFIGKIIARLFVFVQAKHEDAAACLLNDIRKDILDCRYCG

SEQ ID NO: 27809 - protein, 321 aa, Neisseria meningitidis; identical to SEQ ID NO: 6981

SEQ ID NO: 27810 - protein, 355 aa, Neisseria meningitidis; identical to SEQ ID NO: 26476

SEQ ID NO: 27811 - protein, 481 aa, Neisseria meningitidis; identical to SEQ ID NO: 18290

SEQ ID NO: 27812 - protein, 288 aa, Neisseria meningitidis
MWKMLKHIAKTHRKRLIGTFFLVGLENLLMLVYPVFGGWAINAVIAGKVWQALLYALVVLLMWLVGAARRIADTRTFTRIYTEIAVPVVLEQRQRQVPHSAVTARVALSREFVSFFEEHLPIAATSVVSIFGACIMLLVLEFWVGVSAVGILALFLWLLPRFAAISENLYFRLNNSLECDNHFIRKGDRRQLYRHYGLVARLRVLISNREAFGYLCVGAAMGILFGFAFVMMTLKGYSSAGHVYSVGTYLWMFAMSLDDVPRLVEQYSNLKDIGQRIEWSERNIKAGT

SEQ ID NO: 27813 - protein, 63 aa, Neisseria meningitidis; identical to SEQ ID NO: 980

SEQ ID NO: 27814 - protein, 239 aa, Neisseria meningitidis; identical to SEQ ID NO: 14417

SEQ ID NO: 27815 - protein, 672 aa, Neisseria meningitidis
MEVIRYPDSPFKLHQPFPPAGDQPTAIAGLLEGLSDGLAYQTLLGVTGSGKTYTMANVIAQSGRPAIIMAHNKTLAAQLYAEMREFFPENAVEYFVSYYDYYQPEAYVPSRDLFIEKDSAINEHIEQMRLSATKNLMTRDDVIIVATVSAIYGIGDPTEYQQMVLSVKEGDTIEQRDIIATLVSMQYERGDLDFKRGSFRVRGDVIDVYPAESSENALRISLFDDEIDRLDMFDPLSGSLIQRVGRYTVFPSSHYVTPRDTVLRACDSIKEELRERIDFFTKENRPVEQQRIEQRTRFDLEMLYEMGFCKGIENYSRHFSGKKEGEPPPTLMDYLPDNAIMFIDESHVTVTQIGGMYKGDASRKQNLVDYGFRLPSARDNRPLKFHEFEKVMPQTVFVSATPAKYEEEHAGQVVEQVVRPTGLVDPQIIIRPVATQVDDLMSEINDRIQKGERVLVTTLTKRMAEQLTDYYSELGIKVRYLHSDIDTVERVEIIRDLRLGLFDVLVGINLLREGLDIPEVSLVAILDADKEGFLRSHRSLIQTIGRAARNVNGVAILYADKITDSMKAAIDETERRREKQMKFNEEHGIVPQQIKKQVKDIIDGVYHEEDSGKSRLKGKNKVKVGEIHNEEDAIKEIAKLEKAMQQAARDLQFEEAAVLRDRIRGIKENLLF

SEQ ID NO: 27816 - protein, 253 aa, Neisseria meningitidis; identical to SEQ ID NO: 22570

SEQ ID NO: 27817 - protein, 120 aa, Neisseria meningitidis
MQCDFSQAVPSNQTQNIQNQAQTVTIPHKLANDAADACFYADRASENLAAILEAVEALIDISTTTQTGQAQRHNLPLIARNLIKTAKNEVETLAEFHPFSLFETATDLNNEIFSQVHSAK

SEQ ID NO: 27818 - protein, 449 aa, Neisseria meningitidis; identical to SEQ ID NO: 481

SEQ ID NO: 27819 - protein, 234 aa, Neisseria meningitidis
LWQNPKSIVELYIQEGKSDARTREVLEKAANENIRVYFADADRLNAISKGARHQGVAGFIDASKNHVHLEDVLENLSEPPLLLILDGITDPHNLGACLRTADAMGVHAVIAPKDKSAGLNATVSKVACGAAETVPYITVTNLARTLRELKEYGIWIIGTDMGGNADLYHCDLPDSAAWVMGNEGDGMRRLTREHCDMLVSIPMFGTVESMNVSVSAGMVLSETRRQRVLKNEKA

SEQ ID NO: 27820 - protein, 356 aa, Neisseria meningitidis; identical to SEQ ID NO: 5919

SEQ ID NO: 27821 - protein, 396 aa, Neisseria meningitidis
MNPKHLIAFSALFAATQAEALPVASVSLDTVTVSPSAPYTDTNGLLTDYGNAAASPWMKKLQSVAQGSGETFRILQIGDSHTAGDFFTDSLRKRLQKTWGDGGIGWVYPANVKGQRMAAVRHNGNWQSLTSRNNSGDFPLGGILAHTGSGGSMTLTASDGKTGKQRVSLFAKPLLAEQTLTVNGNTVSANGGGWQVLDTGAALPLTIHTEMPWDIGFINIENPAGGITVSAMGINGAQLTQWSKWRADRMNDLAQTGADLVILAYGTNEAFGDNIDIADTEQKWLDTVRQIRDSLPAAGILIIGAPESLKNTLGVCGTRPVRLTEVQQMQRRVARQGQTMFWSWQNAMGGVCSMKNWLNHGWAAKDGVHFSSKGYQRPAEMLADSLEELVRAAPKR

SEQ ID NO: 27822 - protein, 412 aa, Neisseria meningitidis
VIASLTGAAVGGTPVDAQTGGAVGQNAVENNLYLTSEALKKDKQTARKIYSVIKEQVKHECSSTGRITECRQNIGRIIEFTQDKRFDSRFKDLKKESLYYLNQHPDLVASYLKAEYEKLDREDKSILHRYISPGAEIVSGSLGVVLSGVAGGGSCAETFGLGCAAALVGVTSSYDHVITGTKNFGKKASEQRPTIAVQALKQLGLSEQAAEYVQFSIDLFSVGKSGGGIPKAKPVFDAKPRWEVDRKLNKLTTREQVEKNVQETRRRSQSSQFKAHAQREWENKTGLDFNHFIGGDINKKGTVTGGHSLTRGDVRVIQQTSAPDKHGVYQATVEIKKPDGSWEVKTKKGGKVMTKHTMFPKDWDEARIRAEVTSAWESRIMLKDNKWQGTSKSGIKIEGFTEPNRTAYPIYE

SEQ ID NO: 27823 - protein, 276 aa, Neisseria meningitidis
MAHYAIGDIQGCFDELTALLGKIGFNHGTDTLWLTGDIVNRGSKSLETLQFCIRHENSVQIVLGNHDLHLLAVGCGEGAPKRSDTIEPILKHPDGKKMLDWLRAQPLLIREGSRVMVHAGILPQWRIAKAESLAREAEAELRGKKYVKFFSKMYGNKPAAWDEGLEGYARLRFIVNAFTRMRALTFKNELDFDYKSTVKKMPPYLRPWFKAPDRQNLDRTIIFGHWSSLGYTNADNVISLDTGALWGGQLTAVNLETEEITQVQAAGGIDWKSFAK

SEQ ID NO: 27824 - protein, 185 aa, Neisseria meningitidis
MKNLIAFNKPYGVICQFSPHEKHKSLKDFINFPGFYPAGRLDTDSEGLLLTDDGRLQAQITDPKFKHPKTYWAQLEGVPDESRLESLRKGIDLGGFVTRPASIRILKHGEADSLWERIPPIRVRKTVPDFWIEITISEGKNRQVRRMTAKAGYPCLRLIRVASGRLKLFDLDLKPGEWAYAPFKP

SEQ ID NO: 27825 - protein, 163 aa, Neisseria meningitidis
LAKQQEKAKIEKAERERKKAEEQAEQARKEKEKQKLEEQRKFLIEQFEVLSPKQQENVINEIFEQVGKGTFKQIFQTARQQGTVHIDARFVKNFYNYFQQEERAKRARKRVDLPIQYTEEDIEQEVPKEKGTIFFGNDWNEYVYKQLIMYIDFKSMMNDDAIK

SEQ ID NO: 27826 - protein, 248 aa, Neisseria meningitidis; identical to SEQ ID NO: 3755

SEQ ID NO: 27827 - protein, 376 aa, Neisseria meningitidis
MAKHLPLAVLTALLLAACGGSDKPSAENPAPAENQNVLKIYNWSEYVDPETVADFEKKNGIKVTYDVYDSDETLESKVLTGKSGYDIVAPSNAFVGRQIKAGAYQKIDKSLIPNYKHLNPEMMRLMDGVDPGHEYAVPFYWGTNTFAINTERVKKALGTDKLPDNQWDLVFDPEYTSKLKQCGISYLDSAAEIYPMVLNYLGKNPNSSNTEDIREATALLKKNRPNIKRFTSSGFIDDLARGDTCVTIGFGGDLNIAKRRAEEAGGKEKIRVMMPKEGVGIWVDSFVIPKDAKNVANAHKYINDFLDPEVSAKNGNFVTYAPSSKPARELMEDEFKNDNTIFPTEEDLKNSFIMVPIQPAALKFMVRQWQDVKAGK

SEQ ID NO: 27828 - protein, 144 aa, Neisseria meningitidis; identical to SEQ ID NO: 4464

SEQ ID NO: 27829 - protein, 319 aa, Neisseria meningitidis
MKPVFLDFEQPIAELTNKIDELRFVQDESAVDISDEIHRLQKKSNDLTKSIFSKLTPAQVSQVSRHPQRPYTLDYIDALFTDFEELHGDRHFADDHAIVGGLARFNGQSVMVVGHQKGRDTKEKIRRNFGMPRPEGYRKALRLMKTAEKFGLPVMTFIDTPGAYPGIGAEERGQSEAIGKNLYELTRLRVPVLCTVIGEGGSGGALAVAVGDYVNMLQYSTYSVISPEGCASILWKTAEKAADAAQALGITADRLQKLDLVDTVIKEPLGGAHRDFGQTMKNVKAVLEKQLHEAQSIPLADLLSRRFDRIMAYGKFSEQ

SEQ ID NO: 27830 - protein, 426 aa, Neisseria meningitidis; identical to SEQ ID NO: 1291

SEQ ID NO: 27831 - protein, 417 aa, Neisseria meningitidis; identical to SEQ ID NO: 4662

SEQ ID NO: 27832 - protein, 371 aa, Neisseria meningitidis
MKVGFVGWRGMVGSVLMQRMQEENDFAHIPEAFFFTTSNVGGAAPDFGQAAKTLLDANDVAELAKMDIIVTCQGGDYTKSVFQALRDSGWNGYWVDAASSLRMKDDAIIVLDPVNRNVIDNGLKNGVKNYIGGNCTVSLMLMALGGLFQNDLVEWATSMTYQAASGAGAKNMRELISGMGAVHAQVADELADPAGSILDIDRKVSDFLRSEDYPKANFGVPLAGSLIPWIDVDLGNGQSKEEWKGGVETNKILGRSDNPTVIDGLCVRVGAMRCHSQAITLKLKKDLPVSEIETILAGANDWVKVIPNEKEASIHELTPAKVTGTLSVPVGRIRKLGMGGEYISAFTVGDQLLWGAAEPLRRVLRIVLGSL

SEQ ID NO: 27833 - protein, 394 aa, Neisseria meningitidis; identical to SEQ ID NO: 277

SEQ ID NO: 27834 - protein, 752 aa, Neisseria meningitidis
MYTRIMEISPWTLRSAKLEKEHKRLQESLTSLGNGYMGMRGSFEETYSADSHLGTYIAGVWFPDKTRVGWWKNGYPKYFGKAINALNFSKVKIFVDGQEVDLAKNDVAGFSVELDMQHGVLRRSFTVFGVRFNVCKFLSVAQKELAVIRWEAVSVDGKTHQVRIDSIIDADVKNEDSNYEEKFWQVLDKGVSDSLSYIAAQTVANPFGVEQFIVNAEQTFAGSFKALSGSQTDWQVSNSFEVEVGGTPKTFEKRVIVTTSRDYQGLEAVKAAGRALSEKVAGVAFETLLDAHKAGWLHRWEIADVVIEGNDEAQQGIRFNLFQLFSTYYGEDARLNIGPKGFTGEKYGGATYWDTEAYAVPLYLALAEPEVTRNLLQYRRNQLPQAQHNAREQGLAGALYPMVTFTGIECHNEWEITFEEIHRNGAIPYAIYNYTNYTGDEGYLAKEGLEVLVEVSRFWADRVHFSKRSGKYMIHGVTGPNEYENNINNNWYTNTLAAWVLDYTREALAKYPRPDLNVSAAELEKWADISANMYRPYDEELGVFVQHDGFLDKDIRPVSALSPDDLPLNQKWSWDKILRSPFIKQADVLQGIYFFGDRFNIDEKRRNFDFYEPMTVHESSLSPCIHSILAAELGKEEKAVEMYRRTARLDLDNYNNDTEDGLHITSMTGSWLAIVQGFAQMKTWGGKLSFAPFLPSAWTGYAFHINYRGRLIKVAVGKENVVFTLLKGEPLELQVYGKDITLNGSHTVALEK

SEQ ID NO: 27835 - protein, 70 aa, Neisseria meningitidis; identical to SEQ ID NO: 232

SEQ ID NO: 27836 - protein, 175 aa, Neisseria meningitidis
MKKALAALIALALPAAALAEGASGFYVQADAAHAKASSSLGSAKGFSPRISAGYRINDLRFAVDYTRYKNYKQVPSTDFKLYSIGASAIYDFDTQSPVKPYLGARLSLNRASANLGGSDSFSQISTGLGVLAGVSYAVTPNVDLDAGYRYNYIGKVNNVKNVRTGELSAGVRVKF

SEQ ID NO: 27837 - protein, 320 aa, Neisseria meningitidis
MPSISVRRLFDDNQYKLQLAWAAGNSGADNRIGVEADKPVLALVGHLNFIHPNQIQVVGLAESEYLNRLESGETGYQFGDLFDISMSLVIVANGLPVSPGLRDYCHKNDIPLLTSKLESPYLMDVLRIYLQRTLAASSVKHGVFLDVFEIGVLITGHSGLGKSELALELISRGHSLIADDAVELFRIGPETLEGRCSPMLRDFLEVRGLGILNIRHIFGETSIRPKKILQLIINLVEADDEYMKQLDRLSIRTETESILNVNVRSVTLPVAVGRNLAVLVEAAVRNYILQLRGKDSTREFLERHQTQLKENEQHNENRSD

SEQ ID NO: 27838 - protein, 141 aa, Neisseria meningitidis
MPSEHAAYADLMASSAKRLLCAKAILFSSAVRTGAAVGNIFFDGFADGGDFGDGAQYGFATFNAVDAASDSAGGIAGAAVLEIVEDEDFEGDLGSWADSVKMVRSSDGITVVPMPSETAAVQAFVPDGKIGYNIGHQCPTY

SEQ ID NO: 27839 - protein, 268 aa, Neisseria meningitidis
MWHWDIILILLAVGSAAGFIAGLFGVGGGTLIVPVVLWVLDLQGLAQHPYAQHLAVGTSFAVMVFTAFSSMLGQHKKRAVDWKTVFAMMPGMIFGVFTGALSAKYIPAFGLQIFFILFLTAVAFKTLHTGRQTASRPLPGLPGLTAVSTLFGAMSSWVGIGGGSLSVPFLIHCGFPAHKAIGTSSGLAWPIALSGAISYLINGLNIAGLPEGSLGFLYLPAVAVLSAATIAFAPLGVKTAHKLSSAKLKKSFGIMLLLIAGKMLYNLL

SEQ ID NO: 27840 - protein, 347 aa, Neisseria meningitidis; identical to SEQ ID NO: 2159

SEQ ID NO: 27841 - protein, 109 aa, Neisseria meningitidis
MSLPPCPQCASEYTYEDGGQYICPECAHEWNETESASDLAAQVRDANGAALQNGDTVILIKDLKVKGSSMVIKQGTKVKGIRLQEGDHNIACKIDGSAMNLKSEFVKKA

SEQ ID NO: 27842 - protein, 309 aa, Neisseria meningitidis; identical to SEQ ID NO: 11185

SEQ ID NO: 27843 - protein, 411 aa, Neisseria meningitidis; identical to SEQ ID NO: 23485

SEQ ID NO: 27844 - protein, 382 aa, Neisseria meningitidis
MNTPPFVCWIFCKVIDNFGDIGVSWRLARVLHRELGWQVHLWTDDVSALRALCPDLPDVPCVHQDIHVRTWHSDAADIDTAPVPDAVIETFACDLPENVLHIIRRHKPLWLNWEYLSAEESNERLHLMPSPQEGVQKYFWFMGFSEKSGGLIRERDYRDAVRFDTEALRERLMLPEKNASEWLLFGYRSDVWAKWLEMWQQAGSPLTLLLAGAQIIDSLKQSGIIPQNALQNDGDVFQTASVCLVKIPFVPQQDFDKLLHLADCAVIRGEDSFVRAQLAGKPFFWHIYPQDENVHLDKLHAFWDKAHGFYTPETASAHRRLSDDLNGGGALSATQRLECWQTLQQHQNGWRQGAEDWSRYLFGQPSASEKLAAFVSKHQKIR

SEQ ID NO: 27845 - protein, 322 aa, Neisseria meningitidis
MTAKPFSLNLTNLLLLAVLFAVSLSVGVADFRWSDVFSLSDSQQVMFISRLPRTFAIVLTGASMAVAGMIMQILMRNRFVEPSMAGAGQSAALGLLLMSLLLPAAPLPVKMSVAAVAALIGMLVFMMLIRRLPPTAQLMVPLVGIIFGSVVEAVATFIAYENEMLQMLGVWQQGDFSSVLLGRYELLWITGGLAVFAYLIADRLTILGLGETVSVNLGLNRTAVLWSGLIIVALITSLVIVTVGNIPFVGLVVPNIISRLIGDRLRQSLPAVALLGASLVLLCDIIGRVIVFPFEIPVSTVFGVLGTALFLWLLLRKPAHAV

SEQ ID NO: 27846 - protein, 377 aa, Neisseria meningitidis
MKRILCITGTRADFGKLKPLLAYIENHPDLELHLIVTGMHMMKTYGRTYKEVTRENYQHTYLFSNQIQGEPMGAVLGNTITLISRLSDEIEPDMVMIHGDRLEALAGATVGALSSRLVCHIEGGELSGTVDDSIRHSISKLSHIHLVANEQAVTRLVQMGEKRKHIHIIGSPDLDVMASSTLPSLEEVKEYYGLPYENYGISMFHPVTTEAHLMPQYAAQYFKALELSGQNIISIYPNNDTGTESILQELLKYQSDKFIAFPSIRFEYFLVLLKHAKFMVGNSSAGIREAPLYGVPSINVGTRQSNRHMGKSIIHTDYETKNIFDAIQQACSLGKFEADDTFNGGDTRTSTERFAEVINNPETWNVSAQKRFIDLNL

SEQ ID NO: 27847 - protein, 223 aa, Neisseria meningitidis; identical to SEQ ID NO: 15703

SEQ ID NO: 27848 - protein, 115 aa, Neisseria meningitidis; identical to SEQ ID NO: 19291

SEQ ID NO: 27849 - protein, 460 aa, Neisseria meningitidis
MANIARDIFKAYDIRGIVGKTLTDDAAYLIGRAIAAKAAEKGMTRIALGRDGRLSGPELMEHIQRGFTDSGIGVLNVGMVATPMLYFAAINECGGSGVMITGSHNPPDYNGFKMMLGGDTLAGEAIQELLAIVEKDGFVAADKQGNVTEKDISGEYHNHIVGHIKLKRPMKIAIDAGNGVGGAFAGKLYKGLGNEVTELFCDVDGNFPNHHPDPSKPKNLQDLIAALKNGDAEIGLAFDGDADRLGVVTKDGNIIYPDRQLMLFAQDVLSRNPKAKVIFDVKSTRLLAPWIKEHGGEPVMEKTGHSFIKSAMKKTGAPVAGEMSGHIFFKERWFGFDDGLYAGARLLEILSASDNPSEVLNNLPQSISTPELNIALPEGSNGHQVIDELAAKAEFEGATEIITIDGLRVEFPDGFGLMRASNTTPILVLRFEADTQEAIERIQNQFKAVIESNPNLIWPL

SEQ ID NO: 27850 - protein, 1161 aa, Neisseria meningitidis
MRLTHIKLSGFKSFTDPTTIHVPGQLVAVIGPNGCGKSNVIDAVRWVLGEASAKQLRGESMQDVIFNGAATRRPAPRASVELVFDNSDHSLQGAWGQYAEVSIKRQLTRQGESTYFINNQTVRRRDITDLFLGTGVGARGYAVIEQGMISRIIEARPEELRAYIEEAAGVSKYKERRKETEGRLKDTREHLQRLGDLQNELARQVEKLEKQAETAERYKFLTAQLNRQQDLLDYAQWQQSLAAADKATAQHQSLQAQQDETAAQVQALNDEVHALQTAEQSQQQAVHELSNKRGVLREQIARLEEQIRHRQNLHQRIERDKQAAQAQLQRIHQEQQQIRVQLEENELQAEEKQTELAEWAMQVAEHEERLPELEEAQTALNAAFQTRQDEANRIRRELALKQQQLAHAEQTVAKHEERKGRLKQENQALNLPDEAETAAAQEAAALLQNRQEHYEEQIIAAEEALHAAREAFQTASNRFQSLKQQHITLQAQQQALSQILSQQQEAADFWQATDHAAAPQLWQHITAPAEWQHALSVILAERLHARAVPQGFVPPEPLPQGQAAWLSDGLSGGIKKSLPVQALLNQIQAQPPFQTALHHWLDGVLCAPDLSYALAHQNDLGAHQIWLTPEGHQVDKVSVLLYAKPAQESLIAQKARLDGIASELDNLAPELSADEAAFKQAEAAVRSSEVQHKNLMQQQQQHTRQYSQAQQRAAELLARTNQGQIRREHIERELAQLAEEQTVLQHTSDGLSDDIVTLQEAAAELEHQQQTTAHSRQEQQGRLKQAQLALLEANRQYGLAEVAVHKLNQQKQNYQQQIARLEQQTFDWQERQQELALAYETEFQNDEQHIKLEELSEAVQTLDEEYIVVQEKLAQIQEQGREQYAKVQPLQTQLPQLQAATQTALLQQQEALINAKRYHQNLTERAADLDALEALTQESPKVLNSSIGSLTQQIEALGAVNLAALQELEEARERDGYYRSQSEDVQAAITLLEEAIAQIDDKTKARFKETFDAVNGKVQTFFPTLFGGGEATLKMIGDDLLTAGVSIMARPPGKKNSTIHLLSGGEKALTAMSLVFALFSLNPAPFCLLDEVDAPLDDANTSRFCRLVKEMSAQTQFLYISHNRLTMEMAEQLVGVTMQEKGVSRVVAVDIKQALEMAEAV

SEQ ID NO: 27851 - protein, 314 aa, Neisseria meningitidis
MYHKKFDKEILLKIKELYRYDNWHAVLAILYDYLIIIFSIFLSEQSYWFLPLTILLIGSRQRALATILHEASHSALTKNKKFGQILGTYFSGYLIFQSWNSYCVSHVKNHHPKLGTDSDPDYKYYKDSGIFQTYSRIEFFWRFCVSQILCLKLFRNFKYLIKNRLFSDITRTELFKLLLSQLILFVIGTYFVGYKFYVIYWLLPYLTAFQMITWFIELSEHYPMIQTAKNNLEASRNRFSHAIEHFFTGIHGENYHLIHHLFPAIPFWNLEKAHKILMKDFDYQEVNKDFGGIFFSKNNNAPMWKVLWSKYEAA

SEQ ID NO: 27852 - protein, 359 aa, Neisseria meningitidis
MNIQNIRTLLDTVAVPNTARTLGGEKAVRSVEQRSDGIHIALHFGFPVAHIASETADRIQEILMPLTGDTHIHLSMDTEIGTHKVQPGVTTIKGVKNIIAVASGKGGVGKSTTTANLAAAMARMGARVGVLDADLYGPSQPTMLGVHDRKPDQKNQKLIPVESSDGIQVMSIGFLVDTDQAVVWRGPMVSQALQQLMFQSEWDEVDYLFIDLPPGTGDIQLTLSQRIPVTGSVIVTTPQDIALIDARKAVDMFRKVNIPILGVLENMSVHICSNCGHSEALFGTDGGKDFAARLNVPLLGQLPLSLPVREAMDGGAAAQLFDEHPAIARIYTDAAFQIALSIADKGKDFSSRFPKIVVE

SEQ ID NO: 27853 - protein, 112 aa, Neisseria meningitidis; identical to SEQ ID NO: 3481

SEQ ID NO: 27854 - protein, 675 aa, Neisseria meningitidis
LSLSEFIERRTSFNLMVILTTLFFVCVLVVLVLTVPDQVQMWLDRAKEVIFTEFSWFYVLTFSIFLGFLLILSVSSLGNIRLGRDEDVPEFGFLSWLAMLFAAGMGVGLMFFGVAEPLMHYFSDITAGTPEHRQQQALLHTVFHWGVHAWSVYGTIALALAYFGFRYKLPLALRSCFYPLLKEKISGRFGDAIDIMALLATFFGIITTLGFGASQLGAGLQEMGWIAENSFSVQVLIIAAVMSLAVVSAISGVGKGVKVLSELNLSLAFLLLFFVLAAGPTVYLLSAFGDNIGNYLGNLVRLSFKTYAYEREHKPWFESWTVLYWAWWCSWAPFVGLFIARISKGRTIREFVFGVLLIPGLFGVLWFTVFGNTAIWLNDGVAGGMLEKMTSSPETLLFKFFNYLPLPELTSIVSLLVISLFFVTSADSGIYVLNNITSRDKGLSAPRWQAVMWGVLMSAVAVLLMRSGGLGNLQSMTLIVSLPFALLMLIMCFSLWKGLSADKKYFETRVNPTSVFWTGGKWKERLVQIMSQTQEQDILKFLKHTASPAMHELQRELSEEYGLSVRVDKMFHQDEPAIEFVIRKETMRDFMYGIKSVGQDVSDQLINDGKLPHIRHQTTYKPYAYFFDGRVGYDVQYMNKDELIADILKNYERYLMLLDDVGQELMAHEQVELAE

SEQ ID NO: 27855 - protein, 59 aa, Neisseria meningitidis; identical to SEQ ID NO: 25267

SEQ ID NO: 27856 - protein, 216 aa, Neisseria meningitidis; identical to SEQ ID NO: 2506

SEQ ID NO: 27857 - protein, 253 aa, Neisseria meningitidis; identical to SEQ ID NO: 5498

SEQ ID NO: 27858 - protein, 416 aa, Neisseria meningitidis
MTKLTRRQIIRRTAGTLFALSPIASAVAKTVRAPQFTAARIWPSHTYTRLTLESTAALKYQHFTLDNPGRLVVDIQNANINTVLHGLSQKVMADDPFIRSIRAGQNTPTTVRLVIDLKQPTHAQVFALPPVGGFKNRLVVDLYPHGMDADDPMMALLNGSLNKTLRGSPEADLAQNTPAQTERGKNGRRPVIMLDPGHGGEDPGAVSPGGLQEKHVVLSIARETKKQLEALGYNVFMTRNEDVFIPLGVRVAKGRARRADVFVSIHADAFTSPSARGTGVYMLNTKGATSSAAKFLEQTQNNADAVGGVPTSGNRNVDTALLDMTQTATLRDSRKLGKLVLEELGRLNHLHKGRVDEANFAVLRAPDMPSILVETAFLSNPAEEKLLGSESFRRQCAQSIASGVQRYINTSVLKRG

SEQ ID NO: 27859 - protein, 502 aa, Neisseria meningitidis
MQTDCDVLIAGNGLAALTLALSLPESFRIVILCKNRLDDTASRHAQGGIAAAWSGEDDIEKHVADTLEAGAGLCDEAAVRTILSQGKLAIEWLLAQGVAFDQNNNGLHLTREGGHTCRRIAHVADYTGEAVMQSLTVQIRCRPNIRVCEQQMALDIQTESGAACGLTVLDCRTQATYSIRARHTVLAGGGLGQIYAATTTPPECTGDAIAMAIRAGCAVENLEFIQFHPTGLARSSENGRTFLISEAVRGEGGILTNQAGERFMPYYDRRAELAPRDIVARAIAAEIAKQTQDFVSLDISHQPAAFVRRHFPSIHRHCLSQCGLDITRQAIPVRPVQHYTCGGIQTDPCGRTSLPQLYSLGETACTGLHGANRLASNSLLECVVTARLTAQTIADGQAFQTATSQRSSENTSAEADIFSDDLQNAFSRPTLQAFNQRHLGIIRNDTGLRCAIAQLRLWKQNQTEPHTASEYENRNLLECSLAVAQAAYRRRQNIGAHFNSDC

SEQ ID NO: 27860 - protein, 51 aa, Neisseria meningitidis; identical to SEQ ID NO: 3530

SEQ ID NO: 27861 - protein, 205 aa, Neisseria meningitidis
LSTDISAFWEVIDPEMPDCEVVLTAKGYKLDGAKGLKVVLRITDNAGNTPKSVDYLQLFDKIPLFVEFSDLQTQHIRCSATLESLDLGGLSKSERKRVSSKISSDTDILNELRGKIVDTDFIFREVSDKALLDGLPELHGGHILVVWHPRSSLSKVDTAKLLDGLRGRLLAELSRYNLKFLNVPLHFLTVEAYACRYGCPTASDT

SEQ ID NO: 27862 - protein, 353 aa, Neisseria meningitidis
MSKNAQKTLLAVCSFEVQPKDGRIQLLPYGEFRAVDGRPTDVPAWYLTEENGHDVALLANSSRNQLVVDYEHQTLYKEKNGQPAPAAGWMRWLEFTPKGMFAEVEWTDKAAAAIAAKEYRYISAVFSYDTKGYVSKIFHAALTNFPALDGMDEVLAAASAQILKPETEQNPMKELLQQLFDLPDAGEEELKAALSALVEAKPKDVALSADVFAQLAEKDSRIAALTAQTAKPDLTKYAPISVVQELQSKVAALTAKQEADKGNELITAALTSGKLLPAQKEWAKGVLKQPGGLAFLTGFIENAQPVAALAGSQTGGKAPDERVAALTAEEAAAAKMLGMSGEEFVKIKESEGK

SEQ ID NO: 27863 - protein, 272 aa, Neisseria meningitidis; identical to SEQ ID NO: 7451

SEQ ID NO: 27864 - protein, 169 aa, Neisseria meningitidis; identical to SEQ ID NO: 219

SEQ ID NO: 27865 - protein, 384 aa, Neisseria meningitidis; identical to SEQ ID NO: 3177

SEQ ID NO: 27866 - protein, 335 aa, Neisseria meningitidis
MSTFFQQTAQAMIAKHIDRFPLLKLDQVIDWQPIEQYLNRQKTRYLRDHRGRPAYPLLSMFKAVLLGQWHSLSDPELEHSLITRIDFNLFCRFDELSIPDYSTLCRYRNRLAQDDTLSELLELINRQLTEKGLKIEKASAAVVDVTIIQTADSKQRQAIEVDEEGQINGQTTPSKDKDARWIKKNGLYKLGYKQHTRTDAEGYIGKLHITPANAHECKHLSPLLEGIAEGTTVYADKGYDSAENRQHLEEHQLLDGIMRKACRNRPLTETQTKRNRYLSKTRYVVEQSFGTLHRKFRYARAAYFGLIKVSAQSHLKAMCLNLLKAANRLSAPVAA

SEQ ID NO: 27867 - protein, 129 aa, Neisseria meningitidis
MSKTIIHTDKAPAAIGAYSQAVRAGDTVYMSGQIPLDPATMTVVGNGDFRAEARRVFQNLQAVAEAADGSLDDIVKLNAYLTDLGNFAVFNEVMAEFIAEPFPARAAVGVASLPKGVQVEAEAVLVLNA

SEQ ID NO: 27868 - protein, 280 aa, Neisseria meningitidis
MLVCNPYEVVIHGTTSSGKIFRPSDWAERLCGILSSFTKDHRLSYSKWVRPILVDNIRCVAVDKKLETDNPQMFRFLMDFAADNDLRVIDCKALLEEREQGGQNNPADEHVMLAQAIEEKHAAEKAQEQTASGASYVLREIGADDTATAFAALSVLRSALTDINRFTEQINKVQRPQGYRLLGIFEEGKHNAVAVCGFREACTLAGGRHIHIDDIVTLPQSRRKGYASRLLEEVRKIGAETRVTKIHLNVHVNHDRADAHRLYFKNGFEICAYHFRCDPK

SEQ ID NO: 27869 - protein, 194 aa, Neisseria meningitidis
MISRLTGKLVEKNPPQIVIDVNGVGYEADVSMQTFYNLPPVGESVQLFTQLIIREDAHLLFGFATAEERKTFRQLIKVGGIGAKTALGILSAMTADELARAVAEEDVKRLSSAPGIGKKTAERMVLELRGKLVAHTVTDGLFAAAPAADETEDIVSTLLALGYSEREAKAAVKGVPKGTDVGEGVRLALKNLLK

SEQ ID NO: 27870 - protein, 148 aa, Neisseria meningitidis; identical to SEQ ID NO: 4244

SEQ ID NO: 27871 - protein, 335 aa, Neisseria meningitidis; identical to SEQ ID NO: 26749

SEQ ID NO: 27872 - protein, 470 aa, Neisseria meningitidis
LLFEFKENKMIVASRWPLLEKVFLRFGMPVAVVDLESTGGNLYEDRVTEVALVKFEQGRVVRHEWLVNPQKPIPQFVAGLTGISDGMVADAPVFAEIAGELFSVLKGCVLVAHNSRFDYTFLKHEFHRAGIGFSSPALCSVQLSRCLYPQFYKHSLDSIIERLGIVVEDRHRAMADVSALCDYLEYSLSEHGVEEWIRQCFRLMNPKPLPAALPERLREQLYGLPDGMGVLACFDGGGKVNYIGTFERVYSEVSALLDSGKAPFDWCNTEEVRFFPALGRLHAHKVKAELVRHYGVDCYVSAKNLLKTFTTVRFEKGSDGMLNAKTAALKNGVTDNPPTGLFANKKAARRALSSWAETYGLCPASAGILPDGYAEDEPCSVYVSGRCDKACDRSDEQVLAFAHKLPVLDWGKMHEVEITETDPLTGKTVVLHGMGGALEMDDGLWYFDKDLPDVFKAKFKTDRKNIKEIG

SEQ ID NO: 27873 - protein, 160 aa, Neisseria meningitidis; identical to SEQ ID NO: 1377

SEQ ID NO: 27874 - protein, 389 aa, Neisseria meningitidis; identical to SEQ ID NO: 3300

SEQ ID NO: 27875 - protein, 655 aa, Neisseria meningitidis; identical to SEQ ID NO: 15146

SEQ ID NO: 27876 - protein, 100 aa, Neisseria meningitidis
MKTSKIIAGLMLAVAVQTASAAVYECRQNGKVSYSQTPGKHCTNAGLGRDRVYSSVRPAVKDRAEDAGVGDYSDTVRDEHVQNPRENTHKDASNTGAKTH

SEQ ID NO: 27877 - protein, 91 aa, Neisseria meningitidis; identical to SEQ ID NO: 5612

SEQ ID NO: 27878 - protein, 642 aa, Neisseria meningitidis
LTLYAVEELNYDKLDSQKRRRFLGISYSKAHDTTTQVMKTALPSRVVAESANLQSGWDTKLQGTQFETTLGGATIRAGVGEQARADAKIILEGIKTTIHNETVSSSKSALWQKQAGRGSNIETLQLPSFTGPVAPVLTAPGGYIADIPKGNLKTEIETLTKQPEYAYLKQLQVAKNINWNQVQLAYDRWDYKQEGLTEAGAAIIALAVTVVTSGAGTGAVLGLNGAAAAATDAAFASLASQASVSFINNKGDVGKTLKELGRSSTVKNLVVAAATAGVADKIGASALNNVSDKQWINNLTVNLANAGSAALINTAVNGGSLKDNLEANILAALVNTAHGEAASKIKQLDQHYIVHKIAHAIAGCAAAAANKGKCQDGAIGAAVGEIVGEALVKNTDFSRMSATEIEKAKANITAYAKLVAGATVGVTGGNVDVAANASETAVKNNALDIIWDIGNLVWDGGKWIYAKSIGDKQMAREAAIDFGVDAAAAAVPFVPAGATKISRGGAYVLKAGDEAVDTAKAIQEIQKQTGIKLTYDKVNKVWTTPAGLDYGLDAKHGNRIKHVLAHTIPNPNKPVHSVFNVSRKEVLPLVDEAWRMKGNPLPNDSSVYLVDMKKPIGTKGETKVRIVVQKGTNKIISAYPQK

SEQ ID NO: 27879 - protein, 306 aa, Neisseria meningitidis
MRIRLGRHNAPDFPHGAAVTIGNFDGVHLGHKHILQKLRLEADARGLPVVAVIFEPQPKEFFAALAGKTPPCRISPLRTKLELLEGTGCVDAVWVLRFDQNFSEISAQAFIDRLLRQTLNTRYLLVGDDFRFGAGREGCFELLAQQPDMQTERTPSVIVEDIRTSSTAVRQALSDGNLAYAKKLLGHDYVLSGRVVHGRKLGRTLNAPTANIRLPGHRYALGGVFVVEADGTFGTRRGVASFGFNPTVDSGCSQKLEVHLFDFQGDLYGQRLNVRFLHKLRDEEKFDGMEELKRQIAADMEAAKCW

SEQ ID NO: 27880 - protein, 143 aa, Neisseria meningitidis; identical to SEQ ID NO: 28

SEQ ID NO: 27881 - protein, 70 aa, Neisseria meningitidis; identical to SEQ ID NO: 19466

SEQ ID NO: 27882 - protein, 592 aa, Neisseria meningitidis
MTVLKLSHWRVLAELADGLPQHVSQLARMADMKPQQLNGFWQQMPAHIRGLLRQHDGYWRLVRPLAVFDAEGLRELGERSGFQTALKHECASSNDEILELARIAPDKAHKTICVTHLQSKGRGRQGRKWSHRLGECLMFSFGWVFDRPQYELGSLSPVAAVACRRALSRLGLDVQIKWPNDLVVGRDKLGGILIETVRTGGKTVAVVGIGINFVLPKEVENAASVQSLFQTASRRGNADAAVLLETLLAELDAVLLQYARDGFAPLVAEYQAANRDHGKAVLLLRDGETVFEGTVKGVDGQGVLHLETAEGKQTVVSGEISLRPDDRPVSVPKRRDSERFLLLDGGNSRLKWAWVENGTFATVGSAPYRDLSPLGAEWAEKADGNVRIVGCAVCGEFKKAQVQEQLARKIEWLPSSAQALGIRNHYRHPEEHGSDRWFNALGSRRFSRNACVVVSCGTAVTVDALTDDGHYLGGTIMPGFHLMKESLAVRTANLNRPAGKRYPFPTTTGNAVASGMMDAVCGSVMMMHGRLKEKTGAGKPVDVIITGGGAAKVAEALPPAFLAENTVRVADNLVIHGLLNLIAAEGGESEHT

SEQ ID NO: 27883 - protein, 470 aa, Neisseria meningitidis; identical to SEQ ID NO: 12843

SEQ ID NO: 27884 - protein, 520 aa, Neisseria meningitidis
LFEVMKKPLISVAAALLGVALGTPYYLGVKAEESLTQQQKILQEAGFLTVESHQYERGWFTSTETTVIRLKPELLNNARKYLPDNLKTVLEQPVTLVNHITHGPFAGGFGTQAYIETEFKYAPETEKVLERFFGKQVPVSLANTVYFNGSGKMEVSVPAFDYEELSGIRLHWEGLTGKTVYQKGFKSYRNSYDAPLFKIKLADKGDAAFEKAHFDSETSDGINPLALGSSNLTLEKFSLEWKEGVDYNVKLNELVNLVTDLQIGAFINPNGSIAPSKIEVGKLAFSTKTGESGAFIDSEGQFRFGTLVYGDEKYGPLDIHIAAEHLDASALTVLKRKFAQISAKKMTEEQIRNDLIAAVKGEASGLFTNNPVLDIKTFRFTLPSGKIDVGGKIMFKDLKKEDLNQLGLMLKKTEADIRMSIPQKMLEDLAVSQAGNIFSVNAEDEAEGRASLDDINETLRLMVDSTVQSMAREKYLTLNGDQIDTAISLKNNQLKLNGKTLQNEPEPDFDEGGMVSEPQQ

SEQ ID NO: 27885 - protein, 95 aa, Neisseria meningitidis; identical to SEQ ID NO: 440

SEQ ID NO: 27886 - protein, 214 aa, Neisseria meningitidis
VTRPAKINTYTRIIDASLALFNEEGERNISTNHIAAHLGISPGNLYYHFRNKDEIIVQLFKRYSEALLEYLNEAVLPSDVEDSINYMAGIYDVMWEYRFLFSDVNTLLARSAELLGEHNTFTQAKVSPLLVNLLTQLNGLNIIQADQTAMNDLAVNMWMVTKYWFDFDSSLRGRTKLTEDSKARGVRRTLSLLRPYLLPEHREKYDRKIGNGNP

SEQ ID NO: 27887 - protein, 84 aa, Neisseria meningitidis; identical to SEQ ID NO: 3171

SEQ ID NO: 27888 - protein, 60 aa, Neisseria meningitidis; identical to SEQ ID NO: 4780

SEQ ID NO: 27889 - protein, 171 aa, Neisseria meningitidis; identical to SEQ ID NO: 24572

SEQ ID NO: 27890 - protein, 762 aa, Neisseria meningitidis
MLAPELEQILQQLYREARKAHYEFISLEHLLLVLIEEDASVHNVLKLCGADLKVVSEQLAASVAENTPLIPEHLLDTVETRPTLGFQRVMQRAMVHTQSAGKAAVEPLDVLVALMSETDSHTVYFLKLQSVTRFEVLRCIAHGSPDEDEDEDEDDGNYSSDGMDDDNGNRTKPGKNPLSAYTVNLNAEVKAGRIDPLIGRKHEMERLVQILCRRRKNNPLLVGEAGVGKTALAEGLAHQIVNGGIPDALKDAEVYALDMGSLLAGTKYRGDFEARVKSVLKQLEKIPHAILFIDEIHTIIGAGSTSGGTMDASNLLKPALAKGSLRCIGATTYDEYRTIFDKDHALSRRFQKIDVVEPTVSETVQILRGLKPMFEAFHQVRYTQGALEAAAELSARYINERFLPDKAIDVMDEAGAAQRILPKSKQKKVIGKAQIETVIAKVARIPEKTVSHDDKQVLQFLGRDLKNMVYGQENAIDTLVAAVKMSRSGLALPDKPIGSFLFSGPTGVGKTEAAKQLAYSMGVPLQRFDMSEYMERHAVSRLIGAPPGYVGFEQGGLLTEAVNKQPHCVLLLDEIEKAHPDIFNVLLQVMDAGKLTDNNGKSADFRNVILIMTTNAGAESLSRPSLGFTAKRERGDEMQAINKLFTPEFRNRLDAIIPFAPLSEPIIVKVVDKFLLQLEHQLLDKKVEAEFTPALHKYLAEKGFDPQMGARPMHRLIQEKIRKPLADELLFGKLSDGGFVRIDWDAAKEEAVLKFKKSKVKI

SEQ ID NO: 27891 - protein, 76 aa, Neisseria meningitidis; identical to SEQ ID NO: 19491

SEQ ID NO: 27892 - protein, 96 aa, Neisseria meningitidis
MAKYFTETGIGVREHFDFFGEFVVSPAARSGDLALAYGLRLEAGEEGLSLAELFDKRSDSQEPVECGRIDIGGFMLTAKEVDGDGNIGSMGLKVLR

SEQ ID NO: 27893 - protein, 262 aa, Neisseria meningitidis; identical to SEQ ID NO: 24738

SEQ ID NO: 27894 - protein, 107 aa, Neisseria meningitidis; identical to SEQ ID NO: 9670

SEQ ID NO: 27895 - protein, 343 aa, Neisseria meningitidis
MLQTDNLTAAQPQRIVAAQTASAQEELLERALRPKTLDDYIGQHKAKEQLAIFIQAAKKRGEALDHVLLFGPPGLGKTTLAHIIAKELGVNLRQTSGPVLERAGDLAALLTNLDPHDVLFIDEIHRLSPVVEEILYPALEDYRLDIMIGEGPAARSVKIDLPPFTLVGATTRAGMLTNPLRDRFGIVSRLEFYENRDLTTIVSRSAQLLQLDMSEEGAEEIAKRSRGTPRIANRLLRRVRDFADVKNNGTIDGGIADAALSMLDVDAQGLDVMDRKFLEAVLHKFGGGPVGLDNVAAAIGESTDTIEDVIEPYLIQQGFLQRTPRGRMATERAYLHFGLPVEK

SEQ ID NO: 27896 - protein, 359 aa, Neisseria meningitidis
MYDPLYFPRSELAEIIAKSLYGGITHAFTLFAPRRMGKTQFLLKDIKPTAEAAGFNVFYFSFMDSTAPTVDFQAALLRFAESIKTGGKVQNLIGQISKIEIMGSSIERRTERQQAELRLSDIIADIAGGSRPSLLLLDEIQELARQPDTGGLIRSLRTGLDIHQQQVKTIFTGSSTNGLRAMFNDIKAPFFHFAHALDFPTLGREFTDFLAGVYQERTGRGLDGGELYRAFERLNKTPLYMRAMLQDMIINPDLSIEQAESIRLEEMHKHADTAAQWRHLSLIEQLILSELANGQTAIYSVQTRQALARVIGVDDIGTSTVQNNIRKLERKDLITRDGANRLQINSPILKTWILENVER

SEQ ID NO: 27897 - protein, 469 aa, Neisseria meningitidis
MTSTFPRRLARKIRQTRRLSRKSIAFLFLLAGSALVALTALFFAHLADFALELNAKLVQQYPWFAWVALPLGLPLIAWLTRKFAPFTAGSGIPQVIASLSLPYGAQKTRLIRLGQTLLKIPLTFLGMLFGASIGREGPSVQVGAAVMGAWGAWCKKHGLAFKGMQENDLMAAGAAGGLAAAFNAPLAGVIFAIEELGRGIMLRWERQILLGVLASGFIQVAIQGNNPYFSGFNGGVLEHIFLWVALSGLVCGAAGGLFGRLLYRGAAAFAPRKIRGFIRNRPLLLAALMGLLLALLGTFYQGKTYGTGYHEAAQALHGIYEAPFGLAAAKWLATVFSYWAGIPGGIFTPSLTIGAVLGEHIAAIADISQGANIIVLICMAAFLAGATQSPITSAVVVMEMTGGQSLLFWMLIACIFASQVSRQFSPRPFYHASGMRFRQRVLQETAAQTGNAPARPQTANSKTGMPSEN

SEQ ID NO: 27898 - protein, 225 aa, Neisseria meningitidis
MQADFNRPVLAVDTGTSYLSLALRADGETRLFHQEAGSRQSELILPEIRTLFRNAGITAADLGAIVYAKGPGAFTGLRIGIGVAQGLATPFDTPLIGIPTLDAAASLPPPQSCILAAADARMGEVFYAWFDTLNRRRLSDYQVGRAADIRLPEGCAFSDGIGSAFALEETPPFSGKPDMPTAADFLNLAAEGGFPAVAAAHAELLYVRNKIALTAKEQAERKART

SEQ ID NO: 27899 - protein, 105 aa, Neisseria meningitidis; identical to SEQ ID NO: 18770

SEQ ID NO: 27900 - protein, 157 aa, Neisseria meningitidis
MSRNTEELQGISLLGNQKTQYPAEYAPEILEAFDNKHPDNDYFVKFVCPEFTSLCPMTGQPDFATIYIRYIPHIKMVESKSLKLYLFSFRNHGDFHEDCVNIIMKDLIALMDPKYIEVFGEFTPRGGIAIHPFANYGKAGTEFEALARKRLFEHDSQ

SEQ ID NO: 27901 - protein, 431 aa, Neisseria meningitidis
MIRPDFQEYLPSYYFSSVNPHTVYPKLQCRLKTDTCIIGGGLSGLCTALPLAEQGHETVVLEAARIGFGASGRSGGQVISDYACGMEEIEKQVGLEQAQWFWQQSLQAVELVDERVRKHAIDCDWQRGYATVAIRSQHWEELQQWHEHAQKYYGATHYQLWDNTELKQQLDSDMYQGAQFDPLSGHLHPLNYTLGVAGAAAEAGAQIFEQSPMTRIEPHQNGWLVYTPEGSVECKNVVYAVNTYAGLKPIFKPLERKAIAVSTFIIATEPLGERGQGLIRNNMAVCDNRHILDYYRLSADGRLLFGGKDNEFIDNPERMTELVRQDMLKVFPQLADVKIEYSWGGECDITANLVPHFGRLAPNVFYTQGYSGHGMAITGIAGLAVAEAILGDECRLKPFERLRQPNIILQPFLRKLGSFLGSKYYQWKDSR

SEQ ID NO: 27902 - protein, 49 aa, Neisseria meningitidis
VNIFYGEYKKDFYSYVPFMESQGITGECIWEGDLFDHPYYEDENSNGMD

SEQ ID NO: 27903 - protein, 188 aa, Neisseria meningitidis
LNIKYSGIENRFETAILKKNGVRSGFVSFAPNLAAVKLNDYAKVRKRITKTKQKADIVIVMFHGGAEGKQAEHLPFDTEIFYGENRGNVVEFARLAVDSGADVVFGQGPHVTRAVELYRDRFISYSGGNFATYGAINTSGISGIAPIFKIITDKQGKFISGTIIPITQADDKIPKIDPEKPLSGGLFI

SEQ ID NO: 27904 - protein, 212 aa, Neisseria meningitidis; identical to SEQ ID NO: 324

SEQ ID NO: 27905 - protein, 369 aa, Neisseria meningitidis; identical to SEQ ID NO: 22083

SEQ ID NO: 27906 - protein, 163 aa, Neisseria meningitidis
MKYRRFYRNGGTYFFTVATNKRQRILTDDAVRLALRQAVMAVRERYPFEILAWVLMPDHLHTIWRLPDNDSAYSERWRQIKRHSKYLIGGNLRLWQKRFWEHTIRDEADFACHFDYLHFNPVKHGYVGQISDWGFSTFHRYVKQGIYPHNWGGGNADFSIGYD

SEQ ID NO: 27907 - protein, 414 aa, Neisseria meningitidis
MSNENRTCSFCGKSKSHVKHLIEGENAFICDECVSNCIEILHEDGNDGTPPESAGGEPEESGKLPTPAEIVANLNDHVIGQEQAKKALAVSVYNHYKRLRHPKAEGKVELSKSNILLIGPTGSGKTLLAQSLARKLDVPFVMADATTLTEAGYVGEDVEQIITKLLGKCDFDVEKAQRGIVYIDEIDKISRKSDNPSITRDVSGEGVQQALLKLIEGTVASVPPQGGRKHPNQEFINVDTTNILFICGGAFAGLEKVIRQRTEKGGIGFGASVHSKDENADITKLFGIVEPEDLIKFGLIPELIGRLPVIATLEELDEDALINILTEPKNALVKQYQALFGMENVELEFEEGALRSIARQAMERKTGARGLRSIVERCLLDTMYRLPDLKGLKKVVVGKAVIEEGREPELVFES

SEQ ID NO: 27908 - protein, 205 aa, Neisseria meningitidis; identical to SEQ ID NO: 8342

SEQ ID NO: 27909 - protein, 259 aa, Neisseria meningitidis
MNGIIIKTPEEIEKMRELGKLVAEALDYIGQFVKPGITTDEIDKLVYDYHVNVQGGYPAPLHYGNPPYPKSCCTSVNHVICHGIPDNKPLKEGDIINIDLTIKKDGFHGDSSRMFTVGKVSPIAQRLIDVTHASMMAGIEAVKPGATLGDVGYACQQVAENAGYSVVQEFCGHGIGRGFHEAPQVLHYGKKGQGPVLKPGMIFTVEPMINQGKRHLRILNDGWTVVTKDRSLSAQWEHEVLVTETGYEILTVSPASGKP

SEQ ID NO: 27910 - protein, 54 aa, Neisseria meningitidis; identical to SEQ ID NO: 2207

SEQ ID NO: 27911 - protein, 195 aa, Neisseria meningitidis; identical to SEQ ID NO: 4477

SEQ ID NO: 27912 - protein, 100 aa, Neisseria meningitidis; identical to SEQ ID NO: 1476

SEQ ID NO: 27913 - protein, 187 aa, Neisseria meningitidis; identical to SEQ ID NO: 3051

SEQ ID NO: 27914 - protein, 166 aa, Neisseria meningitidis
MNAMPQTAAQNETLHICSIIVDDAQDFSPMLLDAGRDDTLISESMIPQIRTVAALIAAERHDFSRSSPAEFTDAADFFAARILVLGVRRFHLDVSLLQILKTANSRARRFAEKHRLFFTPAQAELSLNKHKNRRLLTVETEHEVENKGNPVANSLAFVRKLHTLPL

SEQ ID NO: 27915 - protein, 169 aa, Neisseria meningitidis; identical to SEQ ID NO: 111

SEQ ID NO: 27916 - protein, 151 aa, Neisseria meningitidis
MDLRKLKKLIDLVEESGIAEIEVTEGEEKVRIIRTIAAAPVYAAPVPAAAPAVTPAAAPVAASAPAAAPAARDLSDAQKSPMVGTFYRAPGPNAAPFVEVGQQVKAGDTLCIIEAMKLMNEIEAEKSGTVKEILVENGTPVEFGEPLFIIG

SEQ ID NO: 27917 - protein, 208 aa, Neisseria meningitidis
MYTGERFNTYSHLSGLILAAAGLALMLLKTIGHGDGYRIFSVSVYGISLLLLYLSSSLYHGIAAGKLKSILKKTDHCMIYVLIAGSYTPFALISLRNGPGWTVFSLSWLLAAAGIAQELTIGRKSEKRLLSIVIYVVMGWMVLAVMKSLTASLPSAGLAWLAAGGMLYSVGIYWFVNDEKIRHGHGIWHLFVLGGSITQFVSVYGYVI

SEQ ID NO: 27918 - protein, 430 aa, Neisseria meningitidis; identical to SEQ ID NO: 1670

SEQ ID NO: 27919 - protein, 368 aa, Neisseria meningitidis; identical to SEQ ID NO: 12897

SEQ ID NO: 27920 - protein, 593 aa, Neisseria meningitidis
MNKIYRIIWNSALNAWVVVSELTRNHTKRASATVETAVLATLLFATVQASANNEEQEEDLDPVQRTVAVLIVNSDKEGTGEKVEENSDWAVYFNEKGVLKAGTITLKAGDNLKIKQNTDENTDENTNASSFTYSLKKDLTDLTSVGTEELSFGANGNNKVNITSDTKGLNFAKKTAGTNGDTTVHLNGIGSTLTDTLLNTGATTNVTDDEKKRAASVKDVLNAGWNIKGVKPGTASDNVDFVHTYDTVEFLSADTKTTTVNVESKDNGKRTEVKIGAKTSVIKEKDGKLVTGKGKGENGSSTDEGEGLVTAKEVIDAVNKAGWRMKTTTANGQTGQADKFETVTSGTNVTFASGKGTTATVSKDDQGNITVKYDVNVGDALNVNQLQNSGWNLDSKAVAGSSGKVISGNVSPSKGKMDETVNINAGNNIEITRNGKNIDIATSMTPQFSSVSLGAGADAPTLSVDDEGALNVGSKDANKPVRITNVAPGVKEGDVTNVAQLKGVAQNLNNRIDNVDGNARAGIAQAIATAGLVQAYLPGKSMMAIGGGTYRGEAGYAIGYSSISDGGNWIIKGTASGNSRGHFGASASVGYQW

SEQ ID NO: 27921 - protein, 693 aa, Neisseria meningitidis
MKSLKTFLIWGIVVLVGLASFTTLALSRGEQVSAVWMVTAAISVYCIAYRFYSLYIANRVMRLDPNRLTPAERHNDGLDYVPTHKGVLFGHHFAAIAGAGPLVGPVLAAQMGYLPGTLWIIFGVVFAGAVQDMMVLFVSMRRDGKSLGDIVKQELGTVPGVIASIGILMIMVIIMAVLALIVVKALVHSPWGTFTIAATMPIALFMGIYTRYIRPGKIGEISIVGFILLMLAVIYGEDVAKSSIGHWFDLDGIQLTWAIMIYGFVASVLPVWLLLTPRDYLSTFLKIGTIAALALGIVIVNPTLQMPAVTHFIDGSGPVFSGALFPFLFITIACGAVSGFHALISSGTTPKMLENETHVRMIGYGGMLMESFVAIMALAAAASLDPGVYFAMNSPAALIGTDANTAAEVITTKLQFPVDAATLLHTAKEVGENTILSRAGGAPTLAVGMAHIMSRLIPGEAMMAFWYHFALLFEALFILTAVDAGTRVARFMIQDLGSIFYKPFGNTDSIPANLIATFFAVALWGYFLYTGVTDPLGGINSLWPLFGIANQMLAGVALIMCAVVLIKMKRDRYVWVVLVPAVGVLFVTCYAGLQKLFHSDPRISFLAHAGKYSDALAKNEILAPAKDIGEMAQIIFNDKINAGLTILFLSVVVIVAAYGLRTALKARKVGWPTAKEIPAVYRDGKQPEAQSEA

SEQ ID NO: 27922 - protein, 219 aa, Neisseria meningitidis
LCASCLNVNKIVIIATFYRNPERPSEMRNEEKHALRRELRGRRSQMGWDVRAAATVKINRLLKRYIKHGRKIGVYWPMGKELRLDGFVRAAQKRGAKLYLPYIEPRSRRMWFTPYPESGMERERIRGRARLNVPQFAGRKIRVHGLSVLLVPLVGIDREGYRLGQAGGYYDATLAAMKYRLQAKTVGVGFACQLVGTLPREAHDLPLDGFVSEAGILCF

SEQ ID NO: 27923 - protein, 109 aa, Neisseria meningitidis; identical to SEQ ID NO: 2743

SEQ ID NO: 27924 - protein, 716 aa, Neisseria meningitidis
MKTPLLKPLLITSLPVFASVFTAASIVWQLGEPKLAMPFVLGIIAGGLVDLDNRLTGRLKNIIATVALFTLSSLTAQSTLGTGLPFILAMTLMTFGFTILGAVGLKYRTFAFGALAVATYTTLTYTPETYWLTNPFMILCGTVLYSTAIILFQIILPHRPVQESVANAYDALGGYLEAKADFFDPDEAAWIGNRHIDLAMSNTGVITAFNQCRSALFYRLRGKHRHPRTAKMLRYYFAAQDIHERISSAHVDYQEMSEKFKNTDIIFRIHRLLEMQGQACRNTAQALRASKDYVYSKRLGRAIEGCRQSLRLLSDSNDNPDIRHLRRLLDNLGSVDQQFRQLRHSDSPAENDRMGDTRIAALETGSLKNTWQAIRPQLNLESGVFRHAVRLSLVVAAACTIVEALNLNLGYWILLTALFVCQPNYTATKSRVRQRIAGTVLGVIVGSLVPYFTPSVETKLWIVIASTTLFFMTRTYKYSFSTFFITIQALTSLSLAGLDVYAAMPVRIIDTIIGASLAWAAVSYLWPDWKYLTLERTAALAVCSNGAYLEKITERLKSGETGDDVEYRATRRRAHEHTAALSSTLSDMSSEPTKFADSLQPGFTLLKTGYALTGYISALGAYRSEMHEECSPDFTAQFHLAAEHTAHIFQHLPETEPDDFQTALNTLRGELDTLRTHSSGTQSHILLQQLQLIARQLEPYYRAYRQIPHRQPQNAA

SEQ ID NO: 27925 - protein, 1277 aa, Neisseria meningitidis
MTTTTAPQRIREIPYNYTSYTDREIVIRLLGDEAWQILQDLRGQRKTGRSARMLFEVLGDIWVVVRNPYLVDDLLEHPKRRAALVREMRHRLNEIRKRRDDNRQVDVLVAAAEKAVERFDSSFDETIQKRHQILERLSKITKPHNIMFDGLARVTHVTDATDWRVEYPFVVVNPDTEAEIAPLVRALIELDLVIIPRGGGTGYTGGAVPLDANSAVINTEKLDKHRGVEYVELAGLDGKHPIIRCGAGVVTRRVEETAHQAGLVFAVDPTSADASCVGGNVAMNAGGKKAVLWGTALDNLACWQMVNPQGEWLRIERVRHNFGKIHDEETAVFDVHTLDSDGLNIVKTERLEIPGHKFRKVGLGKDVTDKFLSGLPGVQKEGTDGIITSVAFVLHKMPKHTRTVCMEFFGTVATATPSIVEIRDFLLAHDSVRLAGLEHLDWRYVRAVGYATKAAGKGRPKMVLLADVVSDDEAAVEAAAEHICELARARDGEGFIAVSPEARKTFWLDRSRTAAIAKHTNAFKINEDVVIPLERLGEYSDGIERINIELSIQNKLKLCAALEQYLSGKLPIDKMGTDLPTAELLGERGKHALAHVSAVKARWEWLLANLDAPLADYKARYGSAVHAAPEAKDNESCFTAFRDFRLRVSVKADVMKPLSEIFSGKTDTKIIQGLGKIHAKTVRSRVFVALHMHAGDGNVHTNIPVNSDDAEMLQTAYRSVERIMKIARSLGGVISGEHGIGITKLEFLTDEDLQPFWNYKHQVDPKHTFNRHKLMKGSDLSNAYTPSFELLGAESLIMEKSDLGTIADSVKDCLRCGKCKPVCSTHVPRANLLYSPRNKILGVGLLTEAFLYEEQTRRGVSIKHFEELMDIGDHCTVCHRCVKPCPVNIDFGDVTVAVRNYLANSGHKRFAPAASMGMAFLNATGPKTIKALRAAMIQTGFPAQNFAYKIGKLLPIGTKKQKAEPKATVGKAPIKEQVIHFINRPLPKNVPAKTPRSLLGIEDGKSIPIIRNPAAPEDAEAVFYFPGCGSERLFSQIGLAVQAMLWHVGVQTVLPPGYMCCGYPQDAGGNKAKAEEMSTNNRVAFHRMANTLNYLDIKTVVVSCGTCYDQLEKYRFEEIFPGCRIIDIHEYLLEKGVKLDGVKGQQYLYHDPCHTPIKTMNATQMASSLMGQKVVLSDRCCGESGMFAVKRPDIATQVKFRKQEEIEKNLKELPQGEPVKMLTSCPACLQGLSRYADDNNMPADYIVIEMAKYILGENWLDEFVKKANNGGVEKVLL

SEQ ID NO: 27926 - protein, 266 aa, Neisseria meningitidis
MNAFNLIIIGDEILHGSRQDKHFVFFKSLLESKGLKLNQVQYLPDEPDLLVRQLRRSFSDGIPTFVTGGIGATPDDHTRQAAAAALELPVVRHPEAAGFIEGITQKRGEPLDSPEHAQRLKMADFPEGAELVPNPFNNIAGFSIREHYFFPGFPVMAHPMAEWVLETYYADRFNQTERGSRSVYVFEQPESRITPLMEYIEQTYLGVRSYSLPSVGWTHSDGTQVKPHIEFGIKAEGEAVNLLDAAWAEVLHSLEGLGAELKNRVN

SEQ ID NO: 27927 - protein, 82 aa, Neisseria meningitidis
MASSNVNNEIKGKKLSLWAKRQNGSVKWFCGQPVARAAKDDTIKAATDTTTNINTKHLPSTCRDDSSAVCIETPPTAFYKNT

SEQ ID NO: 27928 - protein, 162 aa, Neisseria meningitidis
MLKITLIAACAENLCIGAGNAMPWHIPEDFAFFKAYTLGKPVIMGRKTWESLPVKPLPGRRNIVISRQADYCAAGAETVASLEAALALCASAEETVIMGGAQIYGQAMPLATDLRITEVDLSVEGDAFFPEIDRTHWKEAERTERRVSSKGTSYAFVHYLRY

SEQ ID NO: 27929 - protein, 251 aa, Neisseria meningitidis; identical to SEQ ID NO: 2955

SEQ ID NO: 27930 - protein, 420 aa, Neisseria meningitidis
MSNTQKQLALAKAAKKSVNTADTEEKNRALFAMADSLEAAAADILAANRQDLEAAAGNIPESMTDRLLLDGKRICAMADGIRAVAALPDPVGEILETSTLPNGLEIVKKRVAMGVIGIIYESRPNVTSDAAALALKSGSAVVLRSGKDAFQSARAIVAALKTGLAQTRIDPDALQLIEDTGREGSYEMMRAKDYLDLLIPRGGAGLIRAVVENAVVPVIETGTGIVHIYVDKDADLEKAIRIVRNAKTSRPSVCNSMEVLLVHEDIAADFLPKLERLLVRDRIEAGLPPVRFRLDPQAARHIGGEAAGADDFDTEFLDYILAVKTVASVEEAVGHIETHGTHHSDGIVTENRHAADYFTTHIDSAAVYINVSTRFTDGGEFGLGCEMGISTQKLHARGPMGLKELTSYKYIVQGTGQVRE

SEQ ID NO: 27931 - protein, 173 aa, Neisseria meningitidis; identical to SEQ ID NO: 3735

SEQ ID NO: 27932 - protein, 56 aa, Neisseria meningitidis; identical to SEQ ID NO: 6169

SEQ ID NO: 27933 - protein, 119 aa, Neisseria meningitidis; identical to SEQ ID NO: 420

SEQ ID NO: 27934 - protein, 144 aa, Neisseria meningitidis; identical to SEQ ID NO: 6

SEQ ID NO: 27935 - protein, 144 aa, Neisseria meningitidis; identical to SEQ ID NO: 4260

SEQ ID NO: 27936 - protein, 41 aa, Neisseria meningitidis; identical to SEQ ID NO: 3182

SEQ ID NO: 27937 - protein, 96 aa, Neisseria meningitidis; identical to SEQ ID NO: 3692

SEQ ID NO: 27938 - protein, 61 aa, Neisseria meningitidis; identical to SEQ ID NO: 965

SEQ ID NO: 27939 - protein, 92 aa, Neisseria meningitidis; identical to SEQ ID NO: 1005

SEQ ID NO: 27940 - protein, 136 aa, Neisseria meningitidis; identical to SEQ ID NO: 4515

SEQ ID NO: 27941 - protein, 133 aa, Neisseria meningitidis
MKLKSLDFPTGYFYFDNAAINFDKVEVIAVGYRNTDKTIKISIEDVIHFRIVDESYFIDTFMDLISEDADRALLHENGGQSFFELLNERYAEWILKESYFPLNREFFKYYIFMFEQTFIEIIGSSATYSIIEG

SEQ ID NO: 27942 - protein, 153 aa, Neisseria meningitidis
MNIIMDSTRKFGILWEENSECNGFIYGKIQIIIGENIYPKICPYGYFTLNTVFNSLKSSFEEKYYAGGNNGLDFREQLFDIDKYNSLELCNIFSIDTTYMSGGGNCEIDCLVLEMGYSGEEERLFYSFDNGKNFKEIRYKKGTVESVIFQLNL

SEQ ID NO: 27943 - protein, 45 aa, Neisseria meningitidis; identical to SEQ ID NO: 3752

SEQ ID NO: 27944 - protein, 130 aa, Neisseria meningitidis; identical to SEQ ID NO: 1661

SEQ ID NO: 27945 - protein, 500 aa, Neisseria meningitidis
MSREMLQLAEALASEKNVDAEVVFQALEFALSTAAKKKADREHMDVRVQINRDTGEYQTFRRWLIVADEDYTYPDVEKTIEEIQEEIPGTTIQIGEYYEEQLPNEGFGRQAAQTAKQIILQRIRDAEREQNLNEFLAVKEDIVSGTVKRVERHGIIVEVVAGKLDALIPRDQMIPRENFRSGDRIRALFLRVEEIGNTGRKQVILSRTSGDFLVKLYANEVPEIADGMLEIRAVARDPGQRAKVAVKANDQRIDPQGTCIGVRGSRVNAVSNELSGERIDVVLWSPEPAQFVMSALSPAEVSRIVIDEDKHAVDVIVAEDQLALAIGRGGQNVRLASDLTGWQLNIMTSAEADERNAAEDAAIRRLFMDYLNVDEETADVLVQEGFATLEEVAYVPAAELLAIEGFDEEIVDMLRNRARDAILTMAIAAEEKLGEVSDDMRNLEGIDADMLRSLAEAGITTRDDLAELSVDELIEITGVNEETAKAVILTAREHWFTEDK

SEQ ID NO: 27946 - protein, 129 aa, Neisseria meningitidis; identical to SEQ ID NO: 1031

SEQ ID NO: 27947 - protein, 57 aa, Neisseria meningitidis; identical to SEQ ID NO: 735

SEQ ID NO: 27948 - protein, 186 aa, Neisseria meningitidis; identical to SEQ ID NO: 9825

SEQ ID NO: 27949 - protein, 131 aa, Neisseria meningitidis; identical to SEQ ID NO: 1281

SEQ ID NO: 27950 - protein, 114 aa, Neisseria meningitidis; identical to SEQ ID NO: 13744

SEQ ID NO: 27951 - protein, 101 aa, Neisseria meningitidis; identical to SEQ ID NO: 705

SEQ ID NO: 27952 - protein, 72 aa, Neisseria meningitidis; identical to SEQ ID NO: 113

SEQ ID NO: 27953 - protein, 98 aa, Neisseria meningitidis; identical to SEQ ID NO: 1735

SEQ ID NO: 27954 - protein, 120 aa, Neisseria meningitidis; identical to SEQ ID NO: 1496

SEQ ID NO: 27955 - protein, 145 aa, Neisseria meningitidis
MVEAKIFILYGAANKGKSTTLNTLFNQICWKFSKFLVFFERHGNGLDFVAVFDHEGQRIGFYSSGDNEYEVRRNLYKLYSHNCDFIFGTSRTRGGSCDAVGCYAELLHGDVNIINWCEKFEPTDEDNERAVKELFKSFKNIINEL

SEQ ID NO: 27956 - protein, 124 aa, Neisseria meningitidis
MIIQNEFNLYPSNMLPERFCYPEKYVRISNDTSLIPYIQPHNFHWWFENYGTEGAEVAYIFRNSILPDLNLIPFASNGEWEAYFDGNDVTGNPRVIVINLDNIENHEFFNSFEEWLELAIKDTW

SEQ ID NO: 27957 - protein, 122 aa, Neisseria meningitidis; identical to SEQ ID NO: 848

SEQ ID NO: 27958 - protein, 150 aa, Neisseria meningitidis; identical to SEQ ID NO: 9783

SEQ ID NO: 27959 - protein, 142 aa, Neisseria meningitidis; identical to SEQ ID NO: 5523

SEQ ID NO: 27960 - protein, 104 aa, Neisseria meningitidis; identical to SEQ ID NO: 1772

SEQ ID NO: 27961 - protein, 131 aa, Neisseria meningitidis
MMYSFEANANAVKISETVSVDTGQGAKIHKFVPKNSKTYSSDLIKTVDLTHIPTGAKARINAKITASISHAGVLAGGGKLARLGAKFSTRAVPYVGTALLAHDVYETFKEDIQARGYQYDTETDKFVKVSG

SEQ ID NO: 27962 - protein, 138 aa, Neisseria meningitidis; identical to SEQ ID NO: 489

SEQ ID NO: 27963 - protein, 175 aa, Neisseria meningitidis; identical to SEQ ID NO: 7725

SEQ ID NO: 27964 - protein, 105 aa, Neisseria meningitidis; identical to SEQ ID NO: 3792

SEQ ID NO: 27965 - protein, 287 aa, Neisseria meningitidis
MSEIGLVKIYSGKVRDLYEIDDKRMLMVASDRLSAFDVILDDPIPSKGEILTQISNFWFKKLAHIMPNHFTGQTVYDVLPENEAKVLEKRAVVAKKLTPVKVEAIVRGYLAGSGWKDYQKTGSVCGIRLPEGMQEAQQLPEVIFTPSTKAAVGDHDENISFEECERSIGKELAAEVRAKAIQLYTEAAEYAKSRGIIICDTKFEFGLDEEGTLTLMDEVLTPDSSRFWPADQYEVGTNPPSFDKQFVRDWLEQSGWNKKAPAPKVPADVIQKTVEKYREALTLLTQD

SEQ ID NO: 27966 - protein, 751 aa, Neisseria meningitidis
MGQYKKLWYLLFAVLAVCFTILGYMGSEVYKKAPPYPEQVVSASGKVLMTKDDILAGQSAWQSTGGMEVGSILGHGAYQAPDWTADWLHRELSAWLDLTAQQTYGKKFDDVSPEEQAVLKTRLADEYRNQSRIKEDGSVVISDTRVKAIESILPYYHGVYGDDPALQTTREHFAMKNNTLPSQEAREKLFDFFFWTSWSASTNRPDETFTYTNNWPHEPLINNVPTTENYMWSFTSVVLLLMGIGLLMWGYSFLTKHEEVEVPSEDPISKIQLTPSQKALGKYVFLTVALFVVQVLLGGLTAHYTVEGQGFYGIDEALGFEMSDWFPYALTRTWHIQSAIFWIATGFLTAGLFLAPIVNGGKDPKFQRAGVNFLYIALFIVVGGSYAGNFFALTHILPPELNFWFGHQGYEYLDLGRFWQLLLMVGLLLWLFLMLRCTISAFKEKGVDKNLLAIFVASMVGVGVFYAPGLFYGEKSPIAVMEYWRWWVVHLWVEGFFEVFATAAFAFVFYNMGFVRRSTATASTLAAAAIFMLGGVPGMLHHLYFSGSTSASMAIGACFSALEVVPLVLLGREAYEHWSYQHLSDWAKRLRWPLMCFVAVAFWNMIGAGVFGFLINPPISLFYIQGLNTSAVHAHAALFGVYGFLALGFVLLVARYLKPNAQFDDKLMTWGFWLLNGGLVGMIAISLLPVGAIQAYASITHGLWYARSEEFLQMEILDTLRWVRTAADLVFIGGAICVAIQATKIVFGRDK

SEQ ID NO: 27967 - protein, 105 aa, Neisseria meningitidis; identical to SEQ ID NO: 87

SEQ ID NO: 27968 - protein, 124 aa, Neisseria meningitidis; identical to SEQ ID NO: 3797

SEQ ID NO: 27969 - protein, 177 aa, Neisseria meningitidis; identical to SEQ ID NO: 1613

SEQ ID NO: 27970 - protein, 117 aa, Neisseria meningitidis; identical to SEQ ID NO: 408

SEQ ID NO: 27971 - protein, 122 aa, Neisseria meningitidis; identical to SEQ ID NO: 3754

SEQ ID NO: 27972 - protein, 702 aa, Neisseria meningitidis
MKISFHLALLPTLIIASFPVAAADTQDNGEHYTATLPTVSVVGQSDTSVLKGYINYDEAAVTRNGQLIKETPQTIDTLNIQKNKNYGTNDLSSILEGNAGIDAAYDMRGESIFLRGFQADASDIYRDGVRESGQVRRSTANIERVEILKGPSSVLYGRTNGGGVINMVSKYANFKQSRNIGAVYGSWANRSLNMDINEVLNKNVAIRLTGEVGRANSFRSGIDSKNVMVSPSITVKLDNGLKWTGQYTYDNVERTPDRSPTKSVYDRFGLPYRMGFAHRNDFVKDKLQVWRSDLEYAFNDKWRAQWQLAHRTAAQDFDHFYAGSENGNLIKRNYAWQTDNKTLSSNFTLNGDYTIGRFENHLTVGMDYSREHRNPTLGFSSAFTASIDPYDRASWPASGRLQPILTQNRHKADSYGIFVQNIFSATPDLKFVLGGRYDKYTFNSENKLTGSSRQYSGHSFSPNIGAVWNINPVHTLYASYNKGFAPYGGRGGYLSIDTSSSAVFNADPEYTRQYETGVKSSWLDDRLSTTLSAYQIERFNIRYRPDAQNNPYTWAVGGKHRSRGVELSAIGQIIPKKLYLRGSLGVIQAKVVEDKENPDRVGIHLNNTSNVTGNLFFRYTPTENLYGEIGVTGTGKRYGYNSRNKEVTTLPGFARVDAMLGWNHKNVNITFAAANLLNQKYWRSDSMPGNPRGYTARVNYRF

SEQ ID NO: 27973 - protein, 391 aa, Neisseria meningitidis; identical to SEQ ID NO: 2276

SEQ ID NO: 27974 - protein, 387 aa, Neisseria meningitidis; identical to SEQ ID NO: 30

SEQ ID NO: 27975 - protein, 421 aa, Neisseria meningitidis; identical to SEQ ID NO: 11090

SEQ ID NO: 27976 - protein, 185 aa, Neisseria meningitidis; identical to SEQ ID NO: 9800

SEQ ID NO: 27977 - protein, 221 aa, Neisseria meningitidis; identical to SEQ ID NO: 3662

SEQ ID NO: 27978 - protein, 405 aa, Neisseria meningitidis; identical to SEQ ID NO: 3566

SEQ ID NO: 27979 - protein, 166 aa, Neisseria meningitidis; identical to SEQ ID NO: 1704

SEQ ID NO: 27980 - protein, 1391 aa, Neisseria meningitidis
MNLLNLFNPLQTAGMEEEFDAIKIGIASPETIRSWSYGEVKKPETINYRTFKPERDGLFCAKIFGPVKDYECLCGKYKRLKFKGVTCEKCGVEVTLSKVRRERMGHIELAAPVAHIWFLKSLPSRLGMVLDMTLRDIERVLYFEAFVVTDPGMTPLQRRQLLTEDDYYNKLDEYGDDFDAKMGAEGIRELLRTLNVAGEIEILRQELESTGSDTKIKKIAKRLKVLEAFHRSGMKLEWMIMDVLPVLPPDLRPLVPLDGGRFATSDLNDLYRRVINRNNRLKRLLELHAPDIIVRNEKRMLQEAVDSLLDNGRRGKAMTGANKRPLKSLADMIKGKGGRFRQNLLGKRVDYSGRSVITVGPYLRLHQCGLPKKMALELFKPFIFHKLEKQGLASTVKAAKKLVEQEVPEVWDILEEVIREHPIMLNRAPTLHRLGIQAFEPILIEGKAIQLHPLVCAAFNADFDGDQMAVHVPLSLEAQMEARTLMLASNNVLSPANGEPIIVPSQDIVLGLYYMTRDRINAKGEGSLFADVKEVHRAYHTKQVELGTKITVRLREWVKNEAGEFEPVVNRYETTVGRALLSEILPKGLPFEYVNKALKKKEISKLINASFRLCGLRDTVIFADHLMYTGFGFAAKGGISIAVDDMEIPKEKAALLAEANAEVKEIEDQYRQGLVTNGERYNKVVDIWGRAGDKIAKAMMDNLSKQKVIDRAGNEVDQESFNSIYMMADSGARGSAAQIKQLSGMRGLMAKPDGSIIETPITSNFREGLTVLQYFIATHGARKGLADTALKTANSGYLTRRLVDVTQDLVVVEDDCGTSDGFVMKAVVQGGDVIEALRDRILGRVTASDVVDPSSGETLVEAGTLLTEKLVDMIDQSGVDEVKVRTPITCKTRHGLCAHCYGRDLARGKLVNAGEAVGVIAAQSIGEPGTQLTMRTFHIGGAASRAAAASQVEAKSNGTARFSSQMRYVANNKGELVVIGRSCEVVIHDDIGRERERHKVPYGAILLVQDGMAIKAGQTLATWDPHTRPMITEHAGMVKFENVEEGVTVAKQTDDVTGLSTLVVIDGKRRSSSASKLLRPTVKLLDENGVEICIPGTSTPVSMAFPVGAVITVREGQEIGKGDVLARIPQASSKTRDITGGLPRVAELFEARVPKDAGMLAEITGTVSFGKETKGKQRLIVTDVDGVAYETLISKEKQILVHDGQVVNRGETIVDGAVDPHDILRLQGIEALARYIVQEVQEVYRLQGVKISDKHIEVIIRQMLRRVNIADAGETGFITGEQVERGDVMAANEKALEEGKEPARYENVLLGITKASLSTDSFISAASFQETTRVLTEAAIMGKQDELRGLKENVIVGRLIPAGTGLTYHRSRHQQWQGVEQETAETQVTDE

SEQ ID NO: 27981 - protein, 106 aa, Neisseria meningitidis; identical to SEQ ID NO: 19891

SEQ ID NO: 27982 - protein, 92 aa, Neisseria meningitidis; identical to SEQ ID NO: 752

SEQ ID NO: 27983 - protein, 206 aa, Neisseria meningitidis
MARYIGPKCKLARREGTDLFLKSARRSLDSKCKIDSAPGQHGAKKTRLSDYGLQLREKQKIRRIYGVLERQFRRYFAEADRRKGSTGELLLQLLESRLDNVVYRMGFGSTRAEARQLVSHKAIVVNGQVVNIPSFQVKAGDVVSVREKAKKQVRIQEALGLATQIGLPGWVSVDADKLEGVFKNMPDRSELTGDINEQLVVEFYSK

SEQ ID NO: 27984 - protein, 237 aa, Neisseria meningitidis; identical to SEQ ID NO: 1707

SEQ ID NO: 27985 - protein, 919 aa, Neisseria meningitidis
MKRMLFNATQAEELRVAIVDGQNLLDLDIETLGKEQRKGNIYKGIITRIEPSLEACFVDYGTDRHGFLPFKEVSRSYFQDYEGGRARIQDVLKEGMEVIVQVEKDERGNKGAALTTFISLAGRYLVLMPNNPRGGGVSRRIEGEERQELKAAMAELDIPNGMSIIARTAGIGRSAEELEWDLNYLKQLWQAIEEAGKAHHDPYLLFMESSLLIRAIRDYFRPDIGEILVDNQEVYDQVAEFMSYVMPGNIGRLKLYEDHTPLFSRFQIEHQIESAFSRSVSLPSGGAIVIDHTEALVSIDVNSARATRGADIEDTAFKTNMEAAEEVARQMRLRDLGGLVVIDFIDMENPKHQRDVENVLRDALKKDRARVQMGKLSRFGLLELSRQRLKPALGESSHVACPRCAGTGVIRGIESTALHVLRIIQEEAMKDNTGEVRAQVPVDVATFLLNEKRAELFAMEERLDVNVVLIPNIHLENPHYEINRIRTDDVEEDGEPSYKRVAEPEEDESAKPFGGEKAKAARPEPAVKGVRHTSPAPTAAPEKKTSWWDSFKAWLKRIFGGSETQAAPAAETSEKRSTANRSGSRANNRRQNPRRSKREGSKVEVREVAGKTAGQEARADKAETRNNGNRRRNERGDRAAERANEAEIQDRNIQPAATVADAAPSETEVQTGKRRRNGSRSERGQTAPETAAVAETTVQTAENTPSEPHTAEDKGSKPKSERNRRERDSRDAKERRERNNQRDRRQNGKKRNIPSAAKIEQYLNIHDTADKVRSAAAHVFGETDANAPITVSIAEPVAERDVPTASPAVPNNDAPVYDAAEKIRQVVAAILPEGAAPEAAAQEMPSETATFTAAAEQARETAQTGGLVLIETDPAALKAWAAQPEVQAGRGLRRSEQPKPSEVATVPTEEMIQVETRQG

SEQ ID NO: 27986 - protein, 96 aa, Neisseria meningitidis; identical to SEQ ID NO: 4410

SEQ ID NO: 27987 - protein, 307 aa, Neisseria meningitidis; identical to SEQ ID NO: 3808

SEQ ID NO: 27988 - protein, 290 aa, Neisseria meningitidis; identical to SEQ ID NO: 1540

SEQ ID NO: 27989 - protein, 483 aa, Neisseria meningitidis; identical to SEQ ID NO: 1726

SEQ ID NO: 27990 - protein, 358 aa, Neisseria meningitidis
MQEWFQNLFAATLGLGDLGITVGLVVSVIVKIVIILIPLILTVAYLTYFERKVIGFMQLRVGPNVTGPWGLIQPFADVFKLLFKEVTRPKLSNKALFYIGPIMSLAPSFAAWAVIPFNEEWVLTNINIGLLYILMITSLSVYGVIIAGWASNSKYSFLGAMRASAQSISYEIAMSAALVCVVMVSGSMNFSDIVAAQAKGIAGGSVFSWNWLPLFPIFIVYLISAVAETNRAPFDVAEGESEIVAGHHVEYSGFAFALFFLAEYIFMILIAALTSLMFLGGWLSPFPQSWGFIGTPSAFWMFVKMAAVLYWYLWIRATFPRYRYDQIMRLGWKVLIPIGFAYIVVLGVWMISPLNLWK

SEQ ID NO: 27991 - protein, 366 aa, Neisseria meningitidis
MMKIKALMIAAALLAAADVHAAPQKAKTASAKAAKAAKAAKAAKAAKVAKVAKVAKVAKVAKVAKVAKVAATAQKEAAPAQQQGGIRFSDGIAAVADNEVITRRRLAEAVAEAKANLPKDAQISESELSRQVLMQLVNQSLIVQAGKRRNIQASEAEIDAVVAKNPALKNLSPAQRRDFADNIIAEKVRQQAVMQNSRVSEAEIDAFLEQAQKQGITLPEGAPLRQYRAQHILIKADSENAAVGAESTIRKIYGEARSGTDFSSLARQYSQDASAGNGGDLGWFADGVMVPAFEEAVHALKPGQVGAPVRTQFGWHIIKLNEVRDAGTPQERIRNSVRQYIFQQKAEQATVNLLRDLHSGAYVDIR

SEQ ID NO: 27992 - protein, 792 aa, Neisseria meningitidis
VLALGFCFGTHCAAADAVAAEETDNPTAGGSVRSVSEPIQPTSLSLGSTCLFCSNESGKPEKTESAVQGSGEASIPEDYTRIVADKVEGQSQVQVRAEGNVVVERNRTTLNADWADYDQSGDTVTAGDRFALQQDGTLIRGETLTYNLEQQTGEAHNVRMETEQGGRRLQSVSRTAEMLGEGHYKLTETQFNTCSAGDAGWYVKAASVEADREKGIGVAKHAAFVFGGVPIFYTPWADFPLDGNRKSGLLVPSLSAGSDGVSLSVPYYFNLAPNLDATFAPGVIGERGAVFDGQVRYLRPDYAGQSDLTWLPHDKKSGRNNRYQAKWQHRHDISDTLQAGVDFNQVSDSGYYRDFYGNKEIAGNVNLNRRVWLDYGGRAAGGSLNAGLSVLKYQTLANQSGYKDKPYALMPRLSADWRKNTGRAQIGVSAQFTRFSHDSRQDGSRLVVYPDIKWDFSNSWGYVRPKLGLHATYYSLNRFGSQEARRVSRTLPIVNIDSGMTFERNTRMFGGGVLQTLEPRLFYNYIPAKSQNDLPNFDSSESSFGYGQLFRENLYYGNDRINTANSLSAAVQSRILDGATGEERFRAGIGQKFYFKDDAVMLDGSVGKKPRNRSDWVAFASGSIGSRFILDSSIHYNQNDKRAENYAVGASYRPAQGKVLNARYKYGRNEKIYLKSDGSYFYDKLSQLDLSAQWPLTRNLSAVVRYNYGFEAKKPIEMLAGAEYKSSCGCWGAGVYAQRYVTGENTYKNAVFFSLQLKDLSSVGRNPADRMDVAVPGYIPAHSLSAGRNKRP

SEQ ID NO: 27993 - protein, 622 aa, Neisseria meningitidis
MQAVRYRPEIDGLRAVAVLSVIIFHLNNRWLPGGFLGVDIFFVISGFLITGIILSEIQNGSFSFRGFYTRRIKRIYPAFIAAVSLASVIASQIFLYEDFNQMRKTVELSAVFLSNIYLGFQQGYFDLSADENPVLHIWSLAVEEQYYLLYPLLLIFCCKKTKSLRVLCHISIILFLILTASSFLPAAFYTDILNQPNTYYLSTLRFPELLAGSLLAVYGQTQNGRRQTANGKRQLLSSLCFGALLACLFVIDKHNPFIPVMTLLLPCLLTALLIRSMQYGTLPTRILSASPIVFVGKISYSLYLYHWIFIAFAHYITGDKQLGLPAVSAVAALTAGFSLLSYYLIEQPLRKRKMTFKKAFFCLYLAPSLILVGYNLYARGILKQEHLRPLPGAPLAAENHFPETVLTLGDSHAGHLRGFLDYVGSREGWKAKILSLDSECLVWVDEKLADNPLCRKYRDEVEKAEAVFIAQFYDLRMGGQPVPRFEAQSFLIPGFQARFRETVKRIAAVKPVYVFANNTSISRSPLREEKLKRFAANQYLRPIQAMGDIGKSNKAVFDLVKDIPNVHWVDAQKYLPENTVEIHGRYLYGDQDHLTYFGSYYMGREFHKHERLLKSSRGGALQ

SEQ ID NO: 27994 - protein, 149 aa, Neisseria meningitidis; identical to SEQ ID NO: 628

SEQ ID NO: 27995 - protein, 323 aa, Neisseria meningitidis
MIAKHIDRFPLLKLDQVIDWQPIEQYLNRQRTRYLRDHRGRPAYPLLSMFKAVLLGQWHNLSDPELEHSLITRIDFNLFCRFDELSIPDYSTLCRYRNWLAQDDTLSELLKLINRQLTEKGLKIEKASAAVVDATIIQTAGSKQRQAIEVDEGQINGQTTPSKDSDARWIKKNGLYKLGYKQHTRTDAEGYIEKLHITPANAHECKHLSPLLEGLPEGTTVYADKGYDSAENRQHLEEHQLLDGIMRKACRNRPLSEVQTKRNRYLSKTRYVVEQSFGTLHRKFRYARSTYFGLIKVSAQSHLKAMCLNLLKAANRLSAPAAA

SEQ ID NO: 27996 - protein, 324 aa, Neisseria meningitidis
MQENPTVWLFDLDNTLHNADAGLFTLINRAMTRYMARRLKLSESAASDLRQDYWHRYGATLAGLQIHHPEIDIAEFLRESHPIDAILTRLHGMADTENTLCRLNGRKAVFSNGPSFYVRAVVGALGLENRFDALFGTDDFGLLYKPNPQAYLNVCRLLDVPPECCIMVDDSADNLHQAKALGMKTVRFGAKSHALPFIDASVSDMAQLARYAETLSERRQNHYNTPPPKIRKNVMRKTFLILMTAAALLSGCAWETYQDGNGKTAVRQKYPAGTPVYYQDGSYSKNMNYNQYRPERHAVLPNQTGNNADEEHRQHWQKPKFQNR

SEQ ID NO: 27997 - protein, 228 aa, Neisseria meningitidis
MEKQNIAVILARQNSKGLPLKNLRKMNGISLLGHTINAAISSKCFDRIIVSTDGELIAEEAKNFGVEIVLRPAELASDTASSISGVIHALETIGSNSGTVTLLQPTSPLRTGAHIREAFSLFDEKIKGSVVSACPMEHHPLKTLLQINNGEYAPMRHLSDLEQPRQQLPQAFRPNGAIYINDTASLIANNCFFIAPTKLYIMSHQDSIDIDTELDLQQAENILNHKES

SEQ ID NO: 27998 - protein, 332 aa, Neisseria meningitidis; identical to SEQ ID NO: 9814

SEQ ID NO: 27999 - protein, 68 aa, Neisseria meningitidis; identical to SEQ ID NO: 5814

SEQ ID NO: 28000 - protein, 125 aa, Neisseria meningitidis
MCEFKDIIRNVPYFEGYDENSFIGKWYDDGVWDDEEYWKLENDLIEVRKKYPYPMDIPRDIVIGISTIIDFLMVPNWELFEIKASPWLPDSVGIHERYERFTTMLRYIFTEKDIVNVRFDYYNKK

SEQ ID NO: 28001 - protein, 105 aa, Neisseria meningitidis; identical to SEQ ID NO: 5128

SEQ ID NO: 28002 - protein, 369 aa, Neisseria meningitidis
MSLTRLILKFYALLRLFLGKNARTAWISHPAYAGHEPGANHPDSPDRILCIEQALRRAGIWQHLQTIEAEEISDTRLALVHSSKYLNRLESCLPQKGKIFRLDNDTAISTGSLSAAHFAAGSAVQAVDMVMNRKAWHAFCAARPPGHHAGSGKAGGFCLLNNVAAGVMHAIAEYRLKRIAVIDFDVHYGDGTAEIFKDDPRILFFNLFETDLFPFPENNDMPDGGNMVHLPLPPGTGSRTFREAVRRQWLPRLAAFKPELVLLSAGFDAHRLDESGRLNLHEADFAWLTHKIIQTASGCPGKIVSVLEGGYTLEPLAQSAAEHIRVLAGLGKSDAATAYQKTLDPTKKRFAKPKTGQVRQPTQSDRYDI

SEQ ID NO: 28003 - protein, 213 aa, Neisseria meningitidis; identical to SEQ ID NO: 9820

SEQ ID NO: 28004 - protein, 180 aa, Neisseria meningitidis
MRTHRKTCSAVCFAFQTASKPAVSIRHPSENIMSLKIRLTEDMKTAMRAKDQVSLGTIRLINAAVKQFEVDERTEADDAKITAILTKMVKQRKDSAKIYTEAGRQDLADKENAEIEVLHRYLPQMLSAGEIRTAVDAAVAETGAAGMADMGKVMGVLKTRLAGKADMGEVNKILKAVLTA

SEQ ID NO: 28005 - protein, 442 aa, Neisseria meningitidis; identical to SEQ ID NO: 3795

SEQ ID NO: 28006 - protein, 143 aa, Neisseria meningitidis; identical to SEQ ID NO: 362

SEQ ID NO: 28007 - protein, 238 aa, Neisseria meningitidis
LLIHYTLCRYRNWLAKDDTLSELLKLINRQLTEKGLKIEKASADVVDATIIQTAGSKQRQAIEVDEEGQINGQTTPSKDSDARWIKKNGLYKLGYKQHTRTDAEGYIEKLHITPANAHECKHLPPLLEGLPKGTTVYADKGYDSAENRQHLEEHQLLDGIMRKACRNRPLSETQTKRNRYLSKPRYVVEQSFGTLHRKFRYARAAYFGLIKVSAQSHLKAMCLNLLKAANRLSAPAAA

SEQ ID NO: 28008 - protein, 129 aa, Neisseria meningitidis; identical to SEQ ID NO: 11676

SEQ ID NO: 28009 - protein, 116 aa, Neisseria meningitidis
MPSETVFNFQATFPLFETGYWELSSSKILHLLLPRQHLGQNGRRLKSKHRPSCCRLRMSTGQPQCRRNRRSRLQHCRRQSRKVGKNGKTGEIKADGRKVNVRIDSTEADLLYPAGQ

SEQ ID NO: 28010 - protein, 132 aa, Neisseria meningitidis
MCEFKDFRRNIPCFEEYDENSFIGKWYDDGVWDDEEYWKLENALIEVRKKYPYPMDIPRDIVIGIGTIIDFLMVQNWKLFEIKASPWLPKSVKINERYERFRVMLRYIFTDLDVEDWKFFYFPIQHSKGRLR

SEQ ID NO: 28011 - protein, 105 aa, Neisseria meningitidis; identical to SEQ ID NO: 5128

SEQ ID NO: 28012 - protein, 102 aa, Neisseria meningitidis
MKNMKKKLSKYSLFLSSVFCLTACATTLLGTVVVGTALYGTSSNWTTTDKEHQEIMNCLDKALVKLNIYFENDEEKYKNKTVMDIYYQCIKNPNYVVTHNNL

SEQ ID NO: 28013 - protein, 104 aa, Neisseria meningitidis; identical to SEQ ID NO: 6457

SEQ ID NO: 28014 - protein, 152 aa, Neisseria meningitidis
MPITPPLNIISPKLYPNEQWNESEALGAITWLWYQSPTHRQVPIVEMMTYILPVLKNGQFALFCKGTQPIGYISWAYFDEVAQAHYLESDRHLRDNSDWNCGDNIWLIQWFAPFGHSHQMRSAVRQLFPSTTVRALYHKGSDKGLRILTFKT

SEQ ID NO: 28015 - protein, 154 aa, Neisseria meningitidis; identical to SEQ ID NO: 741

SEQ ID NO: 28016 - protein, 183 aa, Neisseria meningitidis
MEFLSLHPWWSFFIILTIILSYIGFCAHLHIQNRAVFFYSYRDVTIVFLTPVILIALSYLIKNKEILSACILCITLIAFSWAWIITYRSNTKRFFLSLLIVWGKLLLSTIVWAILAISLGLAVITGNSKRKKYERRDRHAERNEKAFIGALLVGFELSRNLLNLCCLHKDFSTPSKNIEVNRS

SEQ ID NO: 28017 - protein, 71 aa, Neisseria meningitidis; identical to SEQ ID NO: 1238

SEQ ID NO: 28018 - protein, 71 aa, Neisseria meningitidis; identical to SEQ ID NO: 1785

SEQ ID NO: 28019 - protein, 124 aa, Neisseria meningitidis; identical to SEQ ID NO: 406

SEQ ID NO: 28020 - protein, 117 aa, Neisseria meningitidis; identical to SEQ ID NO: 3854

SEQ ID NO: 28021 - protein, 252 aa, Neisseria meningitidis; identical to SEQ ID NO: 6509

SEQ ID NO: 28022 - protein, 140 aa, Neisseria meningitidis; identical to SEQ ID NO: 6150

SEQ ID NO: 28023 - protein, 107 aa, Neisseria meningitidis
MIIDEKSTSDVLKQYQELGFDLTKSMIIEFFIEGSQKNLQSIESQLISYRQDFQISIEQDEFGEMWTCYCSVNIVPSLENILAIETTLFDIAQKNDCNYESFGSYGN

SEQ ID NO: 28024 - protein, 124 aa, Neisseria meningitidis
VDSHGNPLDFKVTGGNVHDGQVANDLIEVIQEAQYFIADKGYDSQEIRDKAIEHGMKAIIPKRKNAKKPNPDFDSYLYKLRHLVENAFARLKQFRSIATRYEKLARNFKSMLYLACSIIHAKLN

SEQ ID NO: 28025 - protein, 90 aa, Neisseria meningitidis; identical to SEQ ID NO: 1507

SEQ ID NO: 28026 - protein, 90 aa, Neisseria meningitidis; identical to SEQ ID NO: 1507

SEQ ID NO: 28027 - protein, 281 aa, Neisseria meningitidis
MLSYRHAFHAGNHADMLKHFTLFLVLQYFNRKDKPYWYIDTHGGAGLYNLEGSEAQKVGEYRQGIALLRQAQNLPAELSDFAAHIQKILPSPELYCGSPWLAQSLTRVGDKLRLFELHPTDFVHLQNNMGEAGLGKRGQVLREDGYKGLISLLPPPPRRAVILIDPPYEEKQDYRRVTETLKAALKRFESGCYLIWYPSLSREESRKLPEELKKLVPDNYLHAELHVHAPKADGFGMHGSGMFVINPPYLLAEQLAANLPALTRLLAQDEGARYLLDSKIC

SEQ ID NO: 28028 - protein, 37 aa, Neisseria meningitidis; identical to SEQ ID NO: 970

SEQ ID NO: 28029 - protein, 137 aa, Neisseria meningitidis
LTEEMMKKQRHILCVGCLYIVLKVNVFPNTGWMEASKGMQGISFSTFGYADAPGYTFSRIVHTLIFLLGKTTGTRTTVSDSSHNVYYVKLYICANNSKALSCCLMLCQFGRKLSICAIKRALRWRSSKWVSSWTTTY

SEQ ID NO: 28030 - protein, 820 aa, Neisseria meningitidis
MHHFGRAATSCAAVWMRAFIKNYVLTLLFLKYVSDKHKYGGGMIELHAGTTFDDIVKLKNTADIGDRLNKIIAQIAEANDLKGVIDVTDFNDEDKLGKGKEMIDRLSRLVGIFKKLNLSSNQAEDDDLLGDAYEYLMRHFATESGKSKGQFYTPAEVSRIMAKIIGISADCPSSTSVYDPTCGSGSLLLKAAAQAGSQISLYGQEKDVATASLARMNMILHNNETAEINTGNTLSDSSFRDENDGLKTFDFAVANPPYPARKKRRLRLFAASAQKPETKRQRCDYSSARCAVSRQCRSAYSHGIAPPYRHYRAACQPVLRHGHSCLHHRHRQRTRPNRPICRRGNKPSYQRRQRVYDRIARLHRRQQKPSAARHSQNHRHFHKPRYSRMVHLSEIAAQDYNLNLPRYIDSGEVEDLQNLAAYLSLWRHTCARYGRIGSLLASFRPYEKRVVCRTRWPLYHYTTESIANLSHSQQLKILRDWCGIGSSTAPNLIHYKIESSQIKAHILAHPDYAAFKAGHLAKFAAWHTQNDLAAIQPGRLIRKWSESLLDAFKPGSLIEEYDFYQILTDYWAETLQDDVYLIAQDGWKAVKNLAEITKESDEAANLTVVFEETETDKKGKAKTKRISKKYRSEVIAPELVARRYFSDGIAKLEEKQSELERLSQELENHIEEHGGEEGALNDVLDAKGKLSAKLLKTALEESGIEEGERAVLQTTQTLMTQEKAAKDAVKTQIEALNLAVFKQFGRLSEAEIKQLAVQDKWLADLQSRIENRLENSIQQLISCLNTLEDRYRSPMAELAREVEKWQSKVNAHLENMGFGG

SEQ ID NO: 28031 - protein, 407 aa, Neisseria meningitidis
VGRRKLWFALAAAGVIGGLVGIVLTELMHFIQHTAYGYGTDGVSISFREGVAQASGMRRVAVLTLCGAVAGSGWWLLKRFGKPQIEIKAALKQPLQGLPFLTTVFHVLLQIITVGLGSPLGREVAPREMTAAFAFAGGRRLGLDEDEMRLLIACASGAGLAAVYNVPLASTLFILEAMLGVWTQQAVAAALLTSVIATAVARIGLGDVQQYHPANLTVSTSLLWFSAVIGPILGATAVFFQRTAQKFPFIKRDNIRIILLAVCMFALIGVISVWFPEVLGNGKAGNQLTFSGLTGWQYALELAAVKWPVVLMALAAGAYVGLITPSMMLGSTVSFAAAAAWNSVFPAMPSESAAVVGAAVFLGVSLKMPLTAIVFVLELTYAPLSLLLPLCIGMAGALGTSGKMGFK

SEQ ID NO: 28032 - protein, 122 aa, Neisseria meningitidis; identical to SEQ ID NO: 17939

SEQ ID NO: 28033 - protein, 380 aa, Neisseria meningitidis
MQKWQTELYSTPLWLCLTLKSAVKVLLLITAMITLVLTEMRLNVLSTFMSKGLYDSMQDLNASAFWMFAAMNAGVVLIRAFNNVVNDFLDQGLAIKWSERLNEVLTARWLADKNYYRLQMRRHAPDNIDQRIQQDAQEFIASTIEFVRGMVNSVVTSLEFAVVLRGLAGILTVFGFDIPHGIVWFVYIFVILATFIAMWIGNPLIRYNYENEKLNGDYRYSLIRVRDHAESVAFYNGEQHEHGRLSDRFKAIIRNRWRIARQSVCLSGFNDMFTNGIKLFPIILQAPRLFAGQIKIGDIQQTVQAFARLQNALSFFRMFYNKFTAYRARLERLYGFLLSTEEQHSARQPEISEVSDGIALECKAAAAFARIGGSFCTAEA

SEQ ID NO: 28034 - protein, 463 aa, Neisseria meningitidis
MFPDFSQTLSKDRHFLRSAFKNPNKYGGLSKVEEKYQKSHEIFLKRLAALPKPEFDNTLPVHEKLDEIKKAIAENQVTIICGETGSGKTTQLPKICLELGRGAAGLIGHTQPRRLAARSVAERIAEELKSEIGSAVGYKVRFTDHTSRDACVKLMTDGILLAETQTDRYLAAYDTIIIDEAHERSLNIDFLLGYLKQLLPRRPDLKVIITSATIDAERFSQHFNGAPVLEVSGRTYPVEILYRPLIGKDEDDAEIELTDAIVDAADELARYGEGDILVFLPGEREIREAAEALRKSTLRRNDEILPLFARLSHAEQHKIFHPSGAKRRIVLATNVAETSLTVPGIKYVIDTGLARVKRYSARAKVEQLHVEKISQAAARQRSGRCGRVSAGVCIRLFSEEDFNSRPEFTDPEIVRSNLAAVILRMASLKLGDVAAFPFLEMPDSRYINDGFQVLLELGAVEAA

SEQ ID NO: 28035 - protein, 358 aa, Neisseria meningitidis
MKIVLTTSMAGLGGTETATVRLGRLLRQHGHDIMLASSDGPLLKEAQALGIRWQPVDFYRGGLFGYLKGMIAYARMLRREQPDIIDCQMARVVPACAIAAKIVSPKTKIIYHSHGLDAATYPKIAKLFDKLGVYIIGNCKHEREKLIRHGFPADRIVYAYNALPPPPPEFPFWKTVKGCVMLGTLSRLDTVRAVHLMLDIFKKMVDRDMPVRLNVAGIGEEMDNLKAQAERLGIDGKVTFLGGVRDLTAYFKDVDILVNTPHCIGDHGAGVGNNILEAGLYDTPVVTYDMAGISEMVVNGETGYCIPFGEDEAFIEAVDTLIKHPELRGQMGKALHKHVETLCSDDEIYRTTMAAYTM

SEQ ID NO: 28036 - protein, 180 aa, Neisseria meningitidis
VQSWKERRDFNIVKQDLDFSCGAASVATVLNNFYGQKLTEEDVLKKLDKEQMPASFEDMRRIMPDLGFEAKGYALSFEQLAQLQIPVIVYLKYRKDDHFSVLRGIDGNTVLLADPSLGHVSMSRAQFLDAWQTREGNLAGKILAVVPKGRDAGGDKAFFTRSPKRQTEFAVGQVKWWRAY

SEQ ID NO: 28037 - protein, 320 aa, Neisseria meningitidis
MNPAMIERLKAVENQAEAMGRGARSAYLKQQAQELGISLATLYRKLEAVSIKPTRKRRSDAGKTELKPEEAKLISAVLVEAMRRNGKRLMSVRQAVEMLRANGKIEAARIDGETGEVIPSVRTAFRPLARHRPHRPVMAHPRRRHEDQTPLYRPTVGLGGRNTPRAAHTDRRQHPPFPRHPPTAQTRPPSDHISIKFAHNAIRRLGYDGSTPGKSKHTMHGFRHLFTNISLTAGKDTLTTDLALGHISRAALQRAGFSSLHHYLTADSYRLQERRELAEWYSRRHRQAYEAAAQTPQNKNRLKKIQTASCPKHLQNLKGI

SEQ ID NO: 28038 - protein, 185 aa, Neisseria meningitidis
MKPKFKTVLTALLLAVSLPSMAATHVLMETDMGNIRLVLDESKAPKTVANFVRYARKGFYDDTVFHRVIDGFVIQGGGFTEDLVQKATDKAVANESGNGLKNTAGTIAMARTADPDSATSQFFINLADNDSLNYKNGQYGYTVFGRVESGMNTVSKIARVKTATHGLYQNVPVQPVKIRRVVVGQ

SEQ ID NO: 28039 - protein, 172 aa, Neisseria meningitidis
MSEIINLTESGITFNLVKNNLFYIEPYIRKRRQEGIKTVEFIYLQEDNLLFVEAKQSIPNQERSPERFDEYISEIYQKWCNALNVEILGILGREDIKETIMPSAFSNLQWGSIEIKLLLVIPDVPLNYLGQLNELIKQEFNKKDTLRLISLWNISVEVINRDLAIQKGLASS

SEQ ID NO: 28040 - protein, 255 aa, Neisseria meningitidis
MKNLNLEKDTLAEFRNKFLKGDSLEIMKSIPSGSIDLIVTSPPYNLKNSTGNGMKDGRGGKWKNASLINGYSDHNDCMPHHEYVEWQRNCLSEMYRLLKDDGAIFYNHKWRVQGGLLQDRHDIVSGFPVRQIIIWRRKGGINFNKGYFLPTYEVIYMICKPKFSLCPGANKYGDVWEFTQEMKNPHPAPFPVALIERIISSTNAKVILDPFMGSGTTAIAAKKLYREFIGIEISAEYIALAQERLNETLREPKLL

SEQ ID NO: 28041 - protein, 1031 aa, Neisseria meningitidis; identical to SEQ ID NO: 15881

SEQ ID NO: 28042 - protein, 729 aa, Neisseria meningitidis
MKTDIQAELTQALLPHEKVWANEEKTILAKNILLDLVEKTDPSIIGLLLGNDELKRHFFVEVNGVLVFKLQDFRFFLDKHSVNNSYTKYANRIGLTDGNRFLKDSSDIVLDFPFKDCVLNGGQSSEESEEIYFKHSNSQPASQPASQPASQPASQPASQPQLYTKLTRKRQEIFFNQTLAFDEIDRLFDAKAFSKFSRHTADGKQAVGEIKRHSDGTPAENLIIKGNNLIVLHSLAKQFKGKVKLIYIDPPYYFVKKKQQDSFGYNTNFKLSTWLTFMKNRLSIAKELLTDDGIIVISIDDDGNAYLKILLDEIFGFENFIGNLPTIMNLKGNNDEYAFAGTHEYTLVFAKNKDKSTFYEFPIDEDNFLEKWEEDEIGFYKKGAPMRATGTEDKREDRPEMFYPFLVKNNTVSTITDEEFSQIYNKDLEVFNDDFIQKLKEKYENLGYNFILPIADKQWGRWRWGYSIKNKARLQTDIIVSQSKNGISLYKKQRPELDDLPTKKPKTIFYKPEYSSGNGTEQMKNLFGEKAFKNPKPEELIQDFITITTNENDIVLDYHLGSGTTAAVAHKMNRQYIGIEQMDYIETLAVERLKKVIEGEQGGISKAVNWQGGGEFVYAELAPFNETAKQQILACEDSDGIKTLFEGLCERYFLKYNVSVNEFSQIIQEPEFQSLPLDEQKQMVLEMLDLNQMYVSLSEMDDEQFAGCLNDDDKALSRAFYQAEKKDGE

SEQ ID NO: 28043 - protein, 327 aa, Neisseria meningitidis; identical to SEQ ID NO: 294

SEQ ID NO: 28044 - protein, 77 aa, Neisseria meningitidis; identical to SEQ ID NO: 760

SEQ ID NO: 28045 - protein, 163 aa, Neisseria meningitidis; identical to SEQ ID NO: 3739

SEQ ID NO: 28046 - protein, 454 aa, Neisseria meningitidis
MSSPSNTNRQTWSSRLTYILTVAGATVGFGATWRFPYLVGENGGGAYVFLFCIAMLVIGIPMILVENVIGRRKGVNALDAFGGPMNGKPIAKIWKLVGWMGLLGTFGIMAYYMALGGWVISYIVNIIGGNLNISSPIDGVVTKGFFAEHINSPWEIAFYTLLFVAVNQWILVKGVIGGIEKAAKLMPLLFLFLIAMVVRNVTLPGAMEGVAFYLKPDFSKITAELFVFVLGQVFFALSLGFGVMITLSSYLDKNENLVQTAVITAITNTIIAVLAGFMIFPSLFSFGVASDSGPTLVFQSLPIVFSHMWAGPVFAVIFFSLLLIAALTTSLTIYEVLITTIQEKTKIRRTAAITIVLAAIYVFGNIPSILSYGPWKDVSVFGKNIFDAFDYISGNILFMLTALGSALFVGFVMKDEAKEELLYKGNHTTVNIWFAYVKYLVPLVILLIFVSNLF

SEQ ID NO: 28047 - protein, 170 aa, Neisseria meningitidis; identical to SEQ ID NO: 7849

SEQ ID NO: 28048 - protein, 623 aa, Neisseria meningitidis
MSQALPYRPDIDTLRAAAVLSVIVFHIEKNWLPGGFLGVDIFFVISGFLMTMILHREMSGGGGGFSLKAFYIRRIKRILPAFFAVLAATLTGGFFLFTKDDFFLLWKSALTALGFASNLYFARGKDYFDPAQEEKPLLHIWSLSVEEQFYFVFPILLLLVARKSPRVQFGFLAALCALSLAASFMPSAFDKYYLPHLRACEMLVGSLTAVWMRCRQPAVGRRCAAAGALFAVCILSTCLFSYSEQTAYFPGPAALIPCLAVAALIYFNHYEHPLKKFFQWKITVAAGLISYSLYLWHWPILAFMRYIGPDNLPPYSPAAAIVLTLAFSLISYHCIEKPFKKWKGSFAQSVLWIYALPMLILGAGSFFAMRLPFMAQYDRLGLTRSNTSCHNNTGKQCLWGDTEKQPELLVLGDSHADHYKTFFDAVGKKEKWSATMVSADACAYVEGYASRVFQNWAACRAVYRYAEEHLPLYSKVVLAMRWGSQMPENSRSLAYDAGFFQKFDRMLHKLSSEKQAVYLMADNLASSYNVQRAYILSSRIPGYRQTLRPDDESTLKANARIRELAAKYPNVYIIDAAAYIPANFQIGGLPVYSDKDHINPYGGTELAKRFSEKQRFLDTRHNH

SEQ ID NO: 28049 - protein, 282 aa, Neisseria meningitidis
MTLIGIKLKQTQQLNQRLQQSLRVLQMSGIELEREVENWLSDNPLLERKDTDEFSDARFSHYTAPARQIGGDEGEDMLSNIAGEQDFKQYLHAQVCEHPLSDQEAACVHILIDFLDEQGYLTDSIEDILDHTPLEWMLDEAMLQHALTALKKFDPAGVAAADLNESLILQIERLGECAAKPAALHIVRNALDSIDGNRSQTLARIKNTCPKPTAAHSKPHSTSLLRSIPFPPPVLPRPHPRRILTRHSPTCWLSAAWRFLAAPLPNTENPLRFRQHTNAKPQ

SEQ ID NO: 28050 - protein, 424 aa, Neisseria meningitidis
MNRPKQPFFRPEVAVARQTSLTGKVILTRPLSFSLWTTFASISALLIILFLIFGNYTRKTTVEGQILPASGVIRVYAPDTGTITAKFVEDGEKVKAGDKLFALSTSRFGAGDSVQQQLKTEAVLKKTLAEQELGRLKLIHGNETRSLKATVERLENQKLHISQQIDGQKRRIRLAEEMLQKYRFLSANDAVPKQEMMNVKAELLEQKAKLDAYRREEVGLLQEIRTQNLTLASLPKRHETEQSWLERTIADISQEVLDFEMRSEQIIRAGRSGYIAIPNVEVGQQVDPSKLLLSIVPERTELYAHLYIPSSAAGFIKPKDKVVLRYQAYPYQKFGLASGSVVSVAKTALGRQELSGLGMVSSDLAKSNEPVYLVKIKPDKPTITAYGEEKPLQIGMTLEADILHEKRRLYEWVLELIYSMSGKL

SEQ ID NO: 28051 - protein, 436 aa, Neisseria meningitidis; identical to SEQ ID NO: 13843

SEQ ID NO: 28052 - protein, 346 aa, Neisseria meningitidis
MKAMVYHGANDIRFEEKPRPQIIDPTDAVVKIVKTTICGTDLGIWKGKKTEVADGRILGHEGIGIVEEVGEAVKNIKVGDKVIISCVSKCCTCDNCKIQLYSHCRNGGWILGYMIDGTQAEYVRTPYADNSLVPLPDNVNEEVALLLSDALPTAHEIGVQYGDVKPGDTVFIAGAAPVGMSALLTAQLYSPAAIIVCDMDENRLKLAKELGATHTVSPASGDVGKQVAAIVGEDGVDCAIEAVGIPATWNMCQDIVKPGGHIAVVGVHVQSVDFKLEKLWIKNLAITTGLVNANTTEMLMKAISSSSVDYTKMLTHHFKFSELEKAYDVFKHAAENQAMKVVLEAD

SEQ ID NO: 28053 - protein, 488 aa, Neisseria meningitidis; identical to SEQ ID NO: 3695

SEQ ID NO: 28054 - protein, 323 aa, Neisseria meningitidis
MKHFQSKVLTAAILAALSGSAMAEPPPSTDEIAKAALVGVYNNTQDINGFKVGDTIYDIENGQPKGRPATEDDVKADDFGGLGLKEVLAQHDQSLADLTGTVEENSEALVKTAEVVNDISADVKANTAAIRENKAAIATKADKTELDEVSGKVTANETAIGKKANSADVYTKAEVYTKQESDNRFVKIGDRIGNLNTTANGLETRLADAEKSVKDHGTRLASAEKSITEHGTRLNGLDRTVSDLRKETRQGLAEQAALSGLFQPYNVGRFNVTAAVGGYKSESAVAIGTGFRFTENFAAKAGVAVGTSSGSSAAYHVGVNYEW

SEQ ID NO: 28055 - protein, 89 aa, Neisseria meningitidis; identical to SEQ ID NO: 1885

SEQ ID NO: 28056 - protein, 141 aa, Neisseria meningitidis; identical to SEQ ID NO: 13846

SEQ ID NO: 28057 - protein, 1010 aa, Neisseria meningitidis
MFWIVMIVILLLALAGLFFVRAQSEREWMREVSAWQEKKGEKQAELPEIKDGMPDFPELALMLFHAVKTAVYWLFVGVVRFCRNYLAHESEPDRPVPPASANRADVPTASDGYSDSGNGTEEAETEEAEAAEEEAADTEDIATAVIDNRRIPFDRSIAEGLMPSESEISPVRPVFKEITLEEATRALNSAALRETKKRYIDAFEKNETAVPKVRVSDTPMEGLQIIGLDDPVLQRTYSRMFDADKEAFSESADYGFEPYFEKQHPSAFSAVKAENARNAPFRRHAGQAEAKSPDVSQGQSVSDGTAVRDACRRVSVNLKEPNKATVSAEARISRLIPESRTVVGKRDVEMPSETENVFTETVSSVGYGGPVYDEAADIHIEEPAAPDAWVVEPPEVPKVPMPAIDIPPPPPVSEIYNRTYEPPSGFEQVQRSRIAETDHLADDVLNGGWQEETAAIADDGSEGAAERSSGQYLSETEAFGHDSQAICPFEDVPSERPSCRVSDTEADEGAFQSEETDAVYEHLPTTDLLLPPLFNPEATQTEEELLENSITIEEKLAEFKVKVKVVDSYSGPVITRYEIEPDVGVRGNSVLNLEKDLARSLGVASIRVVETILGKTCMGLELPNPKRQMIRLSEIFNSPEFAESKSKLTLALGQDITGQPVVTDLGKAPHLLVAGTTGSGKSVGVNAMILSMLFKAAPEDVRMIMIDPKMLELSIYEGIPHLLAPVVTDMKLAANALNWCVNEMEKRYRLMSFMGVRNLAGFNQKIAEAAARGEKIGNPFSLTPDDPEPLEKLPFIVVVVDEFADLMMTAGKKIEELIARLAQKARAAGIHLILATQRPSVDVITGLIKANIPTRIAFQVSSKIDSRTILDQMGAENLLGQGDMLFLPPGTAYPQRVHGAFASDEEVHRVVEYLKQFGEPDYVDDILSGGGSEELPGIGRSGDDETDPMYDEAVSVVLKTRKASISGVQRALRIGYNRAARLIDQMEAEGIVSAPEHNGNRTILVPLDNA

SEQ ID NO: 28058 - protein, 239 aa, Neisseria meningitidis
MDKDLYAVLGVSPQAGADEIKRAYRKLAMKYHPDRNPGNPQAEEKFKEIQRAYDTLSDLSKRMQYDASFRRHEERGRQEEAFRREARREQFYREQMRREQAFRQAFERQASRSRHAYEPSGGGSGRNYVLAAYILFGLGAIMLFMPIVGVIFAYMPIVGVILAYMKRNSLDSIVYATHTEYLIKTFWRTFWLYLLGALTALLGIGVLIIIATNVWYFYRIIVGFIRFNSGRAVAPEKWI

SEQ ID NO: 28059 - protein, 119 aa, Neisseria meningitidis
MTDRPSLLWIKPGQAEIMEYCEPEEASDPYATYRRANLMAGLPLFVVILVLLNIVFPLPAHPLAWLVPAGFMVLGGGFPLSLPLVALLVLTCCILAHCPPLSRLLCYPCPNHPMSKNSA

SEQ ID NO: 28060 - protein, 444 aa, Neisseria meningitidis
MPPLIFATFPMKPFAENIPHSLRGSCRDEALPPHTVDCPECGCRADVPRLDRGEAAFCPRCGHKLFRVGRHPFSGPPAYAAASLILMAFAYGMTYIEVGIPGAASVLSLPEMMRLMVFQDYGFLAEVMFVLTFGAPVLFLLLCLYVYAALIRKRVYPALRLATRVMVRLRQAMMVDVFFVSTLVAYIKLSSVAEVRFGPAFYLMFALSVMLIRTSVSVPQHWVYFQIGRLTGDNAVQTASEGKTCCSRCLYFRDSAESPCGVCGAELYRRRPKSLSISSAFLTAAVILYFPANILPIMISSNPAATEVNTILNGIAYMWDEGDRLIAAVIFSASILVPVLKIAAMSVLIASARFALPTGAKKLSHLYRITEAVGRWSMIDIFVIIILMCSFHTYAARVIPGSAAVYFCLVVILTMLSAYYFDPRLLWDKRASDGIAFNETEKHD

SEQ ID NO: 28061 - protein, 448 aa, Neisseria meningitidis; identical to SEQ ID NO: 2224

SEQ ID NO: 28062 - protein, 162 aa, Neisseria meningitidis
MRKSRLSQYKQNKLIELFVAGVTARTAAELVGVNKNTAAYYFHRLRLLIYQNSPHLEMFDGEVEADESYFGGQRKGKRGRGAAGKVAVFGLLKRNGKVYTVTVPNSNRYFISYYPTSETQHFYTDCYRSYDVLDVREFSHFSFAETSFSYQSQHTFCTTKPY

SEQ ID NO: 28063 - protein, 126 aa, Neisseria meningitidis
MNIRFFALTVPVLSLAACAVPEAYDDGGRGHMPPVQNQAGTADFRAFSCENGLSVHVRRLDGGRIALRLDGRRAVLSSDVAASGERYTAEHGLFGNGTEWHQKGGEAFFGFTDAYGNSVETSCRAR

SEQ ID NO: 28064 - protein, 106 aa, Neisseria meningitidis; identical to SEQ ID NO: 3892

SEQ ID NO: 28065 - protein, 58 aa, Neisseria meningitidis; identical to SEQ ID NO: 1171

SEQ ID NO: 28066 - protein, 63 aa, Neisseria meningitidis; identical to SEQ ID NO: 5859

SEQ ID NO: 28067 - protein, 121 aa, Neisseria meningitidis
LHKQVQHITTKLFYFKITDISFFIDFKFHIFNILGILFQRKRNRLIKTIPAIHSGKTARNIRFPISTTIRYRTPRCRFRLHIRQNFIRKENVENKKNSLLEKRFNGNAGISHTFSIYLSSL

SEQ ID NO: 28068 - protein, 124 aa, Neisseria meningitidis; identical to SEQ ID NO: 1868

SEQ ID NO: 28069 - protein, 104 aa, Neisseria meningitidis
MPSEALSGLQTAFCFPTVYKLSLFLDRNNDLIYLKRLEDMIMGFWNGVAKAVGEGMIEAGNEHKALKMEYAEKSSEELHEIVKSDGFLKIPHGRKVRLETFAIT

SEQ ID NO: 28070 - protein, 127 aa, Neisseria meningitidis; identical to SEQ ID NO: 3901

SEQ ID NO: 28071 - protein, 78 aa, Neisseria meningitidis; identical to SEQ ID NO: 1011

SEQ ID NO: 28072 - protein, 75 aa, Neisseria meningitidis; identical to SEQ ID NO: 1870

SEQ ID NO: 28073 - protein, 66 aa, Neisseria meningitidis; identical to SEQ ID NO: 3905

SEQ ID NO: 28074 - protein, 154 aa, Neisseria meningitidis
MLHIPPTEPDRYVSSIVALNVHSSNGTGDWHSAAALNDDAYPQDFYIYGKDQTRSTLHLLGNVGVIDGTNRFNEMGYYPENIPVWLADHPRACVDYLYTAVLQTGSIGRVILDDWFPSDEDKQSVYDLLNQIEPHLNTQEWGNLQLWKRKNPIM

SEQ ID NO: 28075 - protein, 170 aa, Neisseria meningitidis
MPALPVMKTNIMHTPSPHNEFIRAIKESSPILIGLLPWALILGMQGGQKGMSWLEMLLMTSMNFAGGSEFATVNLWAEPLPILLIATVTFMINSRHILMGAALAPHLKGIPLKKAVPALFFMCDESWAMAFSEIQKRKAAGLPAFNMPFYSGLTKTSTALPRLSSKRTIL

SEQ ID NO: 28076 - protein, 139 aa, Neisseria meningitidis; identical to SEQ ID NO: 1180

SEQ ID NO: 28077 - protein, 86 aa, Neisseria meningitidis
LKRKNNIIELSIEDLELIYGGGLGERILEGGANGAQIGGSIGAGIGLGVGIVSSGIPAGPAIILGGTVGAAVGAVTGMGVAAYEYY

SEQ ID NO: 28078 - protein, 80 aa, Neisseria meningitidis; identical to SEQ ID NO: 1154

SEQ ID NO: 28079 - protein, 78 aa, Neisseria meningitidis; identical to SEQ ID NO: 7882

SEQ ID NO: 28080 - protein, 100 aa, Neisseria meningitidis; identical to SEQ ID NO: 7884

SEQ ID NO: 28081 - protein, 44 aa, Neisseria meningitidis
VRTAYTLHVGFEVPHNSQVGCVAQPRTRSVGYAGYSLLQVIYIN

SEQ ID NO: 28082 - protein, 67 aa, Neisseria meningitidis; identical to SEQ ID NO: 5222

SEQ ID NO: 28083 - protein, 68 aa, Neisseria meningitidis; identical to SEQ ID NO: 3910

SEQ ID NO: 28084 - protein, 68 aa, Neisseria meningitidis; identical to SEQ ID NO: 3911

SEQ ID NO: 28085 - protein, 64 aa, Neisseria meningitidis; identical to SEQ ID NO: 631

SEQ ID NO: 28086 - protein, 147 aa, Neisseria meningitidis; identical to SEQ ID NO: 1529

SEQ ID NO: 28087 - protein, 65 aa, Neisseria meningitidis
MSYDLSKRLVIGLASSALFDLSESDNIFRMEGAETYRQYQRKKQNHPLKKALSFHLLKNFCQSMK

SEQ ID NO: 28088 - protein, 267 aa, Neisseria meningitidis
MADILPSDKRQQPPKTKGNPMNIIEQETKRAELRKIDAEIAKIIADAHKINAESVKIAQESRWYPMIAATGLVTAIAAVLALIFKFAPQAPRGALSHEQNEQSRTIQPLPRMDYRARRRKPFHYPLPLSPPDCQNPQADRRRMPGRALPPFRKRHHPLRFYFFRRQTGRRSPICRRPYRNLPPGSQKNMRNKINRNDMELGYTPYNLRTLRNRCKLTQAELAQIVGVKHYIQVGRWEAEPDTETRRADMPLEKWRQFLDWIEKTNAV

SEQ ID NO: 28089 - protein, 131 aa, Neisseria meningitidis; identical to SEQ ID NO: 3914

SEQ ID NO: 28090 - protein, 42 aa, Neisseria meningitidis
MNKAMPSEGLSDGILRYFVKVGMTVRDLCKIPQNPLNSHQDI

SEQ ID NO: 28091 - protein, 326 aa, Neisseria meningitidis
MAMAGNEKYLDWAREVLHTEAEGLREIAADLDENFALAADALLHCKGRVVITGMGKSGHIGRKMAATMASTGTPAFFVHPAEAAHGDLGMIVDNDVVVAISNSGESDEIAAIIPALKRKDITLVCITARPDSTMARHADIHITASVSKEACPLGLAPTTSTTAVMALGDALAVVLLRARAFTPDDFALSHPAGSLGKRLLLRVADIMHKGGGLPAVRLGTPLKEAIVSMSEKGLGMLAVTDGQCRLKGVFTDGDLRRLFQECDNFTGLSIDEVMHTQPKTISTERLATEALKVMQANHVNGLLVTDADGVLTGALNMHDLLAARIV

SEQ ID NO: 28092 - protein, 121 aa, Neisseria meningitidis; identical to SEQ ID NO: 530

SEQ ID NO: 28093 - protein, 144 aa, Neisseria meningitidis
MKKQITAAVMMLSMIAPAMANGLDNQTFENQVFHTRADAPMQLAELSQKEMKETEGEWIPNAVGGIMGGVGGHFSYMASAIASGSYNRNEHWTAIGGGALIGAMNPINGGRALINGMRGVAVGTVAGGINGYAGSTGKNTDIRR

SEQ ID NO: 28094 - protein, 100 aa, Neisseria meningitidis; identical to SEQ ID NO: 1890

SEQ ID NO: 28095 - protein, 73 aa, Neisseria meningitidis
MGGKVQHNKGKIRDNALKALVKSDLFRYKVERKRKGKGSYNRQEAKKWRDGFDTVPPFLCLKHGSFRRSRRSL

SEQ ID NO: 28096 - protein, 72 aa, Neisseria meningitidis; identical to SEQ ID NO: 202

SEQ ID NO: 28097 - protein, 65 aa, Neisseria meningitidis
MPSENRSAGVCGALYAVLQDKAQGRAVGCIVATVFLPDGVKNTVATPTDNEKREQCRLNRVLRRA

SEQ ID NO: 28098 - protein, 61 aa, Neisseria meningitidis; identical to SEQ ID NO: 5879

SEQ ID NO: 28099 - protein, 219 aa, Neisseria meningitidis
MGRHFGRRRFLTAAAVAAAGAAVSFLPNPFAAGGEKRNGDEKRDENVFFWKGVALGSGAELRLFGVDNRQAADLVNKVLAEVARLEKMFSLYREDSLISRLNRDGYLTSPSADFLELLSLCRDIHALTDGAFDPTVQALWKLYADYFAARPDAETPPPQNSVKEALKRVGFGKVSFDDREIRFAEKGMGLSLNGIAQGYSGLTKTSTALPRLSSKRTIL

SEQ ID NO: 28100 - protein, 74 aa, Neisseria meningitidis; identical to SEQ ID NO: 3918

SEQ ID NO: 28101 - protein, 56 aa, Neisseria meningitidis; identical to SEQ ID NO: 14523

SEQ ID NO: 28102 - protein, 114 aa, Neisseria meningitidis; identical to SEQ ID NO: 1903

SEQ ID NO: 28103 - protein, 137 aa, Neisseria meningitidis; identical to SEQ ID NO: 5880

SEQ ID NO: 28104 - protein, 68 aa, Neisseria meningitidis; identical to SEQ ID NO: 531

SEQ ID NO: 28105 - protein, 49 aa, Neisseria meningitidis
MKEYKVVIYQESLLSSLFFGAAKVNPVNFSAFLNKQTPEGWRVETFAIT

SEQ ID NO: 28106 - protein, 71 aa, Neisseria meningitidis; identical to SEQ ID NO: 3926

SEQ ID NO: 28107 - protein, 46 aa, Neisseria meningitidis
MCAAIMAYFGGFVRALFDLGVFERGGRRGRREWFSHVWRRCRRGRA

SEQ ID NO: 28108 - protein, 377 aa, Neisseria meningitidis
MKIVFITTVASSIYGFRAPVIKKLIGKNHQVYAFVSEFSDNELDIIREMGVTPVTYRSNRSGLNPFSDIKSTFLIFKELKKISPDLVFPYFAKPVIFGTFAAKLAGVPRIVGMLEGLGFAFTPQPEGIPLKTKIIKGILIALYHIALPMLESLIVLNPDDKDELTDKYGIKIKNIHILGGIGLDLRQYPYSEADIPDEKEPVKFLFIGRFLKEKGIDDFIRAAEQVKDKYPDTVFTALGAIDKSRGGGGGDLERLAARDIIRFPGFVNNVSEVIKEHHIFVLPSYYREGVPRSTQEAMAVGRAVITTDVPGCRETVADKVNGFLIEPWNPRILAEKMIYFIENREAVRLMGNASYAIAKDKFDAEKVDLKLLDILKA

SEQ ID NO: 28109 - protein, 103 aa, Neisseria meningitidis
MANRFRQRKSAYRRLSGKPLFSDGIAANLCGGRKTLSYNLSRFKISIRSEMQKISFNLLKPATPKIGKRRPGLNGAPHIPMPSPRYLPASPEMPGNNIHPAKI

SEQ ID NO: 28110 - protein, 349 aa, Neisseria meningitidis
MDLSIVVPIYNVESYLEACLNSIEPILSNENVELILVNDGSKDGSEDICYKYIDKTTNNKQQTTNNKQQTTNNKQQTTNNTRYRTPNIKYIYQDNQGTAEARNTGIKNSNGKYIVFIDSDDFINCQVLLDFLSKDDIDMPDVVFLNAVKYDKGSVSHFGEDYQPEKILKQSKVEVLKGLCRFRKFPGSACNKIIKRELIIKEKLFFEKEVYAEDIEWSMRLFNAATTFSYLDGCYYYYRQGRKDSKTGTVSEKSIKSLLYILEKNAEMEFDRDISSYLYSFLSYEYLVLLFIMTSKNIECDADIKRRAYHLRFMLLKSNKLIYKLIFPIITLFGVDITGRILKAIRGNI

SEQ ID NO: 28111 - protein, 1081 aa, Neisseria meningitidis
MAAFKPNSINYILGLDIGIASVGWAMVEIDEEENPIRLIDLGVRVFERAEVPKTGDSLAMARRLARSVRRLTRRRAHRLLRARRLLKREGVLQAADFDENGLIKSLPNTPWQLRAAALDRKLTPLEWSAVLLHLIKHRGYLSQRKNEGETADKELGALLKGVADNAHALQTGDFRTPAELALNKFEKECGHIRNQRGDYSHTFSRKDLQAELNLLFEKQKEFGNPHVSGGLKEGIETLLMTQRPALSGDAVQKMLGHCTFEPAEPKAAKNTYTAERFIWLTKLNNLRILEQGSERPLTDTERATLMDEPYRKSKLTYAQARKLLSLEDTAFFKGLRYGKDNAEASTLMEMKAYHTISRALEKEGLKDKKSPLNLSPELQDEIGTAFSLFKTDEDITGRLKDRIQPEILEALLKHISFDKFVQISLKALRRIVPLMEQGKRYDEACAEIYGDHYGKKNTEEKIYLPPIPADEIRNPVVLRALSQARKVINGVVRRYGSPARIHIETAREVGKSFKDRKEIEKRQEENRKDRENAAKFREYFPNFVGEPKSKDILKLRLYEQQHGKCLYSGKEINLGRLNEKGYVEIDHALPFSRTWDDSFNNKVLVLGSENQNKGNQTPYEYFNGKDNSREWQEFKARVETSRFPRSKKQRILLQKFDEDGFKERNLNDTRYVNRFLCQFVADRMRLTGKGKKRVFASNGQITNLLRGFWGLRKVRAENDRHHALDAVVVACSTVAMQQKITRFVRYKEMNAFDGKTIDKETGEVLHQKTHFPQPWEFFAQEVMIRVFGKPDGKPEFEEADTLEKLRTLLAEKLSSRPEAVHEYVTPLFVSRAPNRKMSGQGHMETVKSAKRLDEGVSVLRVPLTQLKLKDLEKMVNREREPKLYEALKARLEAHKDDPAKAFAEPFYKYDKAGNRTQQVKAVRVEQVQKTGVWVRNHNGIADNATMVRVDVFEKGDKYYLVPIYSWQVAKGILPDRAVVQGKDEEDWQLIDDSFNFKFSLHPNDLVEVITKKARMFGYFASCHRGTGNINIRIHDLDHKIGKNGILEGIGVKTALSFQKYQIDELGKEIRPCRLKKRPPVR

SEQ ID NO: 28112 - protein, 1082 aa, Neisseria meningitidis
MRTTPTFPTKTFKPTAMALAVATTLSACLGGGGGGTSAPDFNAGGTGIGSNSRATTAKSAAVSYAGIKNEMCKDRSMLCAGRDDVAVTDRDAKIKPPPPNLHTGDFPNPNDAYKNLINLKPAIEAGYTGRGVEVGIVDTGESVGSISFPELYGRKEHGYNENYKNYTAYMRKEAPEDGGGKDIEASFDDEAVIETEAKPTDIRHVKEIGHIDLVSHIIGGRSVDGRPAGGIAPDATLHIMNTNDGTKNEMMVAAIRNAWVKLGERGVRIVNNSFGTTSRAGTADLFQIANSEEQYRQALLDYSGGDKTDEGIRLMQQSDYGNLSYHIRNKNMLFIFSTGNDAQAQPNTYALLPFYEKDAQKGIITVAGVDRSGEKFKREMYGEPGTEPLEYGSNHCGITAMWCLSAPYEASVRFTRTNPIQIAGTSFSAPIVTGTAALLLQKYPWMSNDNLRTTLLTTAQDIGAVGVDSKFGWGLLDAGKAMNGPASFPFGDFTADTKGTSDIAYSFRNDISGTGGLIKKGGSQLQLHGNNTYTGKTIIEGGSLVLYGNNKSDMRVETKGALIYNGAASGGSLNSDGIVYLADTDQSGANETVHIKGSLQLDGKGTLYTRLGKLLKVDGTAIIGGKLYMSARGKGAGYLNSTGRRVPFLSAAKIGQDYSFFTNIETDGGLLASLDSVEKTAGSEGDTLSYYVRRGNAARTASAAAHSAPAGLKHAVEQGGSNLENLMVELDASESSATPETVETAAADRTDMPGIRPYGATFRAAAAVQHANAADGVRIFNSLAATVYADSTAAHADMQGRRLKAVSDGLDHNGTGLRVIAQTQQDGGTWEQGGVEGKMRGSTQTVGIAAKTGENTTAAATLGMGRSTWSENSANAKTDSISLFAGIRHDAGDIGYLKGLFSYGRYKNSISRSTGADEHAEGSVNGTLMQLGALGGVNVPFAATGDLTVEGGLRYDLLKQDAFAEKGSALGWSGNSLTEGTLVGLAGLKLSQPLSDKAVLFATAGVERDLNGRDYTVTGGFTGATAATGKTGARNMPHTRLVAGLGADVEFGNGWNGLARYSYAGSKQYGNHSGRVGVGYRF

SEQ ID NO: 28113 - protein, 375 aa, Neisseria meningitidis
MFKKFKPVLLSFFALVFAFWLGTGIAYEINPRWFLSDTATEVPENPNAFVAKLARLFRNADRAVVIVKESMRTEESLAGTADDGPLQSEKDYLALAIRLSRLKEKAKWFHVTEQEHGEEVWLNYHIGEGGLVAVSLSQRSPEAFVNAEYLYRNDRPFSVNVYGGTAHGENYETTGEYRVVWQPDGSVFDASGYGKIGEDVYEHCLGCYQMAQVYLAKYRDVANDEQKVWDFREESNRIASDSRDSVFYQNMRELMPRGANSLVVGYDADGLPQKVYWSFDNGKKRQSFEYYLKNGNLFIAQSSTVALKADGVTADIQTYHAQQTWYLDGGRIIREEKQGDRLPDFPLNLENLEKEVRRYAEAAARRSGGRRDLSY

SEQ ID NO: 28114 - protein, 391 aa, Neisseria meningitidis
MDIQSKAKKLIEMIQTAPVEWKPLGEVASIGKGKQLNKSLLREKDKYPVINGGINPSGYWHEYNNEAGTIVISQGGASAGFVNWMDIPFFAGAHAYTIKANEDKLLQRFAYIFKNEANYIHAMSIRRGIPALAKSELQNLLIPIPPLETQQKIVKILDKFTELEATLEAELALRKRQYRYYRDFLLDFDNQIGGIADGYQCRLKDVVWKTLGEIAEYSKNRICSDKLNEHNYVGVDNLLQNREGKKLSGYVPSEGKMTEYIANDILIGNIRPYLKKIWQADCTGGTNGDVLVIRVTDEKVNPKYLYQVLADDKFFAFNMKHAKGAKMPRGSKAAIMQYKIPIPPLPEQEKIVAILDKFDTLTHSVSEGLPYEIALRRKQYEYYREQLLAFR

SEQ ID NO: 28115 - protein, 387 aa, Neisseria meningitidis
MNITIVAPYCSLPSEPYFNRFWYLAERLSQSHDVLLITSRFRHYDKSFRRHEDAAATSNGRLHVKLLDEPGYRKNVSLARVASHRVFVRNLARWLHSPQAAEQDIVYSAYPLMATNLLLGKHKARLGYKLIVDVQDVWPESFSSVVPFLKKVPHKLLPFASRANRAYRCADALVAVSQTYLDRAKEANPNVPGEAVYIGTDFAAIAPPRFRSKTTRLFYLGTLSYSYDVETVCKGVRKLLDDGEDVELHIMGGGPDLDRLKQYACEGIKFYGYIPYAEMMSVAKGCDISVNAIHSYSMASITNKLSDYMALQKPILNSQVNDEVAEVLTLLPHADYRSGDVDSFIQAAKDILARKNDPVQSDEIVRRFRRDISYRKIVNLIERLANE

SEQ ID NO: 28116 - protein, 375 aa, Neisseria meningitidis
MPTYLSRLSFSFSRRLPVILQTEAAECGLACLVSVLGFHGFYTDLRHLRARFSLSLKGATLADLVRFANSMNLTARAVRLDLDELANLRVPCILHWDLNHFVVLHEVHRNHIMIMNPASGWQKVRMEEVSRCFTGVALELFPNTQFEEKHETRKIRVLPMLRGVVGLKRSLFQLLPLATVLQVFALASPFFMQWVIDHAIVSADRDLLLTLALGFGLLMIVQQLVSLLQTWAGMYLSTSLNIQWKANVLRRLMDLCAISVLDGVFTVGALMAFMSYKSQFESKAGSLIDQFVQIKMLGLHAERLADIVLEETENEQNNDFRLPENLEHFDIQIENVSFRYAENEPYILQDFSLIIKQGTAKIPAATGIFVRLSPV

SEQ ID NO: 28117 - protein, 350 aa, Neisseria meningitidis
VFETPTFEQIRERILRDTKSLWPDADISPDSDHYVHASRLASCAEGQYAHQSWIVRQIFPDTADREYLERHASMRGLRRRNPTTASGTLTVSGIAQSMLSDGLQVRIGQRFYRTTARAVIGSGGTAEIPAIADEPGAAANVDGEAQLMAAPAGVATECRLTVQGGTDRESDASLLARLLEIIRRPPAGGNRYDYKNWALSVDGVTSAYVYPLRRGLGTVDIAITSADGVPSEETVRRVQAYIDEMRPVTAKNALVLKPTVTAVPVTVQVKLDGIDLDEAKRRIRTALKEYFDTLIPGDGLTVSQIEAAISNVDGVIDRRLTAPTANRAADTVNRIEWFKAGAINVTEMPS

SEQ ID NO: 28118 - protein, 550 aa, Neisseria meningitidis
MCKDVKPNFAEEAAPLGDMSEFAAPFAQPRYDVDGAGVWYIGVKTDREGNTQEATPVKLSSPIEIIGRGTDNDGAYYRVIRWQDANTRRTKIAAIPQSEIGTVQGWQRLQSYGLAVLSGRVKRERLSDYLQTQGSGDIYTITDRAGWHGNAYILPNGETINAEGANILYNGDTSQREGYTESGSLEEWRLHLAGSSSKGKTTAANLALSVWGSYEATKSNWDTTALGLQNAALARNDGFLALDEIGQTADPRRIPQMVYSVINGISKTQGAKDGGNRKQKTWRNLILSTGETNPESLIGDRAQWRAGNRARLPDIQAEAKHGIYDTLHGFTDGAKLSEHINRAAAKKYGTAGRALIRQILSDGKEAAAETIEATRARYLEALPPMEGQARRIARRFTLLAAVLEYAAPITGLKAGGAAVMQCFHEWLEENGTGDRDAEAICSQLDDFIAQYADSPRFLSWSERDAPYTMTGGKGKGHAGFKVQAGGNDEFYILPLVFREEIAQSFPIHTVCKVLSGKGRLKPSKTGYQHQIKVNKKPIRHYLIIEPLELD

SEQ ID NO: 28119 - protein, 399 aa, Neisseria meningitidis
MWTGFFSKSGTGIAEERHQNRHPRPHVPLSAERNSKYPDRPYGFAQYRQSGLDIYAWHGMYFFPRFPFIDIDRIRWVCAGLKAFKHYIRENGLPDLIHAHRMNYAGILAQKISQKYGIPYVVTEHSSTITRGLIRPHQWQPMEKAAAHASALLAVSRHFAHVLQHKYGCEWQYLPHILGGIFNRPFEQREKNNKPHFVFCTVSHLRRLKGHDVLLTAFARALAQCPQLRLNIGGSGQEEQRLKQQAADLGITHAVTFLGALQPEAVLDLMKNSDAFVLASRTETFGVVYIEALSQGLPVIATRCGGAESIVSDGNGYLVPVDDDDALADALIKMYEHHSDFEPARLRENCLNEFGENAVIGRLICIFRQAIAEYGKKIPVKYSGLTKIRTRRRSRRQYK

SEQ ID NO: 28120 - protein, 154 aa, Neisseria meningitidis
MQIDNISDEQVVIVRMSCYLKKDEIFKNIERYGYQSSDIKKISSPFPLNILPAPKPYYFYLYDTHLNQIYDLAWSCNDFLMFEIFILDRESIKYIDKDKLFKSGETLYSNFKSIKNQCKNYFCGFDFDAPYFKSGVSQVADYNFVPDAFSLFFI

SEQ ID NO: 28121 - protein, 140 aa, Neisseria meningitidis
LINMKTSTVVFGGFFMADNGERIQIPVLENPDIREINHFFVSNFEKKAGVLVFRIIPEPEFGDTELTIYFEKGYYLPMIQTILEDGDIEVKNLKTENYSGKAREILGDSYPIEHISKNISTIQNIISEFMIQKQTPAPII

SEQ ID NO: 28122 - protein, 702 aa, Neisseria meningitidis
MTLKASKQASKQASKQASKQASGRVNLLTLSVLSLFCTPYAWGSDAYDPVKEAEIKNKFILEAAENRDSHVWRGPCSISFDCFGMFSAQLGSNTRSTEIGGDADFSFSDKPANGVSHYFSSGKTDPNSSEALYDEINITGKNYNSGILAVDNMPVVKKYVTENYGADLKQAVKDQLKDLYKTRPEDWEKNKKIVEEAIIKQYGIPRNKINKFRKVIDPIIEEAVLTPHSNTSQTSLNNIFNKKLHVKIENKSHVAGQVLELTKMTLKDSLWEPRRHSDIHMLETSDNARIRLNTKDEKLTVHKAYQGGADFLFGYDVRESDKPALTFEEKVSGQSGVVLERRPENLKTLDGRKLIAAEKADSNSFAFKQNYRQGLYELLLKQCEGGFCLGVQRLAIPEAEAVLYAQQAYAANTLFGLRAADRGDDVYAADPSRQKLWLRFIGGRSHQNIRGGAAADGRRKGVQIGGEVFVRQNEGSRLAIGVMGGRAGQHASVNGKGGAAGSYLHGYGGGVYAAWHQLRDKQTGAYLDGWLQYQRFKHRINDENRAERYKTKGWTASVEGGYNALVAEGVVGKGNNVRFYLQPQAQFTYLGVNGGFTDSEGTAVGLLGSGQWQSRAGIRAKTRFALRNGVNLQPFAAFNVLHRSKSFGVEMDGEKQTLAGRTALEGRFGIEAGWKGHMSARIGYGKRTDGDKEAALSLKWLF

SEQ ID NO: 28123 - protein, 416 aa, Neisseria meningitidis
MFVPLAMLAGMFSYYETFHETEALQDDLLRQAALYVAPDSKPETLPEGDGDTRILVQMPQQEDPVVSLPAHLADGLHTLQADGDDDYYRVYIRTTEQGRIAVMQENEYREDLAADAAWQSVLPLLAALPLMILLTVWITHQAMRPVRKLSQSLEQRRINDLSALSVDNIPSEIRGFVTAINLLLKRADEDIRHRQRFVADAAHELRTPMTALSLQAERLNNMSLPPDAARQPAVLQQSIRRNKHLLEQLLALARSQSDETPLTKTTFGLQSRFRQVLQELMPLALEKRQDIGVAVRGDVEVSADETEIYTLIKTFADNAVRYTPPEGRIDLGFTDEGKYLAVWVEDNGNGIPESERARVLDPFYRILGTEQQGTGLGLSIADTLAKKYGGHLELTDSRRFGHGLLIRALLDKETLK

SEQ ID NO: 28124 - protein, 673 aa, Neisseria meningitidis
MKLEASKQKFKKSFIISLFFSILYTSPLLAVDYVYDKTKLTDDEITRLKKLRDKTSEYWKKETYLITGDNPKVPSVPALYSKTHQFKNINNSKKISFYDKEYTEDYLVGFARGFGVEKRNGEEEKTLQQYFKDCVNTGNSNNDKCEQPSFENSGPRLIKSDIFALAPQIKNSHINSEILSVGNYIEWLRPTLNKLPSWQEHLYSGLDPFHYIEVTDNSHVIGQTISLDEFRLENSLWEPRWDSDVGELKTTNADIRFNTKSESLLVKEDYAGGARFRFAYGLKDKVPETPILTFEKNITGTSDIIFEGKALDNLKHLDGHQIIKVNGTADKHAFRLSGKHQKGIYTLSLQQRPEGFFTKVQERDDIAIYAQQAQAANTLFALRLNDKNSDIFDRTLPRKGLWLRVIDGHSKQWVQGKTAPVEGYRKGVQLGGEVFTWQNESNQLSVGLMGGQAEQRSTFRNPDTDNLTTGNVKGFGAGVYATWHQLQDKQTGAYADSWVQYQRFRHRINTEDGTERFTSKGITASIEAGYNALLAEHVTKKGNSLRVYLQPQAQLTYLGVNGKFSDSENAHVNLLGSRQLQSRVGVQAKAQFAFTNGVTFQPFVSVNSIYQQKPFGVEMDGERRVINNKTAIESQLGVAVKIKSHLTLQATFNRQTGKHHQAKQGALNLQWTF

SEQ ID NO: 28125 - protein, 656 aa, Neisseria meningitidis
MLPSQAKPSQAKPSQAKPSQAKPSPDLSDTAGANTEAIYTSDGITANSTQLEQLKKLFPACFDADGNFLIDRLQAEIAPQTDIGREFYEMNWLGKSYARLLRNLPPETLISEDKTHNAKPENVGSQNLLIRGDNLEVLKHLKNAYTNSVKMIYIDPPYNTGSDGFVYQDDRKFTPAELALLANIDEDEAARILDFTDKGSNSHSAWLTFMYPRLYIARELLKDDGVIFISIDDNEAAQLKLLCDEVFGEGNFVANVIWQKKYSPQNDAKWFSNMHDYILCVAKNKDIWRPNLLERTEEQNARYSNPDNDERGNWKATDFSVKTYSENYDYPITTPSGRIVNPPPSRSWRTSKENFEKLLADNRVWFGINGNNVPSIKKFLTEVKQGITPSTILFRENVGDNQEAAKNIRDLFDIPPFETPKPVRLLNYLIKLSSNSDDIVMDFFAGSGTTAHAVMQLNAEEQNGSRRYICVQLPEKTGEKSEARKAGYPTIFDITKARIEKAAAKIRAEHPDYTGDLGFKIFQTADNFRQHPDKDFSPEQPDLPLNDELSEEQLQTLLTTWTLYDGAALTTPVEPVRLGSYTAYLCEKRLYLMNAGFTSADLLAFIRKLDDDAAFNPNRVIVFGSNMASAMQHELDQAVRGYTNKKEIELNVIIRV

SEQ ID NO: 28126 - protein, 177 aa, Neisseria meningitidis; identical to SEQ ID NO: 6774

SEQ ID NO: 28127 - protein, 222 aa, Neisseria meningitidis; identical to SEQ ID NO: 7279

SEQ ID NO: 28128 - protein, 461 aa, Neisseria meningitidis
MTRTEHDTMGNVEVPSEAYWGAQTQRSRNNFKIGGETLPQPLIYALALVKKAAAATNVSLGRIKPEQADLITQAADDVLNGKLDGQFPLVVWQTGSGTQSNMNMNEVLANRANEIAGTGLAAYRPVHPNDHVNHAQSTNDAFPTAIHVAAAIEINRHLIPAVKALRDTLDKKAQAFAPIVKIGRTHLQDATPLTLGQEFSGYVSQLDHGLGRLNDALKDLYELALGGTAVGTGLNSHPEYAEKAAAKLAELSGLPFVSAPNKFEALGGRDAAVAASGALKTLAASLNKIANDIRWLASGPRCGLGEIKIPENEPGSSIMPGKVNPTQCEAMTMVCCQVFGNDVTIGMAGASGNFELNVYMPVIAYNLLQSIRLLGDACNSFNEHCAVGIEPVPEKIDYFLHHSLMLVTALNRKIGYENAAKVAKTAYKNNKSLRETAVELGLLTGEEFDELVVPADMVHPR

SEQ ID NO: 28129 - protein, 148 aa, Neisseria meningitidis; identical to SEQ ID NO: 4019

SEQ ID NO: 28130 - protein, 1389 aa, Neisseria meningitidis; identical to SEQ ID NO: 23591

SEQ ID NO: 28131 - protein, 152 aa, Neisseria meningitidis; identical to SEQ ID NO: 5260

SEQ ID NO: 28132 - protein, 217 aa, Neisseria meningitidis; identical to SEQ ID NO: 3771

SEQ ID NO: 28133 - protein, 330 aa, Neisseria meningitidis; identical to SEQ ID NO: 7833

SEQ ID NO: 28134 - protein, 181 aa, Neisseria meningitidis; identical to SEQ ID NO: 14843

SEQ ID NO: 28135 - protein, 143 aa, Neisseria meningitidis; identical to SEQ ID NO: 26178

SEQ ID NO: 28136 - protein, 431 aa, Neisseria meningitidis; identical to SEQ ID NO: 9394

SEQ ID NO: 28137 - protein, 67 aa, Neisseria meningitidis; identical to SEQ ID NO: 7480

SEQ ID NO: 28138 - protein, 125 aa, Neisseria meningitidis; identical to SEQ ID NO: 1050

SEQ ID NO: 28139 - protein, 216 aa, Neisseria meningitidis; identical to SEQ ID NO: 4887

SEQ ID NO: 28140 - protein, 101 aa, Neisseria meningitidis; identical to SEQ ID NO: 705

SEQ ID NO: 28141 - protein, 248 aa, Neisseria meningitidis
MNVLISNDDGYLSEGIAVLARVTAEFANVRVVAPERDRSGVSNSLTLERPLQLKQAQNGFYYVNGTPTDCIHIGQSVFSDFQADFVFSGINRGANMGDDTLYSGTVAAATEAYLMGIPAVAFSLNDASGRYWATAEKALWTLLAHFFKNPPQSPILWNINIPAVAPEDVRGIKIARLGRRHHGQNVIPARNPRGEQIYWIGPVGEVSDREEGTDFGECGAGFITVTPLQIDLTAYPDMAETAAFWHAD

SEQ ID NO: 28142 - protein, 46 aa, Neisseria meningitidis; identical to SEQ ID NO: 6727

SEQ ID NO: 28143 - protein, 513 aa, Neisseria meningitidis; identical to SEQ ID NO: 14647

SEQ ID NO: 28144 - protein, 598 aa, Neisseria meningitidis
MNTVSNYLSALREAMKAQGLDALVIPSADPHLSEYLPAHWQARRELSGFTGSVGTFVVTADEAGVWVDSRYWEQAAKQLAGSGIELQKSGQVPPYNEWLAANLPENAAVGIPSDMVSLTGKRTLAQSLTAKNIRIEHPNDLLDQVWTSRPAIPAETVFIHDPAYVSETAAEKLARVRAVMAEKGADYHLVSSLDDIAWLTNLRGSDVPFNPVFVSFLLIGKDNAVLFTDRCRLNAEAAAALQTAGITVEPYAQVADKLAQIGGALLIEPNKTAVSTLVRLPESVRLIEGINPSTLFKSCKSEADIARIREAMEHDGAALCGFFAEFEDIIGNGGSLTEIDVDTMLYRHRSERPGFISLSFDTIAGFNANGALPHYSATPESHSTISGNGLLLIDSGAQYKGGTTDITRVVPVGTPTAEQKRDNTLVLKAHIALAEAVFPENIPSPLIDAICRKPLWQAQCDYGHGTGHGVGYFLNVHEGPQRIAFAAPATPETAMKKGMVTSIEPGLYRPGKWGIRIENLAANQAVADPQETEFGSFLCFETLTLCPIDTRLMDTALMTDGEIDWVNRYHAEVRRRLEPLTEGAAKAWLIKRTEPLAR

SEQ ID NO: 28145 - protein, 720 aa, Neisseria meningitidis
MQQKVRFQIEGMTCQACASRIEKVLNKKDFVKSAGVNFASEEAQVTFDDSKTSVADIAKIIEKTGYGAKEKTEDTLPQPEAEHHIGWRLWLLFTINVPFLIGMAGMMIGRHDWMIPPLWQFALASVVQLWLAIPFYKSAWASIKGGLANMDVLVTIGTVSIYLYSVYMLFFSPHAAYGMAHVYFEVGVMVIGFVSLGKFLEHRTKKSSLNSLGLLLKLTPTQVNVQRNGEWKQLPIDQVQIGDLIRANHGERIAADGIIESGSGWADESHLTGESNPEEKKAGGKVLAGALMTEGSVVYRATQLGSQTQLGDMMNALSEAQGSKAPIARVADKAAAVFVPAVVGIALLTFIVTWLIKGDWTVALMHAVAVLVIACPCALGLATPAAIMVGMGKAVKHGIWFKDAAAMEEAAHVDAVVLDKTGTLTEGSPQVAAVYCVPDSGFDEDALYRIAAAVEQNAAHPLARAIVSAAQARGLDIPAAQNAQTVVGAGITAEVEGVGLVKAGKAEFAELALPKFLDGVWDIASIVAVSVDNKPIGAFALADALKADTAEAIGRLKKHNIDVYIMSGDNQGTVEYVAKQLGIAHAFGNMSPRDKAAEVQKLKAAGKTVAMVGDGINDAPALAAANVSFAMKGGADVAEHTASATLMQHSVNQLADALLVSQATLKNIKQNLFFAFFYNILGIPLAALGFLNPVIAGAAMAASSVSVLSNALRLKRVKID

SEQ ID NO: 28146 - protein, 220 aa, Neisseria meningitidis; identical to SEQ ID NO: 17186

SEQ ID NO: 28147 - protein, 269 aa, Neisseria meningitidis
MTALPRYSVFGNPVAHSKSPQIHQQFALQEGVDIEYERICADIGGFAQAVSTFFGTGGCGANVTVPFKQEAFHLADEHSDRALAAGAVNTLILLKNGKLRGDNTDGIGLANDITQVKNIAIEGKTILLLGAGGAVRGVIPVLKEHRPARIVIANRTRAKAEELAQLFGIEAVPMADLNGGFDIIINGTSGGLNGQIPDIPPDIFQNCALAYDMVYGCAAKPFLDFARQSGAKKTADGLGMLVGQAAASYALWRGFTPDIRPVIEYMKAM

SEQ ID NO: 28148 - protein, 408 aa, Neisseria meningitidis; identical to SEQ ID NO: 6362

SEQ ID NO: 28149 - protein, 459 aa, Neisseria meningitidis; identical to SEQ ID NO: 14171

SEQ ID NO: 28150 - protein, 131 aa, Neisseria meningitidis; identical to SEQ ID NO: 3391

SEQ ID NO: 28151 - protein, 196 aa, Neisseria meningitidis; identical to SEQ ID NO: 1629

SEQ ID NO: 28152 - protein, 133 aa, Neisseria meningitidis; identical to SEQ ID NO: 6682

SEQ ID NO: 28153 - protein, 134 aa, Neisseria meningitidis; identical to SEQ ID NO: 15475

SEQ ID NO: 28154 - protein, 109 aa, Neisseria meningitidis; identical to SEQ ID NO: 15646

SEQ ID NO: 28155 - protein, 394 aa, Neisseria meningitidis; identical to SEQ ID NO: 277

SEQ ID NO: 28156 - protein, 65 aa, Neisseria meningitidis; identical to SEQ ID NO: 5454

SEQ ID NO: 28157 - protein, 370 aa, Neisseria meningitidis; identical to SEQ ID NO: 1989

SEQ ID NO: 28158 - protein, 181 aa, Neisseria meningitidis; identical to SEQ ID NO: 3765

SEQ ID NO: 28159 - protein, 173 aa, Neisseria meningitidis
MSCFSIKRMSAFRARITVFFTAFVFLTAALPAYAERLPDFLAKIQPSEIFPGADRYGKPEGKPMVARVYKGDEQLGLVYITTDAVNTRGYSSKPIDTLMALANDGTIAGAKLIDHHESIMLIGIPHLPAPGRAIRSNWLPAYIKPNFISTNRLRLKDLPTVPQPSKGTGAVVR

SEQ ID NO: 28160 - protein, 94 aa, Neisseria meningitidis; identical to SEQ ID NO: 6698

SEQ ID NO: 28161 - protein, 197 aa, Neisseria meningitidis; identical to SEQ ID NO: 763

SEQ ID NO: 28162 - protein, 65 aa, Neisseria meningitidis; identical to SEQ ID NO: 127

SEQ ID NO: 28163 - protein, 219 aa, Neisseria meningitidis; identical to SEQ ID NO: 13997

SEQ ID NO: 28164 - protein, 179 aa, Neisseria meningitidis; identical to SEQ ID NO: 8483

SEQ ID NO: 28165 - protein, 280 aa, Neisseria meningitidis; identical to SEQ ID NO: 14151

SEQ ID NO: 28166 - protein, 266 aa, Neisseria meningitidis
MNAFNLIIIGDEILHGSSQDKHFAFFKSLLESKGLKLNQVQYLPDEPDLLVRQLRRSFSDGMPTFVTGGIGATPDDHTRQAAAAALDLPVVRHPEAAKFIEGITQKRGEPLDSPEHAQRLKMADFPEGAELVPNPFNNTAGFSIREHYFFPGFPVMAHPMAEWVLETYYAGRFNQTERGSRSVYVFEQPESRITPLMEHIEQTYPGVRSYSLPSVGWTHSDGTQVKPHIEFGIKAEGEAVNLLDAAWAEVLHSLDGLGAELKNRVN

SEQ ID NO: 28167 - protein, 354 aa, Neisseria meningitidis; identical to SEQ ID NO: 14321

SEQ ID NO: 28168 - protein, 66 aa, Neisseria meningitidis; identical to SEQ ID NO: 2062

SEQ ID NO: 28169 - protein, 236 aa, Neisseria meningitidis; identical to SEQ ID NO: 2130

SEQ ID NO: 28170 - protein, 127 aa, Neisseria meningitidis; identical to SEQ ID NO: 2622

SEQ ID NO: 28171 - protein, 121 aa, Neisseria meningitidis; identical to SEQ ID NO: 14769

SEQ ID NO: 28172 - protein, 92 aa, Neisseria meningitidis; identical to SEQ ID NO: 419

SEQ ID NO: 28173 - protein, 83 aa, Neisseria meningitidis; identical to SEQ ID NO: 5347

SEQ ID NO: 28174 - protein, 355 aa, Neisseria meningitidis; identical to SEQ ID NO: 6342

SEQ ID NO: 28175 - protein, 389 aa, Neisseria meningitidis
MSKKLHPQTLAIRGGKEQTEYREHNQALFLTSSFMWDNAQHAADLFSKKIKGFTYTRTANPTTAAFEKRIAALEGAERAVATSTGMSAIQAAFFTFLQAGDHVISSRSLFGTTVGFINNIVTKFGIEVSHVSPTDINEWKAAVKANTKLLFLETPSNPLGEVADLEALAELAHGIGALLVVDNSLLSPVGSQPLKHGADISVSSATKAIDGHGRVMGGVLAGSEELMAQVAVYCNSCGLAMSPFNAWQLLSGVETLSLRMEKQFDNALKIAQWLQAQPQVQAVYYTGLPDHPQAALIRKQQNGGGIVIGFEVADQEAAWKVVDGVELFSRTANLGDVRSTITHPWTTTHGRMQPEEKLAANIRPGLVRLSVGLEYVGDLIDDLKQALAR

SEQ ID NO: 28176 - protein, 352 aa, Neisseria meningitidis; identical to SEQ ID NO: 327

SEQ ID NO: 28177 - protein, 503 aa, Neisseria meningitidis
MSEQNHPQTEPQLDENQIIALRREKLHNIRQQRNAYPNDFKRDSFAADLHAQYGEIGKEELDPQGIPVKVAGRMMLKRQMGKASFATIQDVSGQIQLYLNNKGVSQEVLDDFNHWDLGDIVGAEGTLFKTNHGELTVRVSDIRLLSKSLRPLPDKHKGLSDQETKYRQRYVDLIANEESRNTFIKRSQIIQSVRNFMVGEHYLEVETPMMHPIPGGATAKPFVTHHNALDIPLYLRIAPELYLKRLVVGGLERVFEINRSFRNEGMSVRHNPEFTMIEFYEAFSDYERMMQMAEDIIRNASRTVNGTANITYNGKEVDLESPFERLTILEAIKKYNPHYTDQQLNDAEWLKKEIVKHGESLPPSPGIGSLQLALFEGCAEGKLWNPTFIVDYPVEVSPLARASDTKQGLTERFELFVVGRELANGYSELNDPEDQAERFKAQVAQKDAGDDEAMHYDADYIRAMEFGLPPTGGCGIGIDRLVMLLTDSQTIRDVILFPQMRPE

SEQ ID NO: 28178 - protein, 339 aa, Neisseria meningitidis
MNTMLMSGAAAALLAGIILYFKSDKKRQENGEWSSGLEYAYILTAVGVFAALSLFMSFAAVFLIFVVLCGTAWGVYKYRLKTHPEISESSHFGDYFGSFFPTVLVLFLIRSFIAEPFQIPSSSMRPGLIKGDFILVGKFSYGLRVPVLNNIFIPTGKIERGDVVVFNYPLQPEMTYIKRIVGIPGDVVEYRDKILTVNGKPTSDIPNGTYRYPDDTDPSEIHNTDMFRSGLDGKSFNILKKEGQPAVSLPVLGKYTSDIMSENGYSIEQSGLEHCQYADDSSGFVCKVPEGRYFAMGDNRDNSADSRYWGFVDDKLVVGKAMFILMNFGDFGRAGTAIR

SEQ ID NO: 28179 - protein, 295 aa, Neisseria meningitidis
MYTGRFAPSPTGLLHIGSLLTAVASYADARAHGGRWLVRMEDLDPPREMPGAASHILHTLEAFGFEWYGEVAYQSRRYALYEETLCRLKTAGLVYPCHCSRKDWQAAAVHGADGFVYNGRCRNPQQRPALQGKQPAWRIRVPDRDIGFSDGIVGGYAQNLARDIGDFVLLRADGYWAYQLAVVADDAEQGVTHIVRGQDLLVSTPRQIYLQQCLGVPTPQYAHLPLLTNAQGQKWSKQTLAPALDLNRREQLLRQVFRYLNLPEAPEADRPAELLDWAVAHWDMDKVPKHAITTP

SEQ ID NO: 28180 - protein, 316 aa, Neisseria meningitidis; identical to SEQ ID NO: 24570

SEQ ID NO: 28181 - protein, 193 aa, Neisseria meningitidis
MKIRWRYGIAFPLILAVALGGLSAWLGRISEVEIEEVRLNPDEPQYTMDGLDGRRFDEQGYLKEHLSSKGAKQFPESSDIHFDSPHLVFFQEGRLLYEVGSDEAVYHTENKQVLFKNNVVLTKTADGRRQAGKVEAEKLHVDTESQYAQTDTPVSFQYGASHGQAGGMTYDHETGMLNFSSKVKATIYDTKDM

SEQ ID NO: 28182 - protein, 944 aa, Neisseria meningitidis
MNKKHGFQLTLTALAVATAFPAYAAQAGGATPDAAQTQSLKEVTVRAAKVGRRSKEATGLGKIVKTSETLNKEQVLGIRDLTRYDPGVAVVEQGNGASGGYSIRGVDKNRVAVSVDGVAQIQAFTVQGSLSGYGGRGGSGAINEIEYENISTVEIDKGAGSSDHGSGALGGAVAFRTKEAADLISDGKSWGIQAKTAYGSKNRQFMKSLGAGFSKDGWEGLLIRTERQGRETRPHGDIADGVAYGINRLDAFRQTHDIQSKDKPGQFFSVEGESESKPVAKLAGNGNYLKNQLNRWVEERRSKGQALNSEEEAMVREAQARHENLSAQAYTGGGRILPDPMDYRSGSWLAKLGYRFGGRHYVGGVFEDTKQRYDIRDMTEKQYYGTDEAKKFSDKSGVYDGNDFRDGLYFRPNIEEWKGDQKLIRGIGLKYSRTKFIDEHHRRRRMGLLYRYENEAYSDNWADKAVLSFDKQGVATDNNTLKLNCAVYPAVDKSCRASADKPYSYDSSDRFHYREQHNVLNASFEKSLKNKWTKHHLTLGFGYDASNAISRPEQLSHNAARISESTGFDDKNQDKYLLGKPEVVEGSVCGYIETLRSRKCVPRKINGSNIHISLNDRFSIGKYFDFSLGGRYDRKNFTTSEELVRSGRYVDRSWNSGIVFKPNRHFSLSYRASSGFRTPSFQELFGIDIYHDYPKDWQRPALKSEKAANREIGLQWKGDFGFLEISSFRNRYTDMIAVADHKTQLPDSTGRLTEIDIRDYYNAQNMSLQGINILGKIDWNGVYGKLPEGLYTTLAYNRIKPKSVSNRPGLSLRSYALDAVQPSRYVLGFGYDQPEGKWGANIMLTYSKGKNPDELAYLAGDQKRYSTKRASSSWSTADVSAYLNLKKRLTLRAAIYNIGNYRYVTWESLRQTAESTANRHGGDSNYGRYAAPGRNFSLALEMKF

SEQ ID NO: 28183 - protein, 170 aa, Neisseria meningitidis
MKNFNGKLILIGLMGAGKTTLGRQMAQRLDYRFYDSDHEIAVAAGVPIPTIFEMEGEQGFRSRETAILKKLVILPHIVLSTGGGAVLKEENRALIRKSGTVVYLHAPPETLLERTRCDNSRPLLQVADPLAKLRELYAARDPVYRQTADFTVESANCRQTVQTLLKRLSR

SEQ ID NO: 28184 - protein, 305 aa, Neisseria meningitidis
MSIIHYLSLHVESARTALKQLLRQPFGTLLTLIMLAVAMTLPLFMYLGIQSGQSVLGKLNESPQITIYMETAAAQSDSDTVRSLLTRDKRLDNIRFISKEDGLEELQSNLDQNLISMLDGNPLPDVFIVTPDPATTPDQMQAIYRDITKLPMVESASMDTEWVQTLYQINEFIRKILWFLSLTLGMAFVLVAHNTIRLQILSRKEEIEITKLLGAPASFIRRPFLYQAMWQSILSAAVSLGLCGWLLSAVRPLVDAIFKPYGLNIGWRFFYPGEIALVFGFVIALGVFGAWLATTQHLLGFKAKK

SEQ ID NO: 28185 - protein, 221 aa, Neisseria meningitidis
MTFTAVLFDLDGVITDTAEYHYRAWKKLAEELGIGIDRKFNEQLKGVSRDDSLKRILAHGGKTVGEAEFAELTRHKNDNYVEMIQAVKPEDVYPGILPLLEALKANGKKIALASASKNGPFLLERMGLTHFFDAIADPAAVAHSKPAPDIFLAAAEGVGADIRRCIGIEDAAAGVAAIKAAGALPIGVGKAEDLGSDIALVSGTAELTYAYLQNVWAQSGR

SEQ ID NO: 28186 - protein, 1026 aa, Neisseria meningitidis
MNKTLKRRVFRHTALYAAILMFSHTGGGGGAMAQTHQYAIIMNERKQPEVKSNVPSSIKDKDRKREYTHYKYKTGGGSVSFNNSDELVSQQSGTAVFGTATYLPPYGKVSGFDDKRLKERGNAVNWIHTTHPGLIGYSYAGVVCRDSTGCPKLVYKTRFSFDNPDLAKTGGGLDRHTEPSRDNSPIYKLKDHPWLGVSFNLGSENTVKNGNSFNKLISSFSENNNNQTIVSTTESHPISLGDGQREHTAVVYYLNAKLHLLDKKGIKDITDKTVQLGVLKPSIDVRKGAGWLSFWASWDIKDTGQIPVKLGLQQVKAGRCINKPNPNPKAQALSPALTAPALWFGPVQNGKMEMYSASVSTYPDSSSSRIFLQNLKRKNDPNKPGRYSLADLSASEIKSKEPTFTGRQTVIRLDKGVHQIKLKGNEVEGFKGNNGNDTFGIVSEGSFMPDDSEWKKVLLPWTVRAFNDDGQFNTVNKEENNGKPKYSQKYRSRNNGKHERNLGDIVNSPIVAVGEYLATSANDGMVHIFKKSGGDDRNYSLKLSYIPGTMPRKDIQSQDSTLAKELRAFAEKSYVGDRYGVDGGFVLRQVEWKGQNRVFMFGAMGFGGRGAYALDLTKAENGDPTAVSLFDVKHDNNGKNSNNSVQLGYTVGTPQIGKTHNGKYAAFLASGYATKDINNGDNKTALYVYDLESNNGTPIAKIEVPNGKGGLSSPTLVDKDLDGTVDIAYAGDRGGSMYRFDLSGNNPTSWSARAIFSGNKPITSAPAISQLKDKRVVIFGTGSDLSEEDVDSKEIQHVYGIFDNETDTGTAKDGQGNGLLEQVLSEENKTLFLTDYKRSDGSGSKGWVVKLKEGQRVTVKPTVVLRTAFVTIRKYNDGGCGAETAILGINTADGGKLTKKSARPIVPDTNTAIAQYSGHKKGTNGKSIPIGCMQKGNEIVCPNGYVYDKPVNVRYLDEKKTDGFSTTADGDAGGSGIDPAGKRAGKNNRCFSQKGVRTLLMNDLDSLDITGPMCGMKRISWREVFY

SEQ ID NO: 28187 - protein, 88 aa, Neisseria meningitidis; identical to SEQ ID NO: 255

SEQ ID NO: 28188 - protein, 896 aa, Neisseria meningitidis
MSDNRLDTARRHSLFLARQLDNGKLKPEIFLPMLDKVLTEADFQAFADWGEIRAEENEEELARQLRELRRYVVSQIIVRDINRISDLNEVTRTITLFADFAVNTALDFAYAYYRDMYGTPIGRYTKSPQHLSVVAMGKAGGYELNVSSDIDLIFVYPESGDTDGRRERGNQEFFTKVGQKLIALLNDITADGQVFRVDMRLRPDGDSGALVLSETALEQYLITQGREWERYAWCKGRVVTPYPNDIKALVRPFVFRKYLDYGAYEAMRKLHRQIRSEVSKKGMADNIKLGAGGIREVEFIAQIFQMIRGGQMRALQLKGTQETLKKLAELGIMLSEHVETLLAAYRFLRDVEHRLQYWDDQQTQTLPTSPEQRQLLAESMGFDSYAAFSDDLNVHRNKVNQLFNEILSEPEEQTQSNSEWQWTWQEKPDEEERLGRLKEYGFDAETIATRLDQIRNGHKYRHLSAHAQPRFDAIVPLFVQAAAEQNNPTDTLMRLLDFLENISRRSAYLAFLNEHPQTLAQLAQIMGQSSWVAAYLNKYPILLDELISAQLLDTAFDWQALAAALSDDLKACGGDTEAQMDTLRRFQHAQVFRLAVQDLAGLWTVESLSDQLSALADTILAAALLCAWADMPKKHRDTPQFAVVGYGKLGGKELGYASDLDLVYLYDDPHPDAGDVYSRLARRLTNWLSAATGAGSLYETDLRLRPNGDAGFLAHSIAAFEKYQRENAWTWEHQSLTRARFICGTPEIQTAFDRIRTEILTAERDQTALAGEIIEMREKMFPTHPPADSNVKYARGGVVDVEFIVQYLILAHARKYPQLLDNYGNIALLNIAADCSLIDKNLAGQSRTAYRFYRQQQHNTKLRDAAKTEVSDELLSHYGNVRKLWREVFGEEAATA

SEQ ID NO: 28189 - protein, 77 aa, Neisseria meningitidis; identical to SEQ ID NO: 1677

SEQ ID NO: 28190 - protein, 394 aa, Neisseria meningitidis
MTPQVLTILGSTGSIGESTLDVVSLHPEKFRVFALAGHKQVEKLAVQCRTFRPEYAVVADAEHAARLEALLKGDGTATQVLHGAQALVDVASADEVSGVMCAIVGAVGLPSALAAAQKGKTIYLANKETLVVSGALFMETARANGAAVLPVDSEHNAVFQVLPRDYAGRLNEHGIASIILTASGGPFLTADLNTFDSITPAQAVKHPNWSMGRKISVDSASMMNKGLELIEAHWLFNCPPEKLEVVIHPQSVIHSMVRYRDGSVLAQLGNPDMRTPIAYCLGLPERIDSGVGDLDFDALSALTFQKPDFDRFPCLKLAYEAMNAGGAAPCVLNAANEAAVAAFLDGQIKFTDIAKTVAHCLSQDFSDGIGDIGGLLAQDARTRAQARAFIGTLR

SEQ ID NO: 28191 - protein, 459 aa, Neisseria meningitidis; identical to SEQ ID NO: 14277

SEQ ID NO: 28192 - protein, 152 aa, Neisseria meningitidis; identical to SEQ ID NO: 1438

SEQ ID NO: 28193 - protein, 112 aa, Neisseria meningitidis; identical to SEQ ID NO: 191

SEQ ID NO: 28194 - protein, 72 aa, Neisseria meningitidis; identical to SEQ ID NO: 332

SEQ ID NO: 28195 - protein, 217 aa, Neisseria meningitidis; identical to SEQ ID NO: 10605

SEQ ID NO: 28196 - protein, 375 aa, Neisseria meningitidis
MYTFRPFPKLHTETHIMNIQNIRTLLDTVAVPNTARTLGGEKAVRSVEQRSDGIHIALHFGFPVAHIASETADRIQEILMPLTGDTHIHLSIDTEIGTHKVQPGVTTIKGVKNIIAVASGKGGVGKSTTTANLAAAMARMGARVGVLDADLYGPSQPTMLGVDDRKPDQKNQKLIPVESSDGIQVMSIGFLVDTDQAVVWRGPMVSQALQQLMFQSEWDEVDYLFIDLPPGTGDIQLTLSQRIPVTGSVIVTTPQDIALIDARKAVDMFRKVNIPILGVLENMSVHICTNCGHSEALFGTDGGKDLAARLNVPLLGQLPLSLPVREAMDGGTPAQLFDEHPAIAKIYTDAAFQIALSIADKGKDFSSRFPKIVVE

SEQ ID NO: 28197 - protein, 127 aa, Neisseria meningitidis; identical to SEQ ID NO: 2146

SEQ ID NO: 28198 - protein, 302 aa, Neisseria meningitidis
MNQTAINRADVRTRFIFDDMPVRGLHVRLENVWQHIVKQKNYPAAIRRALGELLAAGVLLSGNLKNEGTLIVQVQGQGRLKMLVAEATSDRTVRATARWDEAAEIADDESLGDLLGGNGVFVLTLQPKDGEPWQGVVPLEGDGIAQMLMNYMKRSEQLDTHIVLSASDEAAGGLLVQRLPEEVLDEEAWEHVSTLARTLTAGELAELDAQHVLYRLFHETPPRVFEPETFEFSCTCSRGKVSDMLLMLGGEEVGGVVAEQGSIEVDCDFCHSKYVFDETDVNALFGEDVVGVAREQTRHTVQ

SEQ ID NO: 28199 - protein, 230 aa, Neisseria meningitidis; identical to SEQ ID NO: 14788

SEQ ID NO: 28200 - protein, 124 aa, Neisseria meningitidis; identical to SEQ ID NO: 2472

SEQ ID NO: 28201 - protein, 698 aa, Neisseria meningitidis
MSIYLSRLSFGFSRRLLVVLQTEAAECGLACLVSVLGFHGFYTDLRHLRARFSLSLKGATLADLVRFANSMNLTARAVRLDLDELVNLRLPCILHWDLNHFVVLHEVHRNHIVIMNPASGWQKVRMEEVSRCFTGIALELFPNTQFEEKHETRKIRILPMLRGVVGLKRSLFQLLLLAAVLQVFALASPFFMQWVIDHAIVSADRDLLLTLALGFGLLMIVQQLVSLLQTWAGMYLSTSLNIQWKANVFRRLMDLPVSYFTKRHLGDVVSRFGSVDSIQSTLTSTFFVLVLNSIMAVFTLGLMYLYSPSLTAVVLVVLLIYIGIRWVAYYPLRHATEENIVHAAKQSSYFMETIRGIQTVKLFDKNAQRHAAWLNLFVDTINTGLTTQKLSAMFGFANSLLFGIANILIVYFGAVSVLDGVFTVGALMAFMSYKSQFESKAGSLIDQFVQIKMLGLHAERLADIVLEKTENEQNNDFRLPKNLEHFDIKIENISFRYAENEPYILQDFSLIIKQGTAIAFAGHSGCGKSTLIQILTGSLKPESGHVLLGENDIHAFPPAFIRKWSASVMQDDVLFAGSIAENISFFDDTPNMEKIAFCAQMANIHHEIVAMPMAYETLIGDMGSALSGGQKQRIVLARALYREPKILFLDEASSHLDINNERVINDNLRQLNITKIMVAHRQETLNTADSVVYLDKVA

SEQ ID NO: 28202 - protein, 109 aa, Neisseria meningitidis; identical to SEQ ID NO: 7275

SEQ ID NO: 28203 - protein, 844 aa, Neisseria meningitidis
VLKTPPTLAAELSGKTGVSISAPYANENSRILLSTTDISSENGKIKLQSYGDQFYYAGQGELYTFDKRSYKTGKWYKLKHVTEIKEHKNAKADPVSLSASQGIEIKSGGNIGAHATLFDAPRGSVKIEAGRGLVLYAVEDLNYDKLDTRTKRKFIGITYDKVHDTTTHTMKTALPSRVVAESANLQSGWDAKLQGTQFETTLGGAAIRAGVGDQARADAKIILEGIKSSVRTETVSSSKSALWQKQAGRGSNIETLQLPSFTGSVAPVLSAPGGYIVDIPKGNLKTEIEKLAKQPEYAYLKQLQTAKNVDWKQVQLVYDKWDYKAEGLTGAGAAIIALAVTVVTSGAGTGAVLGLNGAAAAATDAAFASLASQASVSFINNKGNIGNTLKELGRSSTVKNLVVAAATAGVADKIGASALNNVSDKQWINNLTVNLANAGSAALINTAVNGGSLKDNLEANILAALVNTAHGEAASKIKQLDQHYIVHKIAHAIAGCAAAAANKGKCQDGAIGAAVGEIVGEALVKNTDFSRMSATEIEKSKAKITAYSKLVAGTASAVVGGDVNTAANAAQIAVENNTLYPRCVGAKCDEFQKEQQKWIRENPEEYREVLLLQTGFIPIIGDIQSFVQAQTAADHLFALLGVVPGIGESIQAYKVAKAAKNLQGMKKALDKAATVATAQGYVSKTKIKIGQTELRVTAATDKQLLKAIGEGRDTTGKMTEQLFDSLAKQNGFRVLSGGKYGGNNGFDHVWQAADGSVVLIVESKQIRNGTVQLNPNGAGGYTQMSREWIKQVVKSLPDGSPAKAVVLKANQNGKLKTAIAGVDRQTGKAVILSVKVPSKTNIRR

SEQ ID NO: 28204 - protein, 324 aa, Neisseria meningitidis
MDTLTRFLPEHLQQNQLPEALGGVLLSVVSACTEINAKVRLGALAGVLGMAGTGNIQGEDQKKLDVIANNIMIDTLKANPAVAGLASEEEDTFVSAGENGRYLVLFDPLDGSSNIDVNISVGTIFSILEKPDGELKTESFLQAGRHQLAAGYVLYGPQTQLVFTFGHGVYMFTLNAENEFVLTKENPKVPESTKEFAINMSNRRHWLPPVQQYIDELLTGETGTRGKNYNMRWVASMVAEIHRILMRGGVFMYPQDKRDPAKPGKLRLMYEANPMSLILEQAGASASNAYQAMLDIQPENLHQRVAVFMGSSEEVAYLDRLHAK

SEQ ID NO: 28205 - protein, 454 aa, Neisseria meningitidis; identical to SEQ ID NO: 23950

SEQ ID NO: 28206 - protein, 480 aa, Neisseria meningitidis
MKQLAMYINGRFENDFNGEWRDVLNPSTEETIAREPKGGKADVDRAVAAARAAQPAWERLPAVERGAYLRKIAQGIRERADELTDTIVAEGGKTKDLARVEVMFTADYLDYQAEWARRYEGEIIQSDRPRENILLFKRPLGVIAGILPWNFPFFLIARKMGPALVTGNTIVVKPSSVTPINCHIFAEIVDAVGLPAGVFNVVNGPGAEIGNALSAHPQVDMVSLTGSVEAGRQVMEAASANITKVSLELGGKAPAIVLKDADLDLAVKSILASRVGNTGQICNCAERVYVHSCLKDAFIEKMTAAMKGVRYGNPAEAEAGALEMGPLIEERAVKAVAEKVERAVKQGAKLVCGGKRAEGRGYFFEPTLLTDTDNSMDIMKEETFGPVLPVSTFDTLDQVIALANDCEFGLTSSVYTTNLNEAFYVTRRLQFGETYINRENFEAMQGFHAGWKKSGIGGADGKHGLEEYLQTQVVYLETDI

SEQ ID NO: 28207 - protein, 81 aa, Neisseria meningitidis; identical to SEQ ID NO: 1361

SEQ ID NO: 28208 - protein, 348 aa, Neisseria meningitidis; identical to SEQ ID NO: 17185

SEQ ID NO: 28209 - protein, 223 aa, Neisseria meningitidis; identical to SEQ ID NO: 5959

SEQ ID NO: 28210 - protein, 193 aa, Neisseria meningitidis
MRNEEKRALRRELRGRRSQMGRDVRAAATVKINRLLKRYIKKGRKIGVYWPMGKELRLDGFVRVAQKRGAKLYLPYIEPRSRRMWFTPYPESGMERERIRGRAKLNVPQFAGRKRRVHDLNLLLVPVVGMDRLGYRLGQAGGYYDATLAAMKYRLQAKTVGVGFACQLVDRLSVEAHDLPLDGFVSEAGILCF

SEQ ID NO: 28211 - protein, 194 aa, Neisseria meningitidis; identical to SEQ ID NO: 15809

SEQ ID NO: 28212 - protein, 129 aa, Neisseria meningitidis; identical to SEQ ID NO: 15482

SEQ ID NO: 28213 - protein, 272 aa, Neisseria meningitidis; identical to SEQ ID NO: 7451

SEQ ID NO: 28214 - protein, 59 aa, Neisseria meningitidis
MPSKRTFCRSDGIFISFFRLPPLENPLRAALFETKQTPAANRTILIRSQSKSGGKLLNI

SEQ ID NO: 28215 - protein, 201 aa, Neisseria meningitidis; identical to SEQ ID NO: 6159

SEQ ID NO: 28216 - protein, 56 aa, Neisseria meningitidis; identical to SEQ ID NO: 14523

SEQ ID NO: 28217 - protein, 92 aa, Neisseria meningitidis; identical to SEQ ID NO: 2199

SEQ ID NO: 28218 - protein, 130 aa, Neisseria meningitidis; identical to SEQ ID NO: 17859

SEQ ID NO: 28219 - protein, 308 aa, Neisseria meningitidis; identical to SEQ ID NO: 15642

SEQ ID NO: 28220 - protein, 816 aa, Neisseria meningitidis; identical to SEQ ID NO: 15505

SEQ ID NO: 28221 - protein, 249 aa, Neisseria meningitidis; identical to SEQ ID NO: 131

SEQ ID NO: 28222 - protein, 212 aa, Neisseria meningitidis; identical to SEQ ID NO: 16264

SEQ ID NO: 28223 - protein, 57 aa, Neisseria meningitidis; identical to SEQ ID NO: 735

SEQ ID NO: 28224 - protein, 171 aa, Neisseria meningitidis; identical to SEQ ID NO: 15664

SEQ ID NO: 28225 - protein, 68 aa, Neisseria meningitidis; identical to SEQ ID NO: 2429

SEQ ID NO: 28226 - protein, 179 aa, Neisseria meningitidis; identical to SEQ ID NO: 11525

SEQ ID NO: 28227 - protein, 47 aa, Neisseria meningitidis; identical to SEQ ID NO: 17316

SEQ ID NO: 28228 - protein, 175 aa, Neisseria meningitidis; identical to SEQ ID NO: 7725

SEQ ID NO: 28229 - protein, 276 aa, Neisseria meningitidis; identical to SEQ ID NO: 15375

SEQ ID NO: 28230 - protein, 123 aa, Neisseria meningitidis; identical to SEQ ID NO: 616

SEQ ID NO: 28231 - protein, 469 aa, Neisseria meningitidis; identical to SEQ ID NO: 17435

SEQ ID NO: 28232 - protein, 485 aa, Neisseria meningitidis; identical to SEQ ID NO: 12288

SEQ ID NO: 28233 - protein, 155 aa, Neisseria meningitidis; identical to SEQ ID NO: 6688

SEQ ID NO: 28234 - protein, 100 aa, Neisseria meningitidis; identical to SEQ ID NO: 3521

SEQ ID NO: 28235 - protein, 431 aa, Neisseria meningitidis
MIRPDFQEYLPSYYFSSVNPHTVYPKLQCRLKTDTCIIGGGLSGLCTALPLAEQGHETVVLEAARIGFGASGRSGGQVISDYACGMEEIEKQVGLERAQWFWQQSLQAVELVDERVRKHAVDCDWQRGYATVAVRPQHWEELQQWHEHAQRHYGASHYQLWDKAELKQQLDSDMYQGAQFDPLSGHLHPLNYTLGIARAAAEAGAQIFEQSPMTRIEPHQNGWLVYTPEGSVECKNLVYAVNTYAGLSPIFKPLERKAIAVSTFIIATEPLGARAKGLIRNNMAVCDNRHILDYYRLSADGRLLFGGKDHEFIDDPARMTELVRQDMLKVFPQLADVRIEYSWGGECDITANLVPHFGRLAANVFYAQGYSGHGMAITGIAGLAVAEAILGDECRLKPFERLRQPNIILQPFLRKLGSFLGSKYYQWKDSR

SEQ ID NO: 28236 - protein, 143 aa, Neisseria meningitidis; identical to SEQ ID NO: 2619

SEQ ID NO: 28237 - protein, 2704 aa, Neisseria meningitidis
MNRTLYKVVFNKHRNCMIAVAENAKREGKNTADTQAVGILPNDIAGFAGFIHSISVISFSLSLLLGSALILTSSSATAQGIVADKSAPAQQQPTILQTGNGIPQVNIQTPTSAGVSVNQYAQFDVGNRGAILNNSRSNTQTQLGGWIQGNPWLARGEARVVVNQINSSHSSQLNGYIEVGGRRAEVVIANPAGIAVNGGGFINASRATLTTGQPQYQAGDLSGFKIRQGNVVIAGHGLDARDTDYTRILSYHSKIDAPVWGQDVRVVAGQNDVAATGDAHSPILNNAAANTSNNTANNGTHIPLFAIDTGKLGGMYANKITLISTVEQAGIRNQGQWFASAGNVAVNAEGKLVNTGMIAATGENHAVSLHARNVHNSGTVASQDDANIHSQTLDNSGTVLSSGRLTVRNLGRLKNQNNGTIQAARLDMSTGGLDNTGNITQTGSQALDLVSAGKFDNSGKIGVSDVPQTGLNPNPSVIPQIPSTATGSGSSTVSVSKPGSNNPVSPTAPAKNYAVGRIQTTGAFDNAGSINAGGQIDIAAQNGLGNSGSLNAAKLRVSGDSFNNTVKGKLQAHDLAVNTQTAKNSGHLLTQTGKIDNRELHNAGEIAANNLTLIHSGRLSNDKKGNIRAAHLQLDTAGLHNAGNILADSGTVTTKNNLRNTGKVSVARLNTEGQTLDNTRGRIEAETVNIQSQQLTNQSGHITATEQLTINSRNVDNQNGKLLSANQAQLAVSDGLYNQHGEIATNRQLSIHDKNQNTLALNNADGTIQSAGNVSLQAKSLANNGTLTAGNKLDIALTDDFVVERDLTAGKQLNLSIKGRLKNTHTLQAGHTLKLNAGNIDNQVTGKIIGGEQTDITSEQHVDNRGLINSDGLTHIGAGQTLTNTGTGKIYGNHIALDAQILLNREETTEGSTKAGAIAARKRLDIGAKEIHNQEGALLSSEGIFAVGNRLDEQHHAAGMADTFVNGSAGLEVQGDALMSVRNMQNINNHFKTETYLAKAEKQVRDYTVLGQNTYYQAGKDGLFDNSQGQKDQTTATFHLKNGSRIEANQWHVRDYHIETYKERIIENRPAHITVGGDLTASGQNWLNKDSRIVVGGRIITDDLNQKEITNQSTTGKGRTDAVGTQWDSVTKKGWYSGRKRQRRTERNHTPYHDTQLFTHDFDTPVSVIQQNAASPSFQPAASAIKLIDGVSTAAVNGQRIHTGNVVSLNNATVTLPNSSLYTTHPDNKGWLVETDPQFADYRRWLGSDYMLQQLQLDTNHLHKRLGDGYYEQKLVNEQIHQLTGYRRLDGYRSDEEQFKALMDNGLTAAKTFGLTPGIALSAEQVARLTSDIVWMENQTVTLSDGSTQTVLVPKVYALARKGDLNTSGGLISAEQVLLKLQNGNLTNSGTIAGRQAVLIQARNINSNGNIQADQIGLKAEKSINIDGGQVQAGRLLTAQAQNINLNGTTQTSGNERNGNTAIDRMAGINVVGSHTEQVDNRTSDGILSLHASNDINLNAATVSNQVKDGTTQITAGNNLNLGTIRTEHREAYGTLDDENHRHVRQSTEVGSSIRTQNGALLRAGNDLKIRQGELEAEEGKTVLAAGRDVTISEGRQITELDTSVSGKSKGILSSTKTQDRYRFSHDEAVGSNIGGGKMIVAAGQDINVRGSNLISDKGIVLKAGHDIDISTAHNRYTGNEYHESKKSGVMGTGGLGFTIGNLKTTDDTDRTNIVHIGSIIGSLNGDTVTVAGNRYRQTGSTVSSPEGRNTVTAKSIDVESANNQYATDYAHTQEQKGLTVALNVPVVQSAQNFIQAAQNVGKSKNKRVNAMAAANAAWQGYQAAQQMQQFAPSSSAGQGQNNNQSPSISVSITYGEQKSRNEQKRRYTEAAASQIIGKGQTTLAATGSGEQSNINITGSDVIGHAGTTLIADNHIRLQSAKQDGSEQSKNKSSGWNAGVAVKIGNGISFGITAGGNIGKGKEQGGSTTHRHTHVGSTTGKTTIRSGGDTTLKGAQLIGKGIQADTRNLHIESVQDTETSQSKQQNGNVQVTVGYGFSASGSYSQSKVKADHASVTEQSGIYAGEDGYQIKVGNHTDLKGGIITSGKSAEDKGKNLFQTATLTASDIQNHSRYEGRSFGIGGSFDLNGGWDGTVTDKQGRPTDRISLAAGYGSDSDSQSSITKSGINTRNIHITDEAGQLARTGRTAKETEARIYTGIDTETADQHTGRLKNSFDKDAVAKEINLQREVTKEFGRNAAQAVAAVADKLGNTQSYERYQEARTLLEAELQNTDSKAEKAAIRASLGQVNAYLAENQSRYDTWKEGGIGRSILHGAAGGLTTGSLGGILAGSGTSLAAPYLDKAAENLGPAGKAAVNALGGAVIGYAAGGNVGTAAVGANVDWNNRQLHPKEMALADKYAEALKREVEKREGRKISSQEAAMRIRRQILRWVDKGSQDGYTDQSVISLIGMKGEDKALGYTWDYRDYGARNPQTYNDPKLFEEYRRQDKPEYRNLTWLHSGTKDTKIRQGERKNEEFALNVAEGLTSLVNPNPRIKVPILAGIRNLKNIKPTVTGSDPLLAGAGNIRIPANGNVAKGDRIPDTALASKGIKHKNRKDQLEKNKKSGEDFEMEIYQKKVKQGFKPQRQITVKTKSGVKTRLDIISKEGGLDVCTECKASITAPLTKNQKKAFPEIERTGATVVGKGKPGYPKGTKIEPTKVIIERKR

SEQ ID NO: 28238 - protein, 589 aa, Neisseria meningitidis
MTVQTKTKGLAWQEKPLSDNERLKTESNFLRGTILDDLKDPLTGGFKGDNFQLIRFHGMYEQDDRDIRAERAEAKLEPLKFMLLRCRLPGGIIKPSQWIELDKFARENSHYRSIRLTNRQTFQFHGVPKAKLQTMHRLLHKLGLDSIATAADMNRNVLCTSNPIESELHRQAYEYAKKISEHLLPRTRGYLDVWVDGKKVQSSDDFLQEDEPILGKTYLPRKFKTAVVILPLNDVDCYGNDLDFVAISDGNGQLAGFNVLAGGGLSMEHGNTKTYPNISLELGFVPPEHALKAAEAVVTTQRDFGNRSDRKNARTRYTIQNMGLDNFRAEVERRMGMPFEPIRPFKFTGRGDRIGWVKGIDGNWHLTLFIESGRLVDEGGKQLLTGVLEIAKIHKGDFRITANQNLIVANVPERGKARIEQLARSYGLIHDGVSKLRENAMSCVSFPTCPLAMAEAERVLPDFIGELDKIMAKHGTSDDYIVTRITGCPNGCGRAMLAEIGLVGKAVGRYNLHIGGDREGVRIPRLYKENITLPEILAELDDLIGKWAAERNIGEGFGDFAIRTGIVKPVLNAPVDFWDASKAVAIARA

SEQ ID NO: 28239 - protein, 218 aa, Neisseria meningitidis; identical to SEQ ID NO: 15556

SEQ ID NO: 28240 - protein, 563 aa, Neisseria meningitidis
VNASQLISSLTQTVGEKYIITDPAKTEQYRQGYRFGEGKALAVVRPGSILEMWKILQACVEADVIVITQAANTGLTGGSTPDGNDYDRDIVIVNTMRMNIIQTINDNEQVVCLPGSTLNQLELLLKPLGREPHSVIGSSCIGASVLGGVCNNSGGALVQRGPAYTEMALFAQINEEGRLELVNHLGIDLGDTPEEILTNLQGHHYQNKDIKQDAGKGHDHAYCEHVRQVDEPTAARFNADPARHYEASGCAGKLMVFAVRLDTFPQEKQTAVFYIGTNDINELTDIRRAALGEFESLPVSGEYIHRHAFDIADVYGKDTFYVIKKFGTHQLPKLFDLKARVDRFGKKASFLPKHFSDKAMQFVSKYLPDHLPKSMRDYRDKYEHHLILKMGGKGVDEARAFLKEYFAHHGGAFFECNAEETQAAMLHRFAVASAAIRYRAVHDDEVEDLVALDIALRRDDRDWFEKLPSEIDNKIIHKLYYGHFMCHVFHQDYIIKKGNDCMALEHEMLHLLDQRGAQYPAEHNVGHLYEAKPALKQFYRKLDPTNSFNPGVGKTSKKKNWAE

SEQ ID NO: 28241 - protein, 169 aa, Neisseria meningitidis; identical to SEQ ID NO: 111

SEQ ID NO: 28242 - protein, 337 aa, Neisseria meningitidis; identical to SEQ ID NO: 6882

SEQ ID NO: 28243 - protein, 94 aa, Neisseria meningitidis; identical to SEQ ID NO: 6698

SEQ ID NO: 28244 - protein, 41 aa, Neisseria meningitidis; identical to SEQ ID NO: 15747

SEQ ID NO: 28245 - protein, 209 aa, Neisseria meningitidis; identical to SEQ ID NO: 15159

SEQ ID NO: 28246 - protein, 96 aa, Neisseria meningitidis; identical to SEQ ID NO: 6139

SEQ ID NO: 28247 - protein, 626 aa, Neisseria meningitidis
MNIFYEESGQFKIAAIIQKNDATYQVDTPHGKRTKVKANNVFAEFDGDMAAFLENAQAQAADIDTDLLWEVCGEEEFTAEAIAEEYYGHAPTKTELAATLIALYAAPVYFYKKAKGVFKAAPEETLKQALAAIERKKQQDAQIDAWAEALKRGEMPSEIAADLKTILHAPDKQSLTYKAFTKAADALKTSAYELAKKTGGITSIPQYLQDGFEIKYFPKGTGFPDLALPEMPDLPKADVTAFSIDDESTTEVDDALSLTDLGNGMKRVGIHIAAPSLAVKPGDKMEKNIMERLSTVYFPGGKITMLPENWIAAFSLDAGAYRPAVSIYFDVDSKFNVGEPTCKIEAVNIAENLRIQTIEPHFNAEAGLDEAGEMMFAHHQDLIWFYQFAITLQKARGKYEPDRAPQYDYSIELDEEGKVSVVRRERGSPIDTLVSEMMILANSTWAQMLHDNDLPGLFRVQPTGKVRMSTKSEPHIGMGVQHYGWFTSPLRRAADYINQKQLISLIDDTAEPLYQNSDAELFAALRDFDAAYTAYADFQRQMEAYWSLVYLQQQGTSELTATILKEDLVRIEGLPLVTRATGIPFDALPKSQALFKITELDAEKQFVSLNYIKAVAPAGTTAGNAV

SEQ ID NO: 28248 - protein, 407 aa, Neisseria meningitidis; identical to SEQ ID NO: 13936

SEQ ID NO: 28249 - protein, 214 aa, Neisseria meningitidis; identical to SEQ ID NO: 3176

SEQ ID NO: 28250 - protein, 91 aa, Neisseria meningitidis; identical to SEQ ID NO: 15322

SEQ ID NO: 28251 - protein, 37 aa, Neisseria meningitidis; identical to SEQ ID NO: 7611

SEQ ID NO: 28252 - protein, 461 aa, Neisseria meningitidis; identical to SEQ ID NO: 2017

SEQ ID NO: 28253 - protein, 136 aa, Neisseria meningitidis; identical to SEQ ID NO: 1274

SEQ ID NO: 28254 - protein, 737 aa, Neisseria meningitidis
MTAISPIQDTQSATLQELREWFDSYCAALPDNDKNLIGTAWLLAQEHYPADAATPYGEPLSDHFLGAAQMVHELDLLPDAVAATLLADIGRYVPDWNLLVSERCNSTVAELVKGVDEVQKLTHFARVDSLATPEERAQQAETMRKMLLAMVTDIRVVLIKLAMRTRTLQFLSNAPDSPEKRAVAKETLDIFAPLANRLGVWQLKWQLEDLGFRHQKPEKYREIALLLDEKRTERLEYIENFLNILRGELKKYNVHFEVAGRPKHIYSIYKKMVKKKLSFDGLFDIRAVRILVDTVPECYTTLGIVHSLWQPIPGEFDDYIANPKGNGYKSLHTVIVGPEDKGVEVQIRTFDMHQFNEFGVAAHWRYKEGGKGDSAYEQKIAWLRQLLDWRENMAESGKEDLAAAFKTELFNDTIYVLTPHGKVLSLPTGATPIDFAYALHSSIGDRCRGAKVEGQIVPLSTPLENGQRVEIITAKEGHPSVNWLYEGWVKSGKAISKIRAYIRQQNADTVREEGRVQIDKQLAKLTPKPNLQELAENLGFKKLDDLYTAVGQGEISNRAIQKACGTLNEPPPVPVSETTIVKQSKIKKGGKNGVLIDGEDGLMTTLAKCCKPAPPDDIVGFVTRDRGISVHRKTCPSFRHLAEQAPEKVLDTSWAALQEGQVFAVDIEIRAQDRSGLLRDVSDALARHKLNVTAVQTQSRDLEASMRFTLEVKQVTDLPRVLASLGDVKGVLSVTRL

SEQ ID NO: 28255 - protein, 57 aa, Neisseria meningitidis; identical to SEQ ID NO: 6070

SEQ ID NO: 28256 - protein, 591 aa, Neisseria meningitidis; identical to SEQ ID NO: 18403

SEQ ID NO: 28257 - protein, 140 aa, Neisseria meningitidis; identical to SEQ ID NO: 15194

SEQ ID NO: 28258 - protein, 250 aa, Neisseria meningitidis; identical to SEQ ID NO: 2637

SEQ ID NO: 28259 - protein, 238 aa, Neisseria meningitidis; identical to SEQ ID NO: 945

SEQ ID NO: 28260 - protein, 668 aa, Neisseria meningitidis
MADMKKITPQNLRPLLSESLGHTDFVNVLNALIKFLRRGGKKCAGERFDLIIDTFKQDRELLSRFSRCFYIWLAQIHIYPALIKLGIFSRHSFAREMGIRIYERFSPSYKDFANLGEVFLYLFHSENDDKWLQTLNIRQWLVLYELIRSHAEPSKLQTAGIRLADARLRAIEMLSVWTASEAIEPDLIRIAPRLLEADSSFVALQRETAKLVEHYRNGTTPYDTAHLEVMFDQCFSQIDYLRRKGTGAGSGSSVKVAHLLERLRQTVDRLKLLTDIQTGAGNSNRLTIALMNSLIYAAVEQYSTRHLRRSSIRMLARSITENKSHHGEHYITRNRKEYFKMFYSAAGGGIIIALMALLKIRIGTLGLSPFLTSLSAGFNYGIGFMIIHMLHCTVATKQPAMTAASFAEQVDLNEGGKAVDNKLAKLLIDVCRSQSVAVFGNVSIAILLACAISFGYAHLYRQPILDAHTAAYQFKSIDIIAYPTLWYAAIAGLWLFCSGIIAGFFDNRADYLNLRQRLPFNPLLRKIMRPGPRRVLAAYIHKHYGSLAGNFIFGMLLGMTGYFGHLLGLPLDIRHVAFSSANLGYAAVSGNVGLGTFVLGIFSVLAIGLVNLCVSFSLALFVALRSRGTKIGSIRNLIKSFWNQIKSNPCILFLPPAKEQGHPPSDKP

SEQ ID NO: 28261 - protein, 223 aa, Neisseria meningitidis
MTFSAILFYILAAIVLYGAVRTVTAKNPVHAALHLVLTFCVSAMLWMLMQAEFLGVTLVVVYVGAVMVLFLFVVMMLNIDIEEMRAGFWRHAPVAGVVGTLLAVALILILVNPKTDLAAFGLMKDIPADYNNIRDLGSRIYTDYLLPFELAAVLLLLGMVASIALVHRKTTNPKRMDPADQVKVRADQGRMRLVKMEAVKPQVESAEESEVSDGLKPEGEGKA

SEQ ID NO: 28262 - protein, 112 aa, Neisseria meningitidis; identical to SEQ ID NO: 6756

SEQ ID NO: 28263 - protein, 193 aa, Neisseria meningitidis; identical to SEQ ID NO: 1378

SEQ ID NO: 28264 - protein, 426 aa, Neisseria meningitidis; identical to SEQ ID NO: 13250

SEQ ID NO: 28265 - protein, 602 aa, Neisseria meningitidis; identical to SEQ ID NO: 2934

SEQ ID NO: 28266 - protein, 246 aa, Neisseria meningitidis
MLIVRPSGRAKDDVETCRRAGWQAEVLSPIEIEADAAGLELLSEQYARADAVFWVSPTAVETAVPYLNLSDGIKAQIAVGQGSRRALERCLVRTVIAPDDGNDSEAVLRLPVWNSLPEGARVLFVRGHGGRDFLMNALQEKGFRTEVAEVYFRRHKPLNFQNFQTENIAAAYITSTELVRLLFGQLPPQFSRFFKSLLYFTHHPRIAEALKREGVCSVETVPTLEAALSHSSISVSDGMVFPGTSN

SEQ ID NO: 28267 - protein, 950 aa, Neisseria meningitidis
MKLSELFNPDEFAARHLSFGDEAALLAAVGEKSMDDFVGNTVPQSIRMPSELDLPDALTEADALAKLKGIASKNVINKSYIGLGYYPTRVPNVILRNVLENPGWYTAYTPYQAEIAQGRLEALLNFQQVCIDLTGFPVAGASLLDEATAAAEAMAMAHRVGKVKSERFFVDERVYPQTLDVMKTRAKYFGFELVVGDFAKADEGEYFGALFQYVGKDGDVQDLQDVIGRLKAKGTIVAVAADIMSLVLLKSPAELGADIALGNTQRFGVPMGFGGPHAAYFAFKDEFKRSAPGRIIGVSKDASGKPALRMALSTREQHIRREKATSNICTAQALLANLAGMYAVYHGPEGVKRIANRIHALASAFADALVSDGLNVVHKVFFDTVTVDFGNKEKADQVFAAALESGYNLRRVNDTQVAAAFHETSACEDLVDLYRAFTGKDTFAFADDVKGRLNAELLRQDDILQHPVFNSYHTEHEMLRYLKKLEDRDLAMNRSMISLGSCTMKLNATAEMLPITWAEFSDIHPYAPEAQTAGYRELLADMENSLKAITGFDAISFQPNSGAQGEYSGMLSIRRYQEANGEGHRNICLIPKSAHGTNPATAAMLGLKVVVVDTDEHGNVNIDDLKAKAEQHRDALSAIMITYPSTHGVYEEGIRDICRIIHENGGQVYMDGANLNAQIGIMQPAEVGADVLHMNLHKTFCIPHGGGGPGMGPIGLKAHLAPFAPGHALTDTHSTSAEQTAVAAAAYGSASILPITWMYLTMMGKQGMEQATRWALLNANYVAKRLGEDYPILYTGKNGRVAHECIVDLRPLKAESGITETDIAKRLMDYGFHAPTVSFPVAGTLMIEPTESESKAELDRFIAALKQIKQEVLKVGRGEWPKDDNPLVNAPHTAADITGDWARPYSREEAVFPLPFVREHKFWPFVNRVDDVYGDRNLVCSCPPMENYED

SEQ ID NO: 28268 - protein, 245 aa, Neisseria meningitidis; identical to SEQ ID NO: 23227

SEQ ID NO: 28269 - protein, 140 aa, Neisseria meningitidis; identical to SEQ ID NO: 6150

SEQ ID NO: 28270 - protein, 148 aa, Neisseria meningitidis; identical to SEQ ID NO: 14771

SEQ ID NO: 28271 - protein, 360 aa, Neisseria meningitidis
MFLWLAHFSNWLTGLNIFQYTTFRAVMAALTALAFSLMFGPWTIHRLTALKCGQAVRTDGPQTHLVKNGTPTMGGSLILTAITVSTLLWGNWANPYIWILLGVLLATGALGFYDDWRKVVYKDPNGVSAKFKMVWQSSVAIIAGLALFYLAANSANNILIVPFFKQIALPLGVVGFLVLSYLTIVGTSNAVNLTDGLDGLATFPVVLVAAGLAIFAYASGHSQFAQYLQLPYVAGANEVVIFCTAMCGACLGFLWFNAYPAQVFMGDVGALALGAALGTVAVIVRQEFVLVIMGGLFVVEAVSVMLQVGWYKKTKKRIFLMAPIHHHYEQKGWKETQVVVRFWIITIVLVLIGLSTLKIR

SEQ ID NO: 28272 - protein, 119 aa, Neisseria meningitidis; identical to SEQ ID NO: 1252

SEQ ID NO: 28273 - protein, 117 aa, Neisseria meningitidis; identical to SEQ ID NO: 5140

SEQ ID NO: 28274 - protein, 518 aa, Neisseria meningitidis; identical to SEQ ID NO: 23658

SEQ ID NO: 28275 - protein, 144 aa, Neisseria meningitidis; identical to SEQ ID NO: 14346

SEQ ID NO: 28276 - protein, 294 aa, Neisseria meningitidis; identical to SEQ ID NO: 4254

SEQ ID NO: 28277 - protein, 140 aa, Neisseria meningitidis; identical to SEQ ID NO: 15310

SEQ ID NO: 28278 - protein, 45 aa, Neisseria meningitidis; identical to SEQ ID NO: 3752

SEQ ID NO: 28279 - protein, 54 aa, Neisseria meningitidis; identical to SEQ ID NO: 6606

SEQ ID NO: 28280 - protein, 237 aa, Neisseria meningitidis; identical to SEQ ID NO: 6806

SEQ ID NO: 28281 - protein, 128 aa, Neisseria meningitidis; identical to SEQ ID NO: 723

SEQ ID NO: 28282 - protein, 75 aa, Neisseria meningitidis
MDIKFNTLGVILNGGNPEEKFIKIIDDQENTGGFLILLSSNDKFSSFDSYDDWVENLEILKEYLQESHWIIKWVG

SEQ ID NO: 28283 - protein, 376 aa, Neisseria meningitidis; identical to SEQ ID NO: 6637

SEQ ID NO: 28284 - protein, 199 aa, Neisseria meningitidis; identical to SEQ ID NO: 2015
